United States Patent Application Publication US 2007/0214517 A1 - sequence listing, part 41

SEQ ID NO: 47449 - DNA, 1205 bp, Arabidopsis thaliana; identical to SEQ ID NO: 27607
  misc_feature (1)..(1205): Ceres Seq. ID no. 12332476
  misc_feature: MA Experiment ID: 108461 Result: Down-regulated in Transcription
  misc_feature: MA Experiment 108461 PARAMETER Experiment Name: At_Germinating_Seeds_cDNA_P Parameter: Age (day) Value: 1 vs. 0
  misc_feature: MA Experiment 108461 PARAMETER Experiment Name: At_Germinating_Seeds_cDNA_P Parameter: Tissue Value: Germinating Seeds
  misc_feature: MA Experiment ID: 108469 Result: Up-regulated in Transcription
  misc_feature: MA Experiment ID: 108572 Result: Up-regulated in Transcription
  misc_feature: MA Experiment 108572 PARAMETER Experiment Name: At_Drought_cDNA_P Parameter: Timepoint (hr) Value: 1
  misc_feature: MA Experiment 108572 PARAMETER Experiment Name: At_Drought_cDNA_P Parameter: Tissue Value: Aerial
  misc_feature: MA Experiment 108572 PARAMETER Experiment Name: At_Drought_cDNA_P Parameter: Treatment Value: Drought vs. No Drought
  misc_feature: MA Experiment ID: 108573 Result: Up-regulated in Transcription
  misc_feature: MA Experiment 108573 PARAMETER Experiment Name: At_Drought_cDNA_P Parameter: Timepoint (hr) Value: 6
  misc_feature: MA Experiment 108573 PARAMETER Experiment Name: At_Drought_cDNA_P Parameter: Tissue Value: Aerial
  misc_feature: MA Experiment 108573 PARAMETER Experiment Name: At_Drought_cDNA_P Parameter: Treatment Value: Drought vs. No Drought
  misc_feature: MA Experiment ID: 108574 Result: Up-regulated in Transcription
  misc_feature: MA Experiment 108574 PARAMETER Experiment Name: At_Wounding__cDNA_P Parameter: Timepoint (hr) Value: 1
  misc_feature: MA Experiment 108574 PARAMETER Experiment Name: At_Wounding__cDNA_P Parameter: Tissue Value: Aerial
  misc_feature: MA Experiment 108574 PARAMETER Experiment Name: At_Wounding__cDNA_P Parameter: Treatment Value: Wounding vs. No Wounding
  misc_feature: MA Experiment ID: 108585 Result: Up-regulated in Transcription
  misc_feature: MA Experiment 108585 PARAMETER Experiment Name: At_5mM_NaNP_cDNA_P Parameter: Timepoint (hr) Value: 6
  misc_feature: MA Experiment 108585 PARAMETER Experiment Name: At_5mM_NaNP_cDNA_P Parameter: Tissue Value: Aerial
  misc_feature: MA Experiment 108585 PARAMETER Experiment Name: At_5mM_NaNP_cDNA_P Parameter: Treatment Value: null
  misc_feature: MA Experiment ID: 108667 Result: Up-regulated in Transcription
  misc_feature: MA Experiment 108667 PARAMETER Experiment Name: At_2mM_SA_cDNA_P Parameter: Plant Line Value: WS
  misc_feature: MA Experiment 108667 PARAMETER Experiment Name: At_2mM_SA_cDNA_P Parameter: Timepoint (hr) Value: 1
  misc_feature: MA Experiment 108667 PARAMETER Experiment Name: At_2mM_SA_cDNA_P Parameter: Treatment Value: 2mM SA vs. No Treatment
  misc_feature: MA Experiment ID: 108668 Result: Up-regulated in Transcription
  misc_feature: MA Experiment 108668 PARAMETER Experiment Name: At_2mM_SA_cDNA_P Parameter: Plant Line Value: WS
  misc_feature: MA Experiment 108668 PARAMETER Experiment Name: At_2mM_SA_cDNA_P Parameter: Timepoint (hr) Value: 6
  misc_feature: MA Experiment 108668 PARAMETER Experiment Name: At_2mM_SA_cDNA_P Parameter: Treatment Value: 2mM SA vs. No Treatment
  misc_feature: MA Experiment ID: 20000086 Result: Up-regulated in Transcription
  misc_feature: MA Experiment 20000086 PARAMETER Experiment Name: At_100uM_ABA_Mutants_cDNA_P Parameter: Plant Line Value: CS22
  misc_feature: MA Experiment 20000086 PARAMETER Experiment Name: At_100uM_ABA_Mutants_cDNA_P Parameter: Timepoint (hr) Value: 6
  misc_feature: MA Experiment 20000086 PARAMETER Experiment Name: At_100uM_ABA_Mutants_cDNA_P Parameter: Tissue Value: Aerial
  misc_feature: MA Experiment 20000086 PARAMETER Experiment Name: At_100uM_ABA_Mutants_cDNA_P Parameter: Treatment Value: 100uM ABA vs. No Treatment
  misc_feature: MA Experiment ID: 20000087 Result: Up-regulated in Transcription
  misc_feature: MA Experiment 20000087 PARAMETER Experiment Name: At_100uM_ABA_Mutants_cDNA_P Parameter: Plant Line Value: WS
  misc_feature: MA Experiment 20000087 PARAMETER Experiment Name: At_100uM_ABA_Mutants_cDNA_P Parameter: Timepoint (hr) Value: 6
  misc_feature: MA Experiment 20000087 PARAMETER Experiment Name: At_100uM_ABA_Mutants_cDNA_P Parameter: Tissue Value: Aerial
  misc_feature: MA Experiment 20000087 PARAMETER Experiment Name: At_100uM_ABA_Mutants_cDNA_P Parameter: Treatment Value: 100uM ABA vs. No Treatment
  misc_feature: MA Experiment ID: 20000089 Result: Up-regulated in Transcription
  misc_feature: MA Experiment ID: 20000090 Result: Up-regulated in Transcription
  misc_feature: MA Experiment ID: 20000117 Result: Up-regulated in Transcription
  misc_feature: MA Experiment 20000117 PARAMETER Experiment Name: At_100uM_ABA_Mutants_cDNA_P Parameter: Plant Line Value: Columbia
  misc_feature: MA Experiment 20000117 PARAMETER Experiment Name: At_100uM_ABA_Mutants_cDNA_P Parameter: Timepoint (hr) Value: 6
  misc_feature: MA Experiment 20000117 PARAMETER Experiment Name: At_100uM_ABA_Mutants_cDNA_P Parameter: Tissue Value: Aerial
  misc_feature: MA Experiment 20000117 PARAMETER Experiment Name: At_100uM_ABA_Mutants_cDNA_P Parameter: Treatment Value: 100uM ABA vs. No Treatment
  misc_feature: MA Experiment ID: 20000179 Result: Down-regulated in Transcription
  misc_feature: MA Experiment 20000179 PARAMETER Experiment Name: At_Germinating_Seeds_P Parameter: Age (hr) Value: 6 vs. 0
  misc_feature: MA Experiment 20000179 PARAMETER Experiment Name: At_Germinating_Seeds_P Parameter: Tissue Value: Germinating Seeds
  misc_feature: MA Experiment ID: 20000180 Result: Down-regulated in Transcription
  misc_feature: MA Experiment 20000180 PARAMETER Experiment Name: At_Germinating_Seeds_P Parameter: Age (hr) Value: 24 vs. 0
  misc_feature: MA Experiment 20000180 PARAMETER Experiment Name: At_Germinating_Seeds_P Parameter: Tissue Value: Germinating Seeds
  misc_feature: MA Experiment ID: 20000182 Result: Up-regulated in Transcription
  misc_feature: MA Experiment 20000182 PARAMETER Experiment Name: At_2mM_SA_P Parameter: Age (day) Value: 14
  misc_feature: MA Experiment 20000182 PARAMETER Experiment Name: At_2mM_SA_P Parameter: Organism Value: A. thaliana
  misc_feature: MA Experiment 20000182 PARAMETER Experiment Name: At_2mM_SA_P Parameter: Plant Line Value: WS
  misc_feature: MA Experiment 20000182 PARAMETER Experiment Name: At_2mM_SA_P Parameter: Timepoint (hr) Value: 6
  misc_feature: MA Experiment 20000182 PARAMETER Experiment Name: At_2mM_SA_P Parameter: Tissue Value: Aerial
  misc_feature: MA Experiment 20000182 PARAMETER Experiment Name: At_2mM_SA_P Parameter: Treatment Value: 2mM SA vs. No Treatment
  misc_feature: MA Experiment ID: 20000185 Result: Up-regulated in Transcription
  misc_feature: MA Experiment 20000185 PARAMETER Experiment Name: At_Roots__P Parameter: Age (day) Value: 7 vs. 21
  misc_feature: MA Experiment 20000185 PARAMETER Experiment Name: At_Roots__P Parameter: Organism Value: A. thaliana
  misc_feature: MA Experiment 20000185 PARAMETER Experiment Name: At_Roots__P Parameter: Tissue Value: Roots vs. Whole Plant
  misc_feature: MA Experiment ID: 20000224 Result: Up-regulated in Transcription
  misc_feature: MA Experiment ID: 20000437 Result: Up-regulated in Transcription
  misc_feature: MA Experiment 20000437 PARAMETER Experiment Name: At_Drought_P Parameter: Age (day) Value: 8
  misc_feature: MA Experiment 20000437 PARAMETER Experiment Name: At_Drought_P Parameter: Organism Value: A. thaliana
  misc_feature: MA Experiment 20000437 PARAMETER Experiment Name: At_Drought_P Parameter: Plant Line Value: WS
  misc_feature: MA Experiment 20000437 PARAMETER Experiment Name: At_Drought_P Parameter: Timepoint (hr) Value: 24
  misc_feature: MA Experiment 20000437 PARAMETER Experiment Name: At_Drought_P Parameter: Tissue Value: Whole Plant
  misc_feature: MA Experiment 20000437 PARAMETER Experiment Name: At_Drought_P Parameter: Treatment Value: Drought vs. No Drought
  misc_feature: MA Experiment ID: 20000439 Result: Up-regulated in Transcription
  misc_feature: MA Experiment 20000439 PARAMETER Experiment Name: At_Roots__P Parameter: Age (day) Value: 14 vs. 21
  misc_feature: MA Experiment 20000439 PARAMETER Experiment Name: At_Roots__P Parameter: Organism Value: A. thaliana
  misc_feature: MA Experiment 20000439 PARAMETER Experiment Name: At_Roots__P Parameter: Tissue Value: Roots vs. Whole Plant
  misc_feature: MA Experiment ID: 20000527 Result: Down-regulated in Transcription
  misc_feature: MA Experiment 20000527 PARAMETER Experiment Name: At_10percent_PEG_P Parameter: Age (day) Value: 20
  misc_feature: MA Experiment 20000527 PARAMETER Experiment Name: At_10percent_PEG_P Parameter: Organism Value: A. thaliana
  misc_feature: MA Experiment 20000527 PARAMETER Experiment Name: At_10percent_PEG_P Parameter: Plant Line Value: WS
  misc_feature: MA Experiment 20000527 PARAMETER Experiment Name: At_10percent_PEG_P Parameter: Timepoint (day) Value: 20
  misc_feature: MA Experiment 20000527 PARAMETER Experiment Name: At_10percent_PEG_P Parameter: Tissue Value: Whole Plant
  misc_feature: MA Experiment 20000527 PARAMETER Experiment Name: At_10percent_PEG_P Parameter: Treatment Value: 10percent PEG vs. No Treatment
  misc_feature: MA Experiment ID: 20000794 Result: Down-regulated in Transcription
  misc_feature: MA Experiment 20000794 PARAMETER Experiment Name: At_Petals_P Parameter: Age (day) Value: 23-25 days
  misc_feature: MA Experiment 20000794 PARAMETER Experiment Name: At_Petals_P Parameter: Plant Line Value: WS
  misc_feature: MA Experiment 20000794 PARAMETER Experiment Name: At_Petals_P Parameter: Tissue Value: Petals vs. Whole plant
  misc_feature: MA Experiment ID: 20001247 Result: Down-regulated in Transcription
  misc_feature: MA Experiment 20001247 PARAMETER Experiment Name: At_Far-red-induction_P Parameter: Age (day) Value: 7
  misc_feature: MA Experiment 20001247 PARAMETER Experiment Name: At_Far-red-induction_P Parameter: Light Value: Far-red vs. White
  misc_feature: MA Experiment 20001247 PARAMETER Experiment Name: At_Far-red-induction_P Parameter: Organism Value: A. thaliana
  misc_feature: MA Experiment 20001247 PARAMETER Experiment Name: At_Far-red-induction_P Parameter: Plant Line Value: Columbia
  misc_feature: MA Experiment 20001247 PARAMETER Experiment Name: At_Far-red-induction_P Parameter: Timepoint (hr) Value: 1
  misc_feature: MA Experiment 20001247 PARAMETER Experiment Name: At_Far-red-induction_P Parameter: Tissue Value: Whole Plant
  misc_feature: MA Experiment ID: 20001451 Result: Down-regulated in Transcription
  misc_feature: MA Experiment 20001451 PARAMETER Experiment Name: At_Far-red-induction_P Parameter: Age (day) Value: 7
  misc_feature: MA Experiment 20001451 PARAMETER Experiment Name: At_Far-red-induction_P Parameter: Light Value: Far-red vs. White
  misc_feature: MA Experiment 20001451 PARAMETER Experiment Name: At_Far-red-induction_P Parameter: Organism Value: A. thaliana
  misc_feature: MA Experiment 20001451 PARAMETER Experiment Name: At_Far-red-induction_P Parameter: Plant Line Value: Columbia
  misc_feature: MA Experiment 20001451 PARAMETER Experiment Name: At_Far-red-induction_P Parameter: Timepoint (hr) Value: 24
  misc_feature: MA Experiment 20001451 PARAMETER Experiment Name: At_Far-red-induction_P Parameter: Tissue Value: Whole Plant
  misc_feature: MA Experiment ID: 20001560 Result: Up-regulated in Transcription
  misc_feature: MA Experiment 20001560 PARAMETER Experiment Name: At_Drought_Soil_Dry_P Parameter: Age (day) Value: 28
  misc_feature: MA Experiment 20001560 PARAMETER Experiment Name: At_Drought_Soil_Dry_P Parameter: Organism Value: A. thaliana
  misc_feature: MA Experiment 20001560 PARAMETER Experiment Name: At_Drought_Soil_Dry_P Parameter: Plant Line Value: WS
  misc_feature: MA Experiment 20001560 PARAMETER Experiment Name: At_Drought_Soil_Dry_P Parameter: Post Timepoint (hr) Value: None
  misc_feature: MA Experiment 20001560 PARAMETER Experiment Name: At_Drought_Soil_Dry_P Parameter: Post-Treatment Value: None
  misc_feature: MA Experiment 20001560 PARAMETER Experiment Name: At_Drought_Soil_Dry_P Parameter: Timepoint (day) Value: 14
  misc_feature: MA Experiment 20001560 PARAMETER Experiment Name: At_Drought_Soil_Dry_P Parameter: Treatment Value: Drought vs. No Drought
  misc_feature: MA Experiment ID: 20001904 Result: Up-regulated in Transcription
  misc_feature: MA Experiment 20001904 PARAMETER Experiment Name: At_Drought_Reproduction_P Parameter: Age (day) Value: 37
  misc_feature: MA Experiment 20001904 PARAMETER Experiment Name: At_Drought_Reproduction_P Parameter: Organism Value: A. thaliana
  misc_feature: MA Experiment 20001904 PARAMETER Experiment Name: At_Drought_Reproduction_P Parameter: Plant Line Value: WS
  misc_feature: MA Experiment 20001904 PARAMETER Experiment Name: At_Drought_Reproduction_P Parameter: Timepoint (day) Value: 7
  misc_feature: MA Experiment 20001904 PARAMETER Experiment Name: At_Drought_Reproduction_P Parameter: Tissue Value: Rosettes
  misc_feature: MA Experiment 20001904 PARAMETER Experiment Name: At_Drought_Reproduction_P Parameter: Treatment Value: Drought vs. No Drought
  misc_feature: MA Experiment ID: 20001905 Result: Up-regulated in Transcription
  misc_feature: MA Experiment 20001905 PARAMETER Experiment Name: At_Drought_Reproduction_P Parameter: Age (day) Value: 40
  misc_feature: MA Experiment 20001905 PARAMETER Experiment Name: At_Drought_Reproduction_P Parameter: Organism Value: A. thaliana
  misc_feature: MA Experiment 20001905 PARAMETER Experiment Name: At_Drought_Reproduction_P Parameter: Plant Line Value: WS
  misc_feature: MA Experiment 20001905 PARAMETER Experiment Name: At_Drought_Reproduction_P Parameter: Timepoint (day) Value: 10
  misc_feature: MA Experiment 20001905 PARAMETER Experiment Name: At_Drought_Reproduction_P Parameter: Tissue Value: Rosettes
  misc_feature: MA Experiment 20001905 PARAMETER Experiment Name: At_Drought_Reproduction_P Parameter: Treatment Value: Drought vs. No Drought

SEQ ID NO: 47450 - protein, 326 aa, Arabidopsis thaliana; identical to SEQ ID NO: 27608
  peptide (1)..(326): Ceres Seq. ID no. 12332477
  misc_feature (10)..(139): Pfam Name: NAD dependent epimerase/dehydratase family Pfam Description: NAD dependent epimerase/dehydratase family
  misc_feature (10)..(139): Pfam Name: NAD dependent epimerase/dehydratase family Pfam Description: NAD dependent epimerase/dehydratase family
  misc_feature (3)..(323): Homolog of NCBI NO: 5852203 NR Description: aldehyde reductase [Vigna radiata]
  misc_feature (3)..(326): Homolog of NCBI NO: 7431406 NR Description: probable cinnamyl-alcohol dehydrogenase (EC
  misc_feature (1)..(326): Homolog of NCBI NO: 34913420 NR Description: putative cinnamyl-alcohol dehydrogenase
  misc_feature (6)..(326): Homolog of NCBI NO: 25405464 NR Description: hypothetical protein F5D21.12 [imported] -
  misc_feature (3)..(326): Homolog of NCBI NO: 30694964 NR Description: cinnamyl-alcohol dehydrogenase (CAD), putative
  misc_feature (3)..(323): Homolog of NCBI NO: 5852203 NR Description: aldehyde reductase [Vigna radiata]
  misc_feature (1)..(326): Homolog of NCBI NO: 34913420 NR Description: putative cinnamyl-alcohol dehydrogenase
  misc_feature (3)..(326): Homolog of NCBI NO: 30694964 NR Description: cinnamyl-alcohol dehydrogenase (CAD), putative
  misc_feature (1)..(326): Homolog of NCBI NO: 21594240 NR Description: cinnamyl-alcohol dehydrogenase-like protein
  misc_feature (1)..(326): Homolog of NCBI NO: 15239741 NR Description: cinnamyl-alcohol dehydrogenase - like protein
  misc_feature (3)..(326): Homolog of NCBI NO: 7488627 NR Description: probable cinnamyl-alcohol dehydrogenase (EC
  misc_feature (2)..(326): Homolog of NCBI NO: 7431409 NR Description: cinnamyl-alcohol dehydrogenase (EC 1.1.1.195) -
  misc_feature (3)..(326): Homolog of NCBI NO: 37029996 NR Description: NADPH-dependent cinnamyl alcohol dehydrogenase
  misc_feature (6)..(326): Homolog of NCBI NO: 25405464 NR Description: hypothetical protein F5D21.12 [imported] -
  misc_feature (3)..(326): Homolog of NCBI NO: 7431406 NR Description: probable cinnamyl-alcohol dehydrogenase (EC
  misc_feature (3)..(326): Homolog of NCBI NO: 37029996 NR Description: NADPH-dependent cinnamyl alcohol dehydrogenase
  misc_feature (2)..(326): Homolog of NCBI NO: 7431409 NR Description: cinnamyl-alcohol dehydrogenase (EC 1.1.1.195) -
  misc_feature (3)..(326): Homolog of NCBI NO: 7488627 NR Description: probable cinnamyl-alcohol dehydrogenase (EC
  misc_feature (1)..(326): Homolog of NCBI NO: 15239741 NR Description: cinnamyl-alcohol dehydrogenase - like protein
  misc_feature (1)..(326): Homolog of NCBI NO: 21594240 NR Description: cinnamyl-alcohol dehydrogenase-like protein

SEQ ID NO: 47451 - protein, 196 aa, Arabidopsis thaliana; identical to SEQ ID NO: 27609
  peptide (1)..(196): Ceres Seq. ID no. 12332478
  misc_feature (1)..(109): Pfam Name: 3-beta hydroxysteroid dehydrogenase/isomerase family Pfam Description: 3-beta hydroxysteroid dehydrogenase/isomerase
  misc_feature (1)..(109): Pfam Name: 3-beta hydroxysteroid dehydrogenase/isomerase family Pfam Description: 3-beta hydroxysteroid dehydrogenase/isomerase
  misc_feature (1)..(193): Homolog of NCBI NO: 5852203 NR Description: aldehyde reductase [Vigna radiata]
  misc_feature (1)..(196): Homolog of NCBI NO: 7431406 NR Description: probable cinnamyl-alcohol dehydrogenase (EC
  misc_feature (1)..(196): Homolog of NCBI NO: 34913420 NR Description: putative cinnamyl-alcohol dehydrogenase
  misc_feature (1)..(196): Homolog of NCBI NO: 25405464 NR Description: hypothetical protein F5D21.12 [imported] -
  misc_feature (1)..(196): Homolog of NCBI NO: 30694964 NR Description: cinnamyl-alcohol dehydrogenase (CAD), putative
  misc_feature (1)..(193): Homolog of NCBI NO: 5852203 NR Description: aldehyde reductase [Vigna radiata]
  misc_feature (1)..(196): Homolog of NCBI NO: 34913420 NR Description: putative cinnamyl-alcohol dehydrogenase
  misc_feature (1)..(196): Homolog of NCBI NO: 30694964 NR Description: cinnamyl-alcohol dehydrogenase (CAD), putative
  misc_feature (1)..(196): Homolog of NCBI NO: 21594240 NR Description: cinnamyl-alcohol dehydrogenase-like protein
  misc_feature (1)..(196): Homolog of NCBI NO: 15239741 NR Description: cinnamyl-alcohol dehydrogenase - like protein
  misc_feature (1)..(196): Homolog of NCBI NO: 7488627 NR Description: probable cinnamyl-alcohol dehydrogenase (EC
  misc_feature (1)..(196): Homolog of NCBI NO: 7431409 NR Description: cinnamyl-alcohol dehydrogenase (EC 1.1.1.195) -
  misc_feature (1)..(196): Homolog of NCBI NO: 37029996 NR Description: NADPH-dependent cinnamyl alcohol dehydrogenase
  misc_feature (1)..(196): Homolog of NCBI NO: 25405464 NR Description: hypothetical protein F5D21.12 [imported] -
  misc_feature (1)..(196): Homolog of NCBI NO: 7431406 NR Description: probable cinnamyl-alcohol dehydrogenase (EC
  misc_feature (1)..(196): Homolog of NCBI NO: 37029996 NR Description: NADPH-dependent cinnamyl alcohol dehydrogenase
  misc_feature (1)..(196): Homolog of NCBI NO: 7431409 NR Description: cinnamyl-alcohol dehydrogenase (EC 1.1.1.195) -
  misc_feature (1)..(196): Homolog of NCBI NO: 7488627 NR Description: probable cinnamyl-alcohol dehydrogenase (EC
  misc_feature (1)..(196): Homolog of NCBI NO: 15239741 NR Description: cinnamyl-alcohol dehydrogenase - like protein
  misc_feature (1)..(196): Homolog of NCBI NO: 21594240 NR Description: cinnamyl-alcohol dehydrogenase-like protein

SEQ ID NO: 47452 - protein, 164 aa, Arabidopsis thaliana; identical to SEQ ID NO: 27610
  peptide (1)..(164): Ceres Seq. ID no. 12332479
  misc_feature (1)..(77): Pfam Name: 3-beta hydroxysteroid dehydrogenase/isomerase family Pfam Description: 3-beta hydroxysteroid dehydrogenase/isomerase
  misc_feature (1)..(77): Pfam Name: 3-beta hydroxysteroid dehydrogenase/isomerase family Pfam Description: 3-beta hydroxysteroid dehydrogenase/isomerase
  misc_feature (1)..(161): Homolog of NCBI NO: 5852203 NR Description: aldehyde reductase [Vigna radiata]
  misc_feature (1)..(164): Homolog of NCBI NO: 7431406 NR Description: probable cinnamyl-alcohol dehydrogenase (EC
  misc_feature (1)..(164): Homolog of NCBI NO: 34913420 NR Description: putative cinnamyl-alcohol dehydrogenase
  misc_feature (1)..(164): Homolog of NCBI NO: 25405464 NR Description: hypothetical protein F5D21.12 [imported] -
  misc_feature (1)..(164): Homolog of NCBI NO: 30694964 NR Description: cinnamyl-alcohol dehydrogenase (CAD), putative
  misc_feature (1)..(161): Homolog of NCBI NO: 5852203 NR Description: aldehyde reductase [Vigna radiata]
  misc_feature (1)..(164): Homolog of NCBI NO: 34913420 NR Description: putative cinnamyl-alcohol dehydrogenase
  misc_feature (1)..(164): Homolog of NCBI NO: 30694964 NR Description: cinnamyl-alcohol dehydrogenase (CAD), putative
  misc_feature (1)..(164): Homolog of NCBI NO: 21594240 NR Description: cinnamyl-alcohol dehydrogenase-like protein
  misc_feature (1)..(164): Homolog of NCBI NO: 15239741 NR Description: cinnamyl-alcohol dehydrogenase - like protein
  misc_feature (1)..(164): Homolog of NCBI NO: 7488627 NR Description: probable cinnamyl-alcohol dehydrogenase (EC
  misc_feature (1)..(164): Homolog of NCBI NO: 7431409 NR Description: cinnamyl-alcohol dehydrogenase (EC 1.1.1.195) -
  misc_feature (1)..(164): Homolog of NCBI NO: 37029996 NR Description: NADPH-dependent cinnamyl alcohol dehydrogenase
  misc_feature (1)..(164): Homolog of NCBI NO: 25405464 NR Description: hypothetical protein F5D21.12 [imported] -
  misc_feature (1)..(164): Homolog of NCBI NO: 7431406 NR Description: probable cinnamyl-alcohol dehydrogenase (EC
  misc_feature (1)..(164): Homolog of NCBI NO: 37029996 NR Description: NADPH-dependent cinnamyl alcohol dehydrogenase
  misc_feature (1)..(164): Homolog of NCBI NO: 7431409 NR Description: cinnamyl-alcohol dehydrogenase (EC 1.1.1.195) -
  misc_feature (1)..(164): Homolog of NCBI NO: 7488627 NR Description: probable cinnamyl-alcohol dehydrogenase (EC
  misc_feature (1)..(164): Homolog of NCBI NO: 15239741 NR Description: cinnamyl-alcohol dehydrogenase - like protein
  misc_feature (1)..(164): Homolog of NCBI NO: 21594240 NR Description: cinnamyl-alcohol dehydrogenase-like protein

SEQ ID NO: 47453 - DNA, 1658 bp, Arabidopsis thaliana
  misc_feature (1)..(1658): Ceres Seq. ID no. 13647862
  misc_feature: MA Experiment ID: 20000169 Result: Up-regulated in Transcription
  misc_feature: MA Experiment 20000169 PARAMETER Experiment Name: At_100uM_ABA_P Parameter: Age (day) Value: 14
  misc_feature: MA Experiment 20000169 PARAMETER Experiment Name: At_100uM_ABA_P Parameter: Organism Value: A. thaliana
  misc_feature: MA Experiment 20000169 PARAMETER Experiment Name: At_100uM_ABA_P Parameter: Plant Line Value: WS
  misc_feature: MA Experiment 20000169 PARAMETER Experiment Name: At_100uM_ABA_P Parameter: Timepoint (hr) Value: 6
  misc_feature: MA Experiment 20000169 PARAMETER Experiment Name: At_100uM_ABA_P Parameter: Tissue Value: Aerial
  misc_feature: MA Experiment 20000169 PARAMETER Experiment Name: At_100uM_ABA_P Parameter: Treatment Value: 100uM ABA vs. No Treatment
  misc_feature: MA Experiment ID: 20000173 Result: Down-regulated in Transcription
  misc_feature: MA Experiment 20000173 PARAMETER Experiment Name: At_42deg_Heat_P Parameter: Age (day) Value: 14
  misc_feature: MA Experiment 20000173 PARAMETER Experiment Name: At_42deg_Heat_P Parameter: Organism Value: A. thaliana
  misc_feature: MA Experiment 20000173 PARAMETER Experiment Name: At_42deg_Heat_P Parameter: Plant Line Value: WS
  misc_feature: MA Experiment 20000173 PARAMETER Experiment Name: At_42deg_Heat_P Parameter: Temperature (deg C) Value: 42 vs. 22
  misc_feature: MA Experiment 20000173 PARAMETER Experiment Name: At_42deg_Heat_P Parameter: Timepoint (hr) Value: 6
  misc_feature: MA Experiment 20000173 PARAMETER Experiment Name: At_42deg_Heat_P Parameter: Tissue Value: Aerial
  misc_feature: MA Experiment ID: 20000184 Result: Down-regulated in Transcription
  misc_feature: MA Experiment 20000184 PARAMETER Experiment Name: At_Shoots__P Parameter: Age (day) Value: 7
  misc_feature: MA Experiment 20000184 PARAMETER Experiment Name: At_Shoots__P Parameter: Tissue Value: Shoots vs. Whole Plant
  misc_feature: MA Experiment ID: 20000227 Result: Down-regulated in Transcription
  misc_feature: MA Experiment 20000227 PARAMETER Experiment Name: At_Root-Tips-vs-Tops_P Parameter: Tissue Value: Root Tips vs. Root Tops
  misc_feature: MA Experiment ID: 20000438 Result: Down-regulated in Transcription
  misc_feature: MA Experiment 20000438 PARAMETER Experiment Name: At_Shoots__P Parameter: Age (day) Value: 14
  misc_feature: MA Experiment 20000438 PARAMETER Experiment Name: At_Shoots__P Parameter: Tissue Value: Shoots vs. Whole Plant
  misc_feature: MA Experiment ID: 20001247 Result: Down-regulated in Transcription
  misc_feature: MA Experiment 20001247 PARAMETER Experiment Name: At_Far-red-induction_P Parameter: Age (day) Value: 7
  misc_feature: MA Experiment 20001247 PARAMETER Experiment Name: At_Far-red-induction_P Parameter: Light Value: Far-red vs. White
  misc_feature: MA Experiment 20001247 PARAMETER Experiment Name: At_Far-red-induction_P Parameter: Organism Value: A. thaliana
  misc_feature: MA Experiment 20001247 PARAMETER Experiment Name: At_Far-red-induction_P Parameter: Plant Line Value: Columbia
  misc_feature: MA Experiment 20001247 PARAMETER Experiment Name: At_Far-red-induction_P Parameter: Timepoint (hr) Value: 1
  misc_feature: MA Experiment 20001247 PARAMETER Experiment Name: At_Far-red-induction_P Parameter: Tissue Value: Whole Plant
  misc_feature: MA Experiment ID: 20001248 Result: Down-regulated in Transcription
  misc_feature: MA Experiment 20001248 PARAMETER Experiment Name: At_Far-red-induction_P Parameter: Age (day) Value: 7
  misc_feature: MA Experiment 20001248 PARAMETER Experiment Name: At_Far-red-induction_P Parameter: Light Value: Far-red vs. White
  misc_feature: MA Experiment 20001248 PARAMETER Experiment Name: At_Far-red-induction_P Parameter: Organism Value: A. thaliana
  misc_feature: MA Experiment 20001248 PARAMETER Experiment Name: At_Far-red-induction_P Parameter: Plant Line Value: Columbia
  misc_feature: MA Experiment 20001248 PARAMETER Experiment Name: At_Far-red-induction_P Parameter: Timepoint (hr) Value: 4
  misc_feature: MA Experiment 20001248 PARAMETER Experiment Name: At_Far-red-induction_P Parameter: Tissue Value: Whole Plant
  misc_feature: MA Experiment ID: 20001451 Result: Down-regulated in Transcription
  misc_feature: MA Experiment 20001451 PARAMETER Experiment Name: At_Far-red-induction_P Parameter: Age (day) Value: 7
  misc_feature: MA Experiment 20001451 PARAMETER Experiment Name: At_Far-red-induction_P Parameter: Light Value: Far-red vs. White
  misc_feature: MA Experiment 20001451 PARAMETER Experiment Name: At_Far-red-induction_P Parameter: Organism Value: A. thaliana
  misc_feature: MA Experiment 20001451 PARAMETER Experiment Name: At_Far-red-induction_P Parameter: Plant Line Value: Columbia
  misc_feature: MA Experiment 20001451 PARAMETER Experiment Name: At_Far-red-induction_P Parameter: Timepoint (hr) Value: 24
  misc_feature: MA Experiment 20001451 PARAMETER Experiment Name: At_Far-red-induction_P Parameter: Tissue Value: Whole Plant
gaattctacagttctcatgctaaaccatattttttgctctctgttccttcaaaatcatttctttctcttctttgattcccaaagatcacttctttgtctttgatttttgattttttttctctctggcgtgaaggaagaagctttatttcatggagtctctgctctctagttcttctcttgtttccgctgctggtgggttttgttggaagaagcagaatctaaagctccactctttatcagaaatccgagttctgcgttgtgattcgagtaaagttgtcgcaaaaccgaagtttaggaacaatcttgttaggcctgatggtcaaggatcttcattgttgttgtatccaaaacataagtcgagatttcgggttaatgccactgcgggtcagcccgaggctttcgactcgaatagcaaacagaagtcttttagagactcgttagatgcgttttacaggttttctaggcctcatacagttattggcacagtgcttagcattttatctgtatctttcttagcagtagagaaggtttctgatatatctcctttacttttcactggcatcttggaggctgttgttgcagctctcatgatgaacatttacatagttgggctaaatcagttgtctgatgttgaaatagataaggttaacaagccctatcttccattggcatcaggagaatattctgttaacaccggcattgcaatagtagcttccttctccatcatgagtttctggcttgggtggattgttggttcatggccattgttctgggctctttttgtgagtttcatgctcggtactgcatactctatcaatttgccacttttacggtggaaaagatttgcattggttgcagcaatgtgtatcctcgctgtccgagctattattgttcaaatcgccttttatctacatattcagacacatgtgtttggaagaccaatcttgttcactaggcctcttattttcgccactgcgtttatgagctttttctctgtcgttattgcattgtttaaggatatacctgatatcgaaggggataagatattcggaatccgatcattctctgtaactctgggtcagaaacgggtgttttggacatgtgttacactacttcaaatggcttacgctgttgcaattctagttggagccacatctccattcatatggagcaaagtcatctcggttgtgggtcatgttatactcgcaacaactttgtgggctcgagctaagtccgttgatctgagtagcaaaaccgaaataacttcatgttatatgttcatatggaagctcttttatgcagagtacttgctgttaccttttttgaagtgactgacattagaagagaagaagatggagataaaagaataagtcatcactatgcttctgtttttattacaagttcatgaaattaggtagtgaactagtgaattagagttttattctgaaacatggcagactgcaaaaatatgtcaaagatatgaatttctgttgggtaaagaagtctctgcttgggcaaaatcttaaggttcggtgtgttgatataatgctaagcgaagaaatcgattctatgtagaaatttccgaaactatgtgtaaacatgtcagaacatctccattctatatcttcttctgcaagaaagctctgtttttatcaccg

SEQ ID NO: 47454 - protein, 393 aa, Arabidopsis thaliana
  peptide (1)..(393): Ceres Seq. ID no. 13647863
  misc_feature (106)..(392): Pfam Name: UbiA prenyltransferase family Pfam Description: UbiA prenyltransferase family
  misc_feature (96)..(390): Homolog of NCBI NO: 37519852 NR Description: unknown protein [Gloeobacter violaceus]
  misc_feature (90)..(390): Homolog of NCBI NO: 17230940 NR Description: hypothetical protein [Nostoc sp. PCC 7120]
  misc_feature (96)..(390): Homolog of NCBI NO: 16330366 NR Description: unknown protein [Synechocystis sp. PCC 6803]
  misc_feature (91)..(390): Homolog of NCBI NO: 23125851 NR Description: hypothetical protein [Nostoc punctiforme]
  misc_feature (73)..(393): Homolog of NCBI NO: 33391144 NR Description: homogentisic acid geranylgeranyl transferase
  misc_feature (97)..(393): Homolog of NCBI NO: 33391138 NR Description: homogentisic acid geranylgeranyl transferase
  misc_feature (84)..(393): Homolog of NCBI NO: 33391142 NR Description: homogentisic acid geranylgeranyl transferase
  misc_feature (115)..(223): Homolog of NCBI NO: 7485781 NR Description: hypothetical protein F19F24.15 - Arabidopsis
  misc_feature (270)..(381): Homolog of NCBI NO: 7485781 NR Description: hypothetical protein F19F24.15 - Arabidopsis
  misc_feature (1)..(393): Homolog of NCBI NO: 30680535 NR Description: tocopherol polyprenyltransferase (homogentisate
MESLLSSSSLVSAAGGFCWKKQNLKLHSLSEIRVLRCDSSKVVAKPKFRNNLVRPDGQGSSLLLYPKHKSRFRVNATAGQPEAFDSNSKQKSFRDSLDAFYRFSRPHTVIGTVLSILSVSFLAVEKVSDISPLLFTGILEAVVAALMMNIYIVGLNQLSDVEIDKVNKPYLPLASGEYSVNTGIAIVASFSIMSFWLGWIVGSWPLFWALFVSFMLGTAYSINLPLLRWKRFALVAAMCILAVRAIIVQIAFYLHIQTHVFGRPILFTRPLIFATAFMSFFSVVIALFKDIPDIEGDKIFGIRSFSVTLGQKRVFWTCVTLLQMAYAVAILVGATSPFIWSKVISVVGHVILATTLWARAKSVDLSSKTEITSCYMFIWKLFYAEYLLLPFLK

SEQ ID NO: 47455 - protein, 247 aa, Arabidopsis thaliana
  peptide (1)..(247): Ceres Seq. ID no. 13647864
  misc_feature (1)..(246): Pfam Name: UbiA prenyltransferase family Pfam Description: UbiA prenyltransferase family
  misc_feature (1)..(244): Homolog of NCBI NO: 37519852 NR Description: unknown protein [Gloeobacter violaceus]
  misc_feature (1)..(244): Homolog of NCBI NO: 17230940 NR Description: hypothetical protein [Nostoc sp. PCC 7120]
  misc_feature (1)..(244): Homolog of NCBI NO: 16330366 NR Description: unknown protein [Synechocystis sp. PCC 6803]
  misc_feature (1)..(244): Homolog of NCBI NO: 23125851 NR Description: hypothetical protein [Nostoc punctiforme]
  misc_feature (1)..(247): Homolog of NCBI NO: 33391144 NR Description: homogentisic acid geranylgeranyl transferase
  misc_feature (1)..(247): Homolog of NCBI NO: 33391138 NR Description: homogentisic acid geranylgeranyl transferase
  misc_feature (1)..(247): Homolog of NCBI NO: 33391142 NR Description: homogentisic acid geranylgeranyl transferase
  misc_feature (1)..(77): Homolog of NCBI NO: 7485781 NR Description: hypothetical protein F19F24.15 - Arabidopsis
  misc_feature (124)..(235): Homolog of NCBI NO: 7485781 NR Description: hypothetical protein F19F24.15 - Arabidopsis
  misc_feature (1)..(247): Homolog of NCBI NO: 30680535 NR Description: tocopherol polyprenyltransferase (homogentisate
MMNIYIVGLNQLSDVEIDKVNKPYLPLASGEYSVNTGIAIVASFSIMSFWLGWIVGSWPLFWALFVSFMLGTAYSINLPLLRWKRFALVAAMCILAVRAIIVQIAFYLHIQTHVFGRPILFTRPLIFATAFMSFFSVVIALFKDIPDIEGDKIFGIRSFSVTLGQKRVFWTCVTLLQMAYAVAILVGATSPFIWSKVISVVGHVILATTLWARAKSVDLSSKTEITSCYMFIWKLFYAEYLLLPFLK

SEQ ID NO: 47456 - protein, 246 aa, Arabidopsis thaliana
  peptide (1)..(246): Ceres Seq. ID no. 13647865
  misc_feature (1)..(245): Pfam Name: UbiA prenyltransferase family Pfam Description: UbiA prenyltransferase family
  misc_feature (1)..(243): Homolog of NCBI NO: 37519852 NR Description: unknown protein [Gloeobacter violaceus]
  misc_feature (1)..(243): Homolog of NCBI NO: 17230940 NR Description: hypothetical protein [Nostoc sp. PCC 7120]
  misc_feature (1)..(243): Homolog of NCBI NO: 16330366 NR Description: unknown protein [Synechocystis sp. PCC 6803]
  misc_feature (1)..(243): Homolog of NCBI NO: 23125851 NR Description: hypothetical protein [Nostoc punctiforme]
  misc_feature (1)..(246): Homolog of NCBI NO: 33391144 NR Description: homogentisic acid geranylgeranyl transferase
  misc_feature (1)..(246): Homolog of NCBI NO: 33391138 NR Description: homogentisic acid geranylgeranyl transferase
  misc_feature (1)..(246): Homolog of NCBI NO: 33391142 NR Description: homogentisic acid geranylgeranyl transferase
  misc_feature (1)..(76): Homolog of NCBI NO: 7485781 NR Description: hypothetical protein F19F24.15 - Arabidopsis
  misc_feature (123)..(234): Homolog of NCBI NO: 7485781 NR Description: hypothetical protein F19F24.15 - Arabidopsis
  misc_feature (1)..(246): Homolog of NCBI NO: 30680535 NR Description: tocopherol polyprenyltransferase (homogentisate
MNIYIVGLNQLSDVEIDKVNKPYLPLASGEYSVNTGIAIVASFSIMSFWLGWIVGSWPLFWALFVSFMLGTAYSINLPLLRWKRFALVAAMCILAVRAIIVQIAFYLHIQTHVFGRPILFTRPLIFATAFMSFFSVVIALFKDIPDIEGDKIFGIRSFSVTLGQKRVFWTCVTLLQMAYAVAILVGATSPFIWSKVISVVGHVILATTLWARAKSVDLSSKTEITSCYMFIWKLFYAEYLLLPFLK

SEQ ID NO: 47457 - DNA, 1074 bp, Arabidopsis thaliana
  misc_feature (1)..(1074): Ceres Seq. ID no. 14307627
  misc_feature: MA Experiment ID: 20000171 Result: Up-regulated in Transcription
  misc_feature: MA Experiment 20000171 PARAMETER Experiment Name: At_42deg_Heat_P Parameter: Age (day) Value: 14
  misc_feature: MA Experiment 20000171 PARAMETER Experiment Name: At_42deg_Heat_P Parameter: Organism Value: A. thaliana
  misc_feature: MA Experiment 20000171 PARAMETER Experiment Name: At_42deg_Heat_P Parameter: Plant Line Value: WS
  misc_feature: MA Experiment 20000171 PARAMETER Experiment Name: At_42deg_Heat_P Parameter: Temperature (deg C) Value: 42 vs. 22
  misc_feature: MA Experiment 20000171 PARAMETER Experiment Name: At_42deg_Heat_P Parameter: Timepoint (hr) Value: 1
  misc_feature: MA Experiment 20000171 PARAMETER Experiment Name: At_42deg_Heat_P Parameter: Tissue Value: Aerial
  misc_feature: MA Experiment ID: 20000173 Result: Up-regulated in Transcription
  misc_feature: MA Experiment 20000173 PARAMETER Experiment Name: At_42deg_Heat_P Parameter: Age (day) Value: 14
  misc_feature: MA Experiment 20000173 PARAMETER Experiment Name: At_42deg_Heat_P Parameter: Organism Value: A. thaliana
  misc_feature: MA Experiment 20000173 PARAMETER Experiment Name: At_42deg_Heat_P Parameter: Plant Line Value: WS
  misc_feature: MA Experiment 20000173 PARAMETER Experiment Name: At_42deg_Heat_P Parameter: Temperature (deg C) Value: 42 vs. 22
  misc_feature: MA Experiment 20000173 PARAMETER Experiment Name: At_42deg_Heat_P Parameter: Timepoint (hr) Value: 6
  misc_feature: MA Experiment 20000173 PARAMETER Experiment Name: At_42deg_Heat_P Parameter: Tissue Value: Aerial
  misc_feature: MA Experiment ID: 20000179 Result: Up-regulated in Transcription
  misc_feature: MA Experiment 20000179 PARAMETER Experiment Name: At_Germinating_Seeds_P Parameter: Age (hr) Value: 6 vs. 0
  misc_feature: MA Experiment 20000179 PARAMETER Experiment Name: At_Germinating_Seeds_P Parameter: Tissue Value: Germinating Seeds
  misc_feature: MA Experiment ID: 20000180 Result: Up-regulated in Transcription
  misc_feature: MA Experiment 20000180 PARAMETER Experiment Name: At_Germinating_Seeds_P Parameter: Age (hr) Value: 24 vs. 0
  misc_feature: MA Experiment 20000180 PARAMETER Experiment Name: At_Germinating_Seeds_P Parameter: Tissue Value: Germinating Seeds
  misc_feature: MA Experiment ID: 20000227 Result: Down-regulated in Transcription
  misc_feature: MA Experiment 20000227 PARAMETER Experiment Name: At_Root-Tips-vs-Tops_P Parameter: Tissue Value: Root Tips vs. Root Tops
  misc_feature: MA Experiment ID: 20000234 Result: Up-regulated in Transcription
  misc_feature: MA Experiment 20000234 PARAMETER Experiment Name: At_Siliques_P Parameter: Age (day) Value: 21
  misc_feature: MA Experiment 20000234 PARAMETER Experiment Name: At_Siliques_P Parameter: Organism Value: A. thaliana
  misc_feature: MA Experiment 20000234 PARAMETER Experiment Name: At_Siliques_P Parameter: Plant Line Value: WS
  misc_feature: MA Experiment 20000234 PARAMETER Experiment Name: At_Siliques_P Parameter: Tissue Value: Less Than 5mm Siliques vs. Whole Plant
  misc_feature: MA Experiment ID: 20000235 Result: Up-regulated in Transcription
  misc_feature: MA Experiment 20000235 PARAMETER Experiment Name: At_Siliques_P Parameter: Age (day) Value: 21
  misc_feature: MA Experiment 20000235 PARAMETER Experiment Name: At_Siliques_P Parameter: Organism Value: A. thaliana
  misc_feature: MA Experiment 20000235 PARAMETER Experiment Name: At_Siliques_P Parameter: Plant Line Value: WS
  misc_feature: MA Experiment 20000235 PARAMETER Experiment Name: At_Siliques_P Parameter: Tissue Value: 5-10mm Siliques vs. Whole Plant
  misc_feature: MA Experiment ID: 20000439 Result: Up-regulated in Transcription
  misc_feature: MA Experiment 20000439 PARAMETER Experiment Name: At_Roots__P Parameter: Age (day) Value: 14 vs. 21
  misc_feature: MA Experiment 20000439 PARAMETER Experiment Name: At_Roots__P Parameter: Organism Value: A. thaliana
  misc_feature: MA Experiment 20000439 PARAMETER Experiment Name: At_Roots__P Parameter: Tissue Value: Roots vs. Whole Plant
atctctaaccaccgacctcataagtcataagacaaaaacagagacactcctctcactctcattatttcattttctttccataaaaagcacgaatcttcaagaacaaagagagagggagagagaaaatttaatggcgttagcgaataacttaacggcgatactcaacttactagcgttactctgttccataccaataacggcgtcaggtatatggctagcttcaaagccagacaacgagtgtgtcaatctcctccgttggcccgttgtcgtcctcggcgttctcatcctcgtcgtctccgccacaggcttcatcggcgcctacaagtacaaggaaactctactggcggtttacttgtgctgtatggcgatattgatcggacttttgctggtggttttgatatttgctttcgttgtgacccgacccgacggatcgtatcgggttccgggtagaggttataaagaatataagcttgaagggttttcgaattggcttaaggagaacgttgttgattcgaagaactggggaaggctaagggcttgtttggctgatactaatgtttgtcctaaactcaaccaagaattcatcaccgccgatcagttcttctcctcctctaagatcactcctctccagtccggctgctgcaaaccaccgaccgcatgtggctacaactttgtgaacccaacactgtggctaaatccgacgaatatggctgcagacgcagactgttacttatggagcaatgaccaaagccagctttgttacaattgcaactcatgcaaagctggtttattgggaaaccttagaaaagaatggcgtaaagcaaatctcatacttatcatcacagtcgttgttctcatatgggtttatgttattgcttgtagcgcgtttaggaatgctcagactgaggatctcttccgcaaatacaaacaaggttgggtctaaaatgtgtgtttgtgtctataaatttgtttgtagtttgttgagattggagttttcggaaatagctcgtcatattatgatttctttgtgtgtggaaaaggtttttttctttttatggattttgtttctatgtt

SEQ ID NO: 47458 - protein, 313 aa, Arabidopsis thaliana
  peptide (1)..(313): Ceres Seq. ID no. 14307628
  misc_feature (46)..(285): Pfam Name: Tetraspanin family Pfam Description: Tetraspanin family
  misc_feature (43)..(305): Homolog of NCBI NO: 21537169 NR Description: senescence-associated protein-like protein
  misc_feature (43)..(298): Homolog of NCBI NO: 15234374 NR Description: senescence-associated protein, putative
  misc_feature (44)..(300): Homolog of NCBI NO: 15238641 NR Description: senescence-associated protein family [Arabidopsis
  misc_feature (42)..(309): Homolog of NCBI NO: 3551954 NR Description: senescence-associated protein 5 [Hemerocallis
  misc_feature (46)..(303): Homolog of NCBI NO: 29367553 NR Description: senescence-associated protein-like protein
  misc_feature (47)..(308): Homolog of NCBI NO: 20197174 NR Description: hypothetical protein [Arabidopsis thaliana]
  misc_feature (44)..(303): Homolog of NCBI NO: 15231187 NR Description: senescence-associated protein family [Arabidopsis
  misc_feature (44)..(312): Homolog of NCBI NO: 17979386 NR Description: putative senescence-associated protein 5
  misc_feature (44)..(312): Homolog of NCBI NO: 15237490 NR Description: senescence-associated protein, putative
  misc_feature (44)..(313): Homolog of NCBI NO: 15224802 NR Description: senescence-associated protein- related
SLTTDLISHKTKTETLLSLSLFHFLSIKSTNLQEQRERERENLMALANNLTAILNLLALLCSIPITASGIWLASKPDNECVNLLRWPVVVLGVLILVVSATGFIGAYKYKETLLAVYLCCMAILIGLLLVVLIFAFVVTRPDGSYRVPGRGYKEYKLEGFSNWLKENVVDSKNWGRLRACLADTNVCPKLNQEFITADQFFSSSKITPLQSGCCKPPTACGYNFVNPTLWLNPTNMAADADCYLWSNDQSQLCYNCNSCKAGLLGNLRKEWRKANLILIITVVVLIWVYVIACSAFRNAQTEDLFRKYKQGWV

SEQ ID NO: 47459 - protein, 270 aa, Arabidopsis thaliana
  peptide (1)..(270): Ceres Seq. ID no. 14307629
  misc_feature (3)..(242): Pfam Name: Tetraspanin family Pfam Description: Tetraspanin family
  misc_feature (1)..(262): Homolog of NCBI NO: 21537169 NR Description: senescence-associated protein-like protein
  misc_feature (1)..(255): Homolog of NCBI NO: 15234374 NR Description: senescence-associated protein, putative
  misc_feature (1)..(257): Homolog of NCBI NO: 15238641 NR Description: senescence-associated protein family [Arabidopsis
  misc_feature (1)..(266): Homolog of NCBI NO: 3551954 NR Description: senescence-associated protein 5 [Hemerocallis
  misc_feature (3)..(260): Homolog of NCBI NO: 29367553 NR Description: senescence-associated protein-like protein
  misc_feature (4)..(265): Homolog of NCBI NO: 20197174 NR Description: hypothetical protein [Arabidopsis thaliana]
  misc_feature (1)..(260): Homolog of NCBI NO: 15231187 NR Description: senescence-associated protein family [Arabidopsis
  misc_feature (1)..(269): Homolog of NCBI NO: 17979386 NR Description: putative senescence-associated protein 5
  misc_feature (1)..(269): Homolog of NCBI NO: 15237490 NR Description: senescence-associated protein, putative
  misc_feature (1)..(270): Homolog of NCBI NO: 15224802 NR Description: senescence-associated protein- related
MALANNLTAILNLLALLCSIPITASGIWLASKPDNECVNLLRWPVVVLGVLILVVSATGFIGAYKYKETLLAVYLCCMAILIGLLLVVLIFAFVVTRPDGSYRVPGRGYKEYKLEGFSNWLKENVVDSKNWGRLRACLADTNVCPKLNQEFITADQFFSSSKITPLQSGCCKPPTACGYNFVNPTLWLNPTNMAADADCYLWSNDQSQLCYNCNSCKAGLLGNLRKEWRKANLILIITVVVLIWVYVIACSAFRNAQTEDLFRKYKQGWV

SEQ ID NO: 47460 - protein, 193 aa, Arabidopsis thaliana
  peptide (1)..(193): Ceres Seq. ID no. 14307630
  misc_feature (1)..(165): Pfam Name: Tetraspanin family Pfam Description: Tetraspanin family
  misc_feature (1)..(185): Homolog of NCBI NO: 21537169 NR Description: senescence-associated protein-like protein
  misc_feature (1)..(178): Homolog of NCBI NO: 15234374 NR Description: senescence-associated protein, putative
  misc_feature (1)..(180): Homolog of NCBI NO: 15238641 NR Description: senescence-associated protein family [Arabidopsis
  misc_feature (1)..(189): Homolog of NCBI NO: 3551954 NR Description: senescence-associated protein 5 [Hemerocallis
  misc_feature (1)..(183): Homolog of NCBI NO: 29367553 NR Description: senescence-associated protein-like protein
  misc_feature (1)..(188): Homolog of NCBI NO: 20197174 NR Description: hypothetical protein [Arabidopsis thaliana]
  misc_feature (1)..(183): Homolog of NCBI NO: 15231187 NR Description: senescence-associated protein family [Arabidopsis
  misc_feature (1)..(192): Homolog of NCBI NO: 17979386 NR Description: putative senescence-associated protein 5
  misc_feature (1)..(192): Homolog of NCBI NO: 15237490 NR Description: senescence-associated protein, putative
  misc_feature (1)..(193): Homolog of NCBI NO: 15224802 NR Description: senescence-associated protein- related
MAILIGLLLVVLIFAFVVTRPDGSYRVPGRGYKEYKLEGFSNWLKENVVDSKNWGRLRACLADTNVCPKLNQEFITADQFFSSSKITPLQSGCCKPPTACGYNFVNPTLWLNPTNMAADADCYLWSNDQSQLCYNCNSCKAGLLGNLRKEWRKANLILIITVVVLIWVYVIACSAFRNAQTEDLFRKYKQGWV

SEQ ID NO: 47461 - DNA, 1306 bp, Arabidopsis thaliana
  misc_feature (1)..(1306): Ceres Seq. ID no. 15168769
  misc_feature: MA Experiment ID: 108573 Result: Down-regulated in Transcription
  misc_feature: MA Experiment 108573 PARAMETER Experiment Name: At_Drought_cDNA_P Parameter: Timepoint (hr) Value: 6
  misc_feature: MA Experiment 108573 PARAMETER Experiment Name: At_Drought_cDNA_P Parameter: Tissue Value: Aerial
  misc_feature: MA Experiment 108573 PARAMETER Experiment Name: At_Drought_cDNA_P Parameter: Treatment Value: Drought vs. No Drought
  misc_feature: MA Experiment ID: 20000180 Result: Up-regulated in Transcription
  misc_feature: MA Experiment 20000180 PARAMETER Experiment Name: At_Germinating_Seeds_P Parameter: Age (hr) Value: 24 vs. 0
  misc_feature: MA Experiment 20000180 PARAMETER Experiment Name: At_Germinating_Seeds_P Parameter: Tissue Value: Germinating Seeds
  misc_feature: MA Experiment ID: 20000182 Result: Up-regulated in Transcription
  misc_feature: MA Experiment 20000182 PARAMETER Experiment Name: At_2mM_SA_P Parameter: Age (day) Value: 14
  misc_feature: MA Experiment 20000182 PARAMETER Experiment Name: At_2mM_SA_P Parameter: Organism Value: A. thaliana
  misc_feature: MA Experiment 20000182 PARAMETER Experiment Name: At_2mM_SA_P Parameter: Plant Line Value: WS
  misc_feature: MA Experiment 20000182 PARAMETER Experiment Name: At_2mM_SA_P Parameter: Timepoint (hr) Value: 6
  misc_feature: MA Experiment 20000182 PARAMETER Experiment Name: At_2mM_SA_P Parameter: Tissue Value: Aerial
  misc_feature: MA Experiment 20000182 PARAMETER Experiment Name: At_2mM_SA_P Parameter: Treatment Value: 2mM SA vs. No Treatment
  misc_feature: MA Experiment ID: 20000227 Result: Up-regulated in Transcription
  misc_feature: MA Experiment 20000227 PARAMETER Experiment Name: At_Root-Tips-vs-Tops_P Parameter: Tissue Value: Root Tips vs. Root Tops
  misc_feature: MA Experiment ID: 20000234 Result: Up-regulated in Transcription
  misc_feature: MA Experiment 20000234 PARAMETER Experiment Name: At_Siliques_P Parameter: Age (day) Value: 21
  misc_feature: MA Experiment 20000234 PARAMETER Experiment Name: At_Siliques_P Parameter: Organism Value: A. thaliana
  misc_feature: MA Experiment 20000234 PARAMETER Experiment Name: At_Siliques_P Parameter: Plant Line Value: WS
  misc_feature: MA Experiment 20000234 PARAMETER Experiment Name: At_Siliques_P Parameter: Tissue Value: Less Than 5mm Siliques vs. Whole Plant
  misc_feature: MA Experiment ID: 20000495 Result: Up-regulated in Transcription
  misc_feature: MA Experiment 20000495 PARAMETER Experiment Name: At_Guard_Cells_P Parameter: Harvest Date Value: 8/2/2002
  misc_feature: MA Experiment 20000495 PARAMETER Experiment Name: At_Guard_Cells_P Parameter: Organism Value: A. thaliana
  misc_feature: MA Experiment 20000495 PARAMETER Experiment Name: At_Guard_Cells_P Parameter: Tissue Value: Guard Cells vs. Leaves
gaaaagcttaagtgagaagcagaaaaaaatggcgaaatctcagatctggtttggttttgcgttactcgcgttgcttctggtttcagccgtagctgacgatgtggttgttttgactgacgatagcttcgaaaaggaagttggtaaagataaaggagctctcgtcgagttttacgctccctggtgtggtcactgcaagaaacttgctccagagtatgaaaagctaggggcaagcttcaagaaggctaagtctgtgttgattgcaaaggttgattgtgatgagcaaaagagtgtctgtactaaatatggtgttagtggatacccaaccattcagtggtttcctaaaggatctcttgaacctcaaaagtatgagggtccacgcaatgctgaagctttggctgaatacgtgaacaaggaaggaggcaccaacgtaaaattagctgcagttccacaaaacgtggttgttttgacacctgacaatttcgatgagattgttctggatcaaaacaaagatgtcctagtcgaattttatgcaccatggtgtggccactgcaaatcactcgttcccacatacgaaaaggtagccacagtgtttaaacaggaagaaggtgtagtcatcgccaatttggatgctgatgcacacaaagcccttggcgagaaatatggagtgagtggattcccaacattgaaattcttcccaaaggacaacaaagctggtcacgattatgacggtggcagggatttagatgactttgtaagcttcatcaacgagaaatctgggaccagcagggacagtaaagggcagcttacttcaaaggctggtatagtcgaaagcttagatgctttggtaaaagagttagttgcagctagtgaagatgagaagaaggcagtgttgtctcgcatagaaaaggaagcaagttcccttaagggctcccccccgaggtatggaaagcttttcttgaaactcgcaaagagctacatagaaaaaggttcagactatgctagcaaagaaacggagaggcttggacgggtgcttgggaagtcgataagtccagtgaaagctgatgaactccctctcaagagaaatatcctaaccccgttcgttgcttttttttagaagtcatatagcttgaagctaagagaataggagtcgagagagtttataactgatactgttttgagattttatgtttgtcaagatcaagaacgtctgtggttatttctggttagttctgaaactcttttgaacccaagtttatctgtctctggtgaacaagcgaccccgataatcataaacttcattcgcgtt

SEQ ID NO: 47462 - protein, 370 aa, Arabidopsis thaliana
  peptide (1)..(370): Ceres Seq. ID no. 15168770
  misc_feature (33)..(140): Pfam Name: Thioredoxin Pfam Description: Thioredoxin
  misc_feature (19)..(258): Homolog of NCBI NO: 25144092 NR Description: protein disulfide isomerase (69.8 kD) (3J225)
  misc_feature (34)..(291): Homolog of NCBI NO: 28279655 NR Description: Similar to protein disulfide isomerase related
  misc_feature (174)..(368): Homolog of NCBI NO: 10180029 NR Description: putative protein disulfide-isomerase [Prunus
  misc_feature (22)..(366): Homolog of NCBI NO: 2627440 NR Description: protein disulfide isomerase; PDI; P5-like
  misc_feature (22)..(366): Homolog of NCBI NO: 28829383 NR Description: similar to Dictyostelium discoideum (Slime mold).
  misc_feature (23)..(366): Homolog of NCBI NO: 34897646 NR Description: putative disulfide-isomerase precursor [Oryza
  misc_feature (19)..(366): Homolog of NCBI NO: 34894982 NR Description: putative protein disulfide isomerase
  misc_feature (10)..(366): Homolog of NCBI NO: 7489183 NR Description: probable protein disulfide-isomerase (EC 5.3.4.1)
  misc_feature (9)..(366): Homolog of NCBI NO: 729442 NR Description: PROBABLE PROTEIN DISULFIDE ISOMERASE P5 PRECURSOR
  misc_feature (10)..(368): Homolog of NCBI NO: 15226610 NR Description: protein disulfide isomerase family [Arabidopsis
KSLSEKQKKMAKSQIWFGFALLALLLVSAVADDVVVLTDDSFEKEVGKDKGALVEFYAPWCGHCKKLAPEYEKLGASFKKAKSVLIAKVDCDEQKSVCTKYGVSGYPTIQWFPKGSLEPQKYEGPRNAEALAEYVNKEGGTNVKLAAVPQNVVVLTPDNFDEIVLDQNKDVLVEFYAPWCGHCKSLVPTYEKVATVFKQEEGVVIANLDADAHKALGEKYGVSGFPTLKFFPKDNKAGHDYDGGRDLDDFVSFINEKSGTSRDSKGQLTSKAGIVESLDALVKELVAASEDEKKAVLSRIEKEASSLKGSPPRYGKLFLKLAKSYIEKGSDYASKETERLGRVLGKSISPVKADELPLKRNILTPFVAFF

SEQ ID NO: 47463 - protein, 361 aa, Arabidopsis thaliana
  peptide (1)..(361): Ceres Seq. ID no. 15168771
  misc_feature (24)..(131): Pfam Name: Thioredoxin Pfam Description: Thioredoxin
  misc_feature (10)..(249): Homolog of NCBI NO: 25144092 NR Description: protein disulfide isomerase (69.8 kD) (3J225)
  misc_feature (25)..(282): Homolog of NCBI NO: 28279655 NR Description: Similar to protein disulfide isomerase related
  misc_feature (165)..(359): Homolog of NCBI NO: 10180029 NR Description: putative protein disulfide-isomerase [Prunus
  misc_feature (13)..(357): Homolog of NCBI NO: 2627440 NR Description: protein disulfide isomerase; PDI; P5-like
  misc_feature (13)..(357): Homolog of NCBI NO: 28829383 NR Description: similar to Dictyostelium discoideum (Slime mold).
  misc_feature (14)..(357): Homolog of NCBI NO: 34897646 NR Description: putative disulfide-isomerase precursor [Oryza
  misc_feature (10)..(357): Homolog of NCBI NO: 34894982 NR Description: putative protein disulfide isomerase
  misc_feature (1)..(357): Homolog of NCBI NO: 7489183 NR Description: probable protein disulfide-isomerase (EC 5.3.4.1)
  misc_feature (1)..(357): Homolog of NCBI NO: 729442 NR Description: PROBABLE PROTEIN DISULFIDE ISOMERASE P5 PRECURSOR
  misc_feature (1)..(359): Homolog of NCBI NO: 15226610 NR Description: protein disulfide isomerase family [Arabidopsis
MAKSQIWFGFALLALLLVSAVADDVVVLTDDSFEKEVGKDKGALVEFYAPWCGHCKKLAPEYEKLGASFKKAKSVLIAKVDCDEQKSVCTKYGVSGYPTIQWFPKGSLEPQKYEGPRNAEALAEYVNKEGGTNVKLAAVPQNVVVLTPDNFDEIVLDQNKDVLVEFYAPWCGHCKSLVPTYEKVATVFKQEEGVVIANLDADAHKALGEKYGVSGFPTLKFFPKDNKAGHDYDGGRDLDDFVSFINEKSGTSRDSKGQLTSKAGIVESLDALVKELVAASEDEKKAVLSRIEKEASSLKGSPPRYGKLFLKLAKSYIEKGSDYASKETERLGRVLGKSISPVKADELPLKRNILTPFVAFF

SEQ ID NO: 47464 - DNA, 1554 bp, Arabidopsis thaliana
  misc_feature (1)..(1554): Ceres Seq. ID no. 14313003
  misc_feature: MA Experiment ID: 108462 Result: Down-regulated in Transcription
  misc_feature: MA Experiment 108462 PARAMETER Experiment Name: At_Germinating_Seeds_cDNA_P Parameter: Age (day) Value: 2 vs. 0
  misc_feature: MA Experiment 108462 PARAMETER Experiment Name: At_Germinating_Seeds_cDNA_P Parameter: Tissue Value: Germinating Seeds
  misc_feature: MA Experiment ID: 108464 Result: Down-regulated in Transcription
  misc_feature: MA Experiment 108464 PARAMETER Experiment Name: At_Germinating_Seeds_cDNA_P Parameter: Age (day) Value: 4 vs. 0
  misc_feature: MA Experiment 108464 PARAMETER Experiment Name: At_Germinating_Seeds_cDNA_P Parameter: Tissue Value: Germinating Seeds
  misc_feature: MA Experiment ID: 108501 Result: Up-regulated in Transcription
  misc_feature: MA Experiment 108501 PARAMETER Experiment Name: At_ap2_floral_buds_cDNA_P Parameter: Plant Line Value: ap2 (Ler.)
  misc_feature: MA Experiment 108501 PARAMETER Experiment Name: At_ap2_floral_buds_cDNA_P Parameter: Tissue Value: Closed Flower
  misc_feature: MA Experiment ID: 108573 Result: Down-regulated in Transcription
  misc_feature: MA Experiment 108573 PARAMETER Experiment Name: At_Drought_cDNA_P Parameter: Timepoint (hr) Value: 6
  misc_feature: MA Experiment 108573 PARAMETER Experiment Name: At_Drought_cDNA_P Parameter: Tissue Value: Aerial
  misc_feature: MA Experiment 108573 PARAMETER Experiment Name: At_Drought_cDNA_P Parameter: Treatment Value: Drought vs. No Drought
  misc_feature: MA Experiment ID: 108595 Result: Down-regulated in Transcription
  misc_feature: MA Experiment 108595 PARAMETER Experiment Name: At_Ler-pi_Ovule_cDNA_P Parameter: Plant Line Value: null
  misc_feature: MA Experiment ID: 108607 Result: Down-regulated in Transcription
  misc_feature: MA Experiment 108607 PARAMETER Experiment Name: At_100uM_ABA_cDNA_P Parameter: Timepoint (hr) Value: 4
  misc_feature: MA Experiment 108607 PARAMETER Experiment Name: At_100uM_ABA_cDNA_P Parameter: Tissue Value: Aerial
  misc_feature: MA Experiment 108607 PARAMETER Experiment Name: At_100uM_ABA_cDNA_P Parameter: Treatment Value: 100uM ABA vs. No Treatment
  misc_feature: MA Experiment ID: 20000087 Result: Down-regulated in Transcription
  misc_feature: MA Experiment 20000087 PARAMETER Experiment Name: At_100uM_ABA_Mutants_cDNA_P Parameter: Plant Line Value: WS
  misc_feature: MA Experiment 20000087 PARAMETER Experiment Name: At_100uM_ABA_Mutants_cDNA_P Parameter: Timepoint (hr) Value: 6
  misc_feature: MA Experiment 20000087 PARAMETER Experiment Name: At_100uM_ABA_Mutants_cDNA_P Parameter: Tissue Value: Aerial
  misc_feature: MA Experiment 20000087 PARAMETER Experiment Name: At_100uM_ABA_Mutants_cDNA_P Parameter: Treatment Value: 100uM ABA vs. No Treatment
  misc_feature: MA Experiment ID: 20000224 Result: Up-regulated in Transcription
  misc_feature: MA Experiment ID: 20000306 Result: Up-regulated in Transcription
  misc_feature: MA Experiment 20000306 PARAMETER Experiment Name: At_Germinating_Seeds_Sub_P Parameter: Age (hr) Value: 6 vs. 0
  misc_feature: MA Experiment 20000306 PARAMETER Experiment Name: At_Germinating_Seeds_Sub_P Parameter: Organism Value: A. thaliana
  misc_feature: MA Experiment 20000306 PARAMETER Experiment Name: At_Germinating_Seeds_Sub_P Parameter: Plant Line Value: WS
  misc_feature: MA Experiment 20000306 PARAMETER Experiment Name: At_Germinating_Seeds_Sub_P Parameter: Tissue Value: Germinating Seeds
  misc_feature: MA Experiment ID: 20000315 Result: Down-regulated in Transcription
  misc_feature: MA Experiment 20000315 PARAMETER Experiment Name: At_14day_Shoots-Roots_Sub_P Parameter: Age (day) Value: 14
  misc_feature: MA Experiment 20000315 PARAMETER Experiment Name: At_14day_Shoots-Roots_Sub_P Parameter: Organism Value: A. thaliana
  misc_feature: MA Experiment 20000315 PARAMETER Experiment Name: At_14day_Shoots-Roots_Sub_P Parameter: Plant Line Value: WS
  misc_feature: MA Experiment 20000315 PARAMETER Experiment Name: At_14day_Shoots-Roots_Sub_P Parameter: Tissue Value: Shoots vs. Whole Plant
ggccacccagaaaaaaccctcaagtcttcttcttcttcctcaatctctccacctcttttcaaaccttcttcacactctctctcaatcaatcctttttcttctcaaatctttcagttttgatctctaaatttccagaaaatgagcaacgataaggacagtttcaatgtcagcgatctcacttctgctcttaaagatgaggatcgagctggtcttgtcaacgctcttaagaacaagctccagaatctagctggacaacattctgatgtgctcgagaatctgactcctaaaattagaaggcgtgttgaggttttgcgggagattcagggcaaacatgatgaaatagagacaaaattccgcgaggagagagctgctcttgaagccaagtatcaaaagttatatcagcctttgtataacaagcgttatgagattgtgaatggagctactgaagttgaaggggctccagaggatgctaagatggaccaaggagacgagaaaactgcagaagagaaaggagtccctagtttctggctgactgctctgaaaaataatgatgttatatctgaagagatcacagagcgtgatgaaggagcccttatatatcttaaagatatcaagtggtgcaagattgaagaaccaaagggattcaaacttgagtttttcttcgaccagaatccttacttcaaaaacaccctattaacaaaggcgtatcatatgattgatgaagatgagcctctgcttgagaaggctattgggacagagattgattggtatcctggaaaatgcttaactcagaagattcttaagaagaagcctaagaaaggtgcaaagaatgccaagccaattaccaaaactgaagattgtgaaagcttcttcaacttcttcaatcctccccaagttcctgatgatgatgaagacattgacgaagaaagagccgaggaacttcagaatctgatggaacaagattatgacattggttctacaatccgggagaagatcatacctcatgctgtctcatggtttactggtgaggctattgagggagaggagtttgaaatagacaatgatgatgaagatgatatcgatgaggatgaagatgaggatgaagaagatgaagacgaagatgaggaagaagacgacgaagatgaggaggaagaagtaagcaagaccaaaaagaagccatcagtcttacacaagaaaagagggagacctcaggttaccgatgatcaacaaggagagaggcctcctgaatgcaaacaacagtaaacaaaatcgaaaagtctaaacgaaaaccagtaaaaaaaaaacaaatgttttgggttttgagtgaagttccatggcctagttttttgcttccatgtaaggcaaaatgttttgaagactgctcataggaatgttgctgtaggcaaaagcgtgagtttctccatgtggagatacttgataaattatttttggtgcatttgttttttttttctttaatcactaagttgaattttggtgtgttcgtcaaaattatatccttttaccacttgaattaaagtctcttttggtttcttt

SEQ ID NO: 47465 - protein, 374 aa, Arabidopsis thaliana
  peptide (1)..(374): Ceres Seq. ID no. 14313004
  misc_feature (52)..(300): Pfam Name: Nucleosome assembly protein (NAP) Pfam Description: Nucleosome assembly protein (NAP)
  misc_feature (44)..(321): Homolog of NCBI NO: 15231361 NR Description: nucleosome assembly protein -related [Arabidopsis
  misc_feature (1)..(374): Homolog of NCBI NO: 21898560 NR Description: nucleosome/chromatin assembly factor group A [Zea
  misc_feature (1)..(374): Homolog of NCBI NO: 29569109 NR Description: nucleosome/chromatin assembly factor group A [Zea
  misc_feature (1)..(374): Homolog of NCBI NO: 2129840 NR Description: nucleosome assembly protein 1 - soybean
  misc_feature (1)..(374): Homolog of NCBI NO: 7488816 NR Description: nucleosome assembly protein 1 - garden pea
  misc_feature (1)..(374): Homolog of NCBI NO: 15224782 NR Description: nucleosome assembly protein -related [Arabidopsis
  misc_feature (1)..(374): Homolog of NCBI NO: 15236115 NR Description: nucleosome assembly protein I-related protein
  misc_feature (1)..(374): Homolog of NCBI NO: 549975 NR Description: nucleosome assembly protein I-like protein
  misc_feature (1)..(374): Homolog of NCBI NO: 8777435 NR Description: nucleosome assembly protein [Arabidopsis thaliana]
  misc_feature (1)..(374): Homolog of NCBI NO: 18423918 NR Description: nucleosome assembly protein [Arabidopsis
MSNDKDSFNVSDLTSALKDEDRAGLVNALKNKLQNLAGQHSDVLENLTPKIRRRVEVLREIQGKHDEIETKFREERAALEAKYQKLYQPLYNKRYEIVNGATEVEGAPEDAKMDQGDEKTAEEKGVPSFWLTALKNNDVISEEITERDEGALIYLKDIKWCKIEEPKGFKLEFFFDQNPYFKNTLLTKAYHMIDEDEPLLEKAIGTEIDWYPGKCLTQKILKKKPKKGAKNAKPITKTEDCESFFNFFNPPQVPDDDEDIDEERAEELQNLMEQDYDIGSTIREKIIPHAVSWFTGEAIEGEEFEIDNDDEDDIDEDEDEDEEDEDEDEEEDDEDEEEEVSKTKKKPSVLHKKRGRPQVTDDQQGERPPECKQQ

SEQ ID NO: 47466 - protein, 262 aa, Arabidopsis thaliana
  peptide (1)..(262): Ceres Seq. ID no. 14313005
  misc_feature (1)..(188): Pfam Name: Nucleosome assembly protein (NAP) Pfam Description: Nucleosome assembly protein (NAP)
  misc_feature (1)..(209): Homolog of NCBI NO: 15231361 NR Description: nucleosome assembly protein -related [Arabidopsis
  misc_feature (1)..(262): Homolog of NCBI NO: 21898560 NR Description: nucleosome/chromatin assembly factor group A [Zea
  misc_feature (1)..(262): Homolog of NCBI NO: 29569109 NR Description: nucleosome/chromatin assembly factor group A [Zea
  misc_feature (1)..(262): Homolog of NCBI NO: 2129840 NR Description: nucleosome assembly protein 1 - soybean
  misc_feature (1)..(262): Homolog of NCBI NO: 7488816 NR Description: nucleosome assembly protein 1 - garden pea
  misc_feature (1)..(262): Homolog of NCBI NO: 15224782 NR Description: nucleosome assembly protein -related [Arabidopsis
  misc_feature (1)..(262): Homolog of NCBI NO: 15236115 NR Description: nucleosome assembly protein I-related protein
  misc_feature (1)..(262): Homolog of NCBI NO: 549975 NR Description: nucleosome assembly protein I-like protein
  misc_feature (1)..(262): Homolog of NCBI NO: 8777435 NR Description: nucleosome assembly protein [Arabidopsis thaliana]
  misc_feature (1)..(262): Homolog of NCBI NO: 18423918 NR Description: nucleosome assembly protein [Arabidopsis
MDQGDEKTAEEKGVPSFWLTALKNNDVISEEITERDEGALIYLKDIKWCKIEEPKGFKLEFFFDQNPYFKNTLLTKAYHMIDEDEPLLEKAIGTEIDWYPGKCLTQKILKKKPKKGAKNAKPITKTEDCESFFNFFNPPQVPDDDEDIDEERAEELQNLMEQDYDIGSTIREKIIPHAVSWFTGEAIEGEEFEIDNDDEDDIDEDEDEDEEDEDEDEEEDDEDEEEEVSKTKKKPSVLHKKRGRPQVTDDQQGERPPECKQQ

SEQ ID NO: 47467 - DNA, 1966 bp, Arabidopsis thaliana; identical to SEQ ID NO: 38318
  misc_feature (1)..(1966): Ceres Seq. ID no. 13648305
  misc_feature: MA Experiment ID: 20000185 Result: Up-regulated in Transcription
  misc_feature: MA Experiment 20000185 PARAMETER Experiment Name: At_Roots__P Parameter: Age (day) Value: 7 vs. 21
  misc_feature: MA Experiment 20000185 PARAMETER Experiment Name: At_Roots__P Parameter: Organism Value: A. thaliana
  misc_feature: MA Experiment 20000185 PARAMETER Experiment Name: At_Roots__P Parameter: Tissue Value: Roots vs. Whole Plant
  misc_feature: MA Experiment ID: 20000234 Result: Up-regulated in Transcription
  misc_feature: MA Experiment 20000234 PARAMETER Experiment Name: At_Siliques_P Parameter: Age (day) Value: 21
  misc_feature: MA Experiment 20000234 PARAMETER Experiment Name: At_Siliques_P Parameter: Organism Value: A. thaliana
  misc_feature: MA Experiment 20000234 PARAMETER Experiment Name: At_Siliques_P Parameter: Plant Line Value: WS
  misc_feature: MA Experiment 20000234 PARAMETER Experiment Name: At_Siliques_P Parameter: Tissue Value: Less Than 5mm Siliques vs. Whole Plant
  misc_feature: MA Experiment ID: 20000264 Result: Up-regulated in Transcription
  misc_feature: MA Experiment 20000264 PARAMETER Experiment Name: At_Open_Flower_P Parameter: Age (day) Value: 21
  misc_feature: MA Experiment 20000264 PARAMETER Experiment Name: At_Open_Flower_P Parameter: Plant Line Value: WS
  misc_feature: MA Experiment 20000264 PARAMETER Experiment Name: At_Open_Flower_P Parameter: Tissue Value: Open Flower vs. Whole Plant
  misc_feature: MA Experiment ID: 20000286 Result: Up-regulated in Transcription
  misc_feature: MA Experiment 20000286 PARAMETER Experiment Name: At_Open_Flower_P Parameter: Age (day) Value: 21
  misc_feature: MA Experiment 20000286 PARAMETER Experiment Name: At_Open_Flower_P Parameter: Plant Line Value: WS
  misc_feature: MA Experiment 20000286 PARAMETER Experiment Name: At_Open_Flower_P Parameter: Tissue Value: Half Open vs. Whole Plant
  misc_feature: MA Experiment ID: 20000437 Result: Down-regulated in Transcription
  misc_feature: MA Experiment 20000437 PARAMETER Experiment Name: At_Drought_P Parameter: Age (day) Value: 8
  misc_feature: MA Experiment 20000437 PARAMETER Experiment Name: At_Drought_P Parameter: Organism Value: A. thaliana
  misc_feature: MA Experiment 20000437 PARAMETER Experiment Name: At_Drought_P Parameter: Plant Line Value: WS
  misc_feature: MA Experiment 20000437 PARAMETER Experiment Name: At_Drought_P Parameter: Timepoint (hr) Value: 24
  misc_feature: MA Experiment 20000437 PARAMETER Experiment Name: At_Drought_P Parameter: Tissue Value: Whole Plant
  misc_feature: MA Experiment 20000437 PARAMETER Experiment Name: At_Drought_P Parameter: Treatment Value: Drought vs. No Drought
  misc_feature: MA Experiment ID: 20000439 Result: Up-regulated in Transcription
  misc_feature: MA Experiment 20000439 PARAMETER Experiment Name: At_Roots__P Parameter: Age (day) Value: 14 vs. 21
  misc_feature: MA Experiment 20000439 PARAMETER Experiment Name: At_Roots__P Parameter: Organism Value: A. thaliana
  misc_feature: MA Experiment 20000439 PARAMETER Experiment Name: At_Roots__P Parameter: Tissue Value: Roots vs. Whole Plant
  misc_feature: MA Experiment ID: 20000495 Result: Down-regulated in Transcription
  misc_feature: MA Experiment 20000495 PARAMETER Experiment Name: At_Guard_Cells_P Parameter: Harvest Date Value: 8/2/2002
  misc_feature: MA Experiment 20000495 PARAMETER Experiment Name: At_Guard_Cells_P Parameter: Organism Value: A. thaliana
  misc_feature: MA Experiment 20000495 PARAMETER Experiment Name: At_Guard_Cells_P Parameter: Tissue Value: Guard Cells vs. Leaves
  misc_feature: MA Experiment ID: 20001451 Result: Down-regulated in Transcription
  misc_feature: MA Experiment 20001451 PARAMETER Experiment Name: At_Far-red-induction_P Parameter: Age (day) Value: 7
  misc_feature: MA Experiment 20001451 PARAMETER Experiment Name: At_Far-red-induction_P Parameter: Light Value: Far-red vs. White
  misc_feature: MA Experiment 20001451 PARAMETER Experiment Name: At_Far-red-induction_P Parameter: Organism Value: A. thaliana
  misc_feature: MA Experiment 20001451 PARAMETER Experiment Name: At_Far-red-induction_P Parameter: Plant Line Value: Columbia
  misc_feature: MA Experiment 20001451 PARAMETER Experiment Name: At_Far-red-induction_P Parameter: Timepoint (hr) Value: 24
  misc_feature: MA Experiment 20001451 PARAMETER Experiment Name: At_Far-red-induction_P Parameter: Tissue Value: Whole Plant
  misc_feature: MA Experiment ID: 20001558 Result: Up-regulated in Transcription
  misc_feature: MA Experiment 20001558 PARAMETER Experiment Name: At_Drought_Soil_Dry_P Parameter: Age (day) Value: 27
  misc_feature: MA Experiment 20001558 PARAMETER Experiment Name: At_Drought_Soil_Dry_P Parameter: Organism Value: A. thaliana
  misc_feature: MA Experiment 20001558 PARAMETER Experiment Name: At_Drought_Soil_Dry_P Parameter: Plant Line Value: WS
  misc_feature: MA Experiment 20001558 PARAMETER Experiment Name: At_Drought_Soil_Dry_P Parameter: Post Timepoint (hr) Value: 6
  misc_feature: MA Experiment 20001558 PARAMETER Experiment Name: At_Drought_Soil_Dry_P Parameter: Post-Treatment Value: Re-Water vs. No Drought
  misc_feature: MA Experiment 20001558 PARAMETER Experiment Name: At_Drought_Soil_Dry_P Parameter: Timepoint (day) Value: 13
  misc_feature: MA Experiment 20001558 PARAMETER Experiment Name: At_Drought_Soil_Dry_P Parameter: Treatment Value: Drought vs. No Drought
  misc_feature: MA Experiment ID: 20001757 Result: Up-regulated in Transcription
  misc_feature: MA Experiment 20001757 PARAMETER Experiment Name: At_50mM_NH4NO3_L-to-H_P Parameter: Timepoint (hr) Value: 6
  misc_feature: MA Experiment 20001757 PARAMETER Experiment Name: At_50mM_NH4NO3_L-to-H_P Parameter: Tissue Value: Leaf
  misc_feature: MA Experiment 20001757 PARAMETER Experiment Name: At_50mM_NH4NO3_L-to-H_P Parameter: Treatment Value: 50mM NH4NO3 vs 100mM Mannitol
  misc_feature: MA Experiment ID: 20001911 Result: Down-regulated in Transcription
  misc_feature: MA Experiment 20001911 PARAMETER Experiment Name: At_Drought_Reproduction_P Parameter: Age (day) Value: 40
  misc_feature: MA Experiment 20001911 PARAMETER Experiment Name: At_Drought_Reproduction_P Parameter: Organism Value: A. thaliana
  misc_feature: MA Experiment 20001911 PARAMETER Experiment Name: At_Drought_Reproduction_P Parameter: Plant Line Value: WS
  misc_feature: MA Experiment 20001911 PARAMETER Experiment Name: At_Drought_Reproduction_P Parameter: Timepoint (day) Value: 10
  misc_feature: MA Experiment 20001911 PARAMETER Experiment Name: At_Drought_Reproduction_P Parameter: Tissue Value: Flowers
  misc_feature: MA Experiment 20001911 PARAMETER Experiment Name: At_Drought_Reproduction_P Parameter: Treatment Value: Drought vs. No Drought

SEQ ID NO: 47468 - protein, 566 aa, Arabidopsis thaliana; identical to SEQ ID NO: 38319
  peptide (1)..(566): Ceres Seq. ID no. 13648306
  misc_feature (97)..(383): Pfam Name: Phosphofructokinase Pfam Description: Phosphofructokinase
  misc_feature (97)..(383): Pfam Name: Phosphofructokinase Pfam Description: Phosphofructokinase
  misc_feature (30)..(566): Homolog of NCBI NO: 11528427 NR Description: pyrophosphate-dependent phosphofructokinase
  misc_feature (76)..(564): Homolog of NCBI NO: 100462 NR Description: diphosphate-fructose-6-phosphate
  misc_feature (19)..(566): Homolog of NCBI NO: 7447689 NR Description: diphosphate-fructose-6-phosphate
  misc_feature (26)..(564): Homolog of NCBI NO: 2507174 NR Description: PYROPHOSPHATE--FRUCTOSE 6-PHOSPHATE BETA SUBUNIT (PFP) (6-PHOSPHOFRUCTOKINASE (PYROPHOSPHATE))
  misc_feature (19)..(120): Homolog of NCBI NO: 30679628 NR Description: phosphofructokinase beta subunit -related
  misc_feature (30)..(566): Homolog of NCBI NO: 11528427 NR Description: pyrophosphate-dependent phosphofructokinase
  misc_feature (19)..(566): Homolog of NCBI NO: 7447689 NR Description: diphosphate-fructose-6-phosphate
  misc_feature (19)..(120): Homolog of NCBI NO: 30679628 NR Description: phosphofructokinase beta subunit -related
  misc_feature (1)..(566): Homolog of NCBI NO: 15221156 NR Description: pyrophosphate-fructose-6-phosphate
  misc_feature (1)..(566): Homolog of NCBI NO: 25314952 NR Description: hypothetical protein [imported] - Arabidopsis
  misc_feature (1)..(566): Homolog of NCBI NO: 3790100 NR Description: pyrophosphate-dependent phosphofructokinase beta
  misc_feature (21)..(565): Homolog of NCBI NO: 2499489 NR Description: Pyrophosphate--fructose 6-phosphate beta subunit (PFP) (6-phosphofructokinase,
  misc_feature (91)..(566): Homolog of NCBI NO: 30679628 NR Description: phosphofructokinase beta subunit -related
  misc_feature (26)..(564): Homolog of NCBI NO: 2507174 NR Description: PYROPHOSPHATE--FRUCTOSE 6-PHOSPHATE BETA SUBUNIT (PFP) (6-PHOSPHOFRUCTOKINASE (PYROPHOSPHATE))
  misc_feature (76)..(564): Homolog of NCBI NO: 100462 NR Description: diphosphate-fructose-6-phosphate
  misc_feature (91)..(566): Homolog of NCBI NO: 30679628 NR Description: phosphofructokinase beta subunit -related
  misc_feature (21)..(565): Homolog of NCBI NO: 2499489 NR Description: Pyrophosphate--fructose 6-phosphate beta subunit (PFP) (6-phosphofructokinase,
  misc_feature (1)..(566): Homolog of NCBI NO: 3790100 NR Description: pyrophosphate-dependent phosphofructokinase beta
  misc_feature (1)..(566): Homolog of NCBI NO: 25314952 NR Description: hypothetical protein [imported] - Arabidopsis
  misc_feature (1)..(566): Homolog of NCBI NO: 15221156 NR Description: pyrophosphate-fructose-6-phosphate

SEQ ID NO: 47469 - protein, 426 aa, Arabidopsis thaliana; identical to SEQ ID NO: 38320
  peptide (1)..(426): Ceres Seq. ID no. 13648307
  misc_feature (1)..(243): Pfam Name: Phosphofructokinase Pfam Description: Phosphofructokinase
  misc_feature (1)..(243): Pfam Name: Phosphofructokinase Pfam Description: Phosphofructokinase
  misc_feature (1)..(422): Homolog of NCBI NO: 34540025 NR Description: phosphofructokinase [Porphyromonas gingivalis
  misc_feature (1)..(426): Homolog of NCBI NO: 11528427 NR Description: pyrophosphate-dependent phosphofructokinase
  misc_feature (1)..(424): Homolog of NCBI NO: 100462 NR Description: diphosphate-fructose-6-phosphate
  misc_feature (1)..(426): Homolog of NCBI NO: 7447689 NR Description: diphosphate-fructose-6-phosphate
  misc_feature (1)..(424): Homolog of NCBI NO: 2507174 NR Description: PYROPHOSPHATE--FRUCTOSE 6-PHOSPHATE BETA SUBUNIT (PFP) (6-PHOSPHOFRUCTOKINASE (PYROPHOSPHATE))
  misc_feature (1)..(422): Homolog of NCBI NO: 34540025 NR Description: phosphofructokinase [Porphyromonas gingivalis
  misc_feature (1)..(424): Homolog of NCBI NO: 100462 NR Description: diphosphate-fructose-6-phosphate
  misc_feature (1)..(424): Homolog of NCBI NO: 2507174 NR Description: PYROPHOSPHATE--FRUCTOSE 6-PHOSPHATE BETA SUBUNIT (PFP) (6-PHOSPHOFRUCTOKINASE (PYROPHOSPHATE))
  misc_feature (1)..(426): Homolog of NCBI NO: 15221156 NR Description: pyrophosphate-fructose-6-phosphate
  misc_feature (1)..(426): Homolog of NCBI NO: 25314952 NR Description: hypothetical protein [imported] - Arabidopsis
  misc_feature (1)..(426): Homolog of NCBI NO: 3790100 NR Description: pyrophosphate-dependent phosphofructokinase beta
  misc_feature (1)..(425): Homolog of NCBI NO: 2499489 NR Description: Pyrophosphate--fructose 6-phosphate beta subunit (PFP) (6-phosphofructokinase,
  misc_feature (1)..(426): Homolog of NCBI NO: 30679628 NR Description: phosphofructokinase beta subunit -related
  misc_feature (1)..(426): Homolog of NCBI NO: 7447689 NR Description: diphosphate-fructose-6-phosphate
  misc_feature (1)..(426): Homolog of NCBI NO: 11528427 NR Description: pyrophosphate-dependent phosphofructokinase
  misc_feature (1)..(426): Homolog of NCBI NO: 30679628 NR Description: phosphofructokinase beta subunit -related
  misc_feature (1)..(425): Homolog of NCBI NO: 2499489 NR Description: Pyrophosphate--fructose 6-phosphate beta subunit (PFP) (6-phosphofructokinase,
  misc_feature (1)..(426): Homolog of NCBI NO: 3790100 NR Description: pyrophosphate-dependent phosphofructokinase beta
  misc_feature (1)..(426): Homolog of NCBI NO: 25314952 NR Description: hypothetical protein [imported] - Arabidopsis
  misc_feature (1)..(426): Homolog of NCBI NO: 15221156 NR Description: pyrophosphate-fructose-6-phosphate

SEQ ID NO: 47470 - protein, 403 aa, Arabidopsis thaliana; identical to SEQ ID NO: 38321
  peptide (1)..(403): Ceres Seq. ID no. 13648308
  misc_feature (1)..(220): Pfam Name: Phosphofructokinase Pfam Description: Phosphofructokinase
  misc_feature (1)..(220): Pfam Name: Phosphofructokinase Pfam Description: Phosphofructokinase
  misc_feature (1)..(399): Homolog of NCBI NO: 34540025 NR Description: phosphofructokinase [Porphyromonas gingivalis
  misc_feature (1)..(403): Homolog of NCBI NO: 11528427 NR Description: pyrophosphate-dependent phosphofructokinase
  misc_feature (1)..(401): Homolog of NCBI NO: 100462 NR Description: diphosphate-fructose-6-phosphate
  misc_feature (1)..(403): Homolog of NCBI NO: 7447689 NR Description: diphosphate-fructose-6-phosphate
  misc_feature (1)..(401): Homolog of NCBI NO: 2507174 NR Description: PYROPHOSPHATE--FRUCTOSE 6-PHOSPHATE BETA SUBUNIT (PFP) (6-PHOSPHOFRUCTOKINASE (PYROPHOSPHATE))
  misc_feature (1)..(399): Homolog of NCBI NO: 34540025 NR Description: phosphofructokinase [Porphyromonas gingivalis
  misc_feature (1)..(401): Homolog of NCBI NO: 100462 NR Description: diphosphate-fructose-6-phosphate
  misc_feature (1)..(401): Homolog of NCBI NO: 2507174 NR Description: PYROPHOSPHATE--FRUCTOSE 6-PHOSPHATE BETA SUBUNIT (PFP) (6-PHOSPHOFRUCTOKINASE (PYROPHOSPHATE))
  misc_feature (1)..(403): Homolog of NCBI NO: 15221156 NR Description: pyrophosphate-fructose-6-phosphate
  misc_feature (1)..(403): Homolog of NCBI NO: 25314952 NR Description: hypothetical protein [imported] - Arabidopsis
  misc_feature (1)..(403): Homolog of NCBI NO: 3790100 NR Description: pyrophosphate-dependent phosphofructokinase beta
  misc_feature (1)..(402): Homolog of NCBI NO: 2499489 NR Description: Pyrophosphate--fructose 6-phosphate beta subunit (PFP) (6-phosphofructokinase,
  misc_feature (1)..(403): Homolog of NCBI NO: 30679628 NR Description: phosphofructokinase beta subunit -related
  misc_feature (1)..(403): Homolog of NCBI NO: 7447689 NR Description: diphosphate-fructose-6-phosphate
  misc_feature (1)..(403): Homolog of NCBI NO: 11528427 NR Description: pyrophosphate-dependent phosphofructokinase
  misc_feature (1)..(403): Homolog of NCBI NO: 30679628 NR Description: phosphofructokinase beta subunit -related
  misc_feature (1)..(402): Homolog of NCBI NO: 2499489 NR Description: Pyrophosphate--fructose 6-phosphate beta subunit (PFP) (6-phosphofructokinase,
  misc_feature (1)..(403): Homolog of NCBI NO: 3790100 NR Description: pyrophosphate-dependent phosphofructokinase beta
  misc_feature (1)..(403): Homolog of NCBI NO: 25314952 NR Description: hypothetical protein [imported] - Arabidopsis
  misc_feature (1)..(403): Homolog of NCBI NO: 15221156 NR Description: pyrophosphate-fructose-6-phosphate

SEQ ID NO: 47471 - DNA, 1233 bp, Arabidopsis thaliana
  misc_feature (1)..(1233): Ceres Seq. ID no. 13588327
  misc_feature: MA Experiment ID: 20000173 Result: Down-regulated in Transcription
  misc_feature: MA Experiment 20000173 PARAMETER Experiment Name: At_42deg_Heat_P Parameter: Age (day) Value: 14
  misc_feature: MA Experiment 20000173 PARAMETER Experiment Name: At_42deg_Heat_P Parameter: Organism Value: A. thaliana
  misc_feature: MA Experiment 20000173 PARAMETER Experiment Name: At_42deg_Heat_P Parameter: Plant Line Value: WS
  misc_feature: MA Experiment 20000173 PARAMETER Experiment Name: At_42deg_Heat_P Parameter: Temperature (deg C) Value: 42 vs. 22
  misc_feature: MA Experiment 20000173 PARAMETER Experiment Name: At_42deg_Heat_P Parameter: Timepoint (hr) Value: 6
  misc_feature: MA Experiment 20000173 PARAMETER Experiment Name: At_42deg_Heat_P Parameter: Tissue Value: Aerial
  misc_feature: MA Experiment ID: 20000179 Result: Up-regulated in Transcription
  misc_feature: MA Experiment 20000179 PARAMETER Experiment Name: At_Germinating_Seeds_P Parameter: Age (hr) Value: 6 vs. 0
  misc_feature: MA Experiment 20000179 PARAMETER Experiment Name: At_Germinating_Seeds_P Parameter: Tissue Value: Germinating Seeds
  misc_feature: MA Experiment ID: 20000180 Result: Up-regulated in Transcription
  misc_feature: MA Experiment 20000180 PARAMETER Experiment Name: At_Germinating_Seeds_P Parameter: Age (hr) Value: 24 vs. 0
  misc_feature: MA Experiment 20000180 PARAMETER Experiment Name: At_Germinating_Seeds_P Parameter: Tissue Value: Germinating Seeds
  misc_feature: MA Experiment ID: 20000495 Result: Down-regulated in Transcription
  misc_feature: MA Experiment 20000495 PARAMETER Experiment Name: At_Guard_Cells_P Parameter: Harvest Date Value: 8/2/2002
  misc_feature: MA Experiment 20000495 PARAMETER Experiment Name: At_Guard_Cells_P Parameter: Organism Value: A. thaliana
  misc_feature: MA Experiment 20000495 PARAMETER Experiment Name: At_Guard_Cells_P Parameter: Tissue Value: Guard Cells vs. Leaves
gaccaaatctgaaatccttagtttttgtgcttcgcgaacagcaagttgagctatggtgaaggagagtgagtactacgacatattaggcgtcaagattgacgcctctggtgctgagattaagaaagcttattatgttcaagcaaggcaagttcatccagacaagaaccctggtgatcctcaagctgctaaaaactttcagatactaggtgaagcttatcaagttctaggcgatccggagaagcgtacagcttatgacaaatatggaaaagaaggggttcaacaggatgcaatggttgatcctgcagctgtgtttggtatgctctttggtagcgagctctttgaggattacgttgggcaacttgcccttgcttcagcagcctcaatcgatgctgaattagaatcgtatgagcctgagattagaaaacagatgcttcaggaaaagatcaaagcgatacaaaaggacagagtagacaagctcgtcactacactgaaaatcaaacttgaaccattcgtggaaggacaaaccgatgaatttgtaaattgggccaccgcagaggcaaaacggctttcaacagctggttttggtgaggcaatgcttcacacagttggttacatttacactagaaaagctgctaaagaactcggaaaggataaacgtttcatgaaagtaccgtttttagccgaatgggttcgtgacaaaggccaccaagtaaaatctcaagtgatggctgcttctggtgcggtcaacttacttctgttgcaggatgaagtgagcaagctgaatcagggagagaacaaagaagagaatattcagaaagccattgaagctaaaaaggatgcaatgcttcaatccctttggcaaataaatgttgttgacatcgaatcaaccttatctcgtgtctgccaagcggtgcttaaagatccaagtgtttcaaaggatgttcttcgagctagagctagaggattgaggaagctgggtaacgttttccagggttctaagaaagcgtattctagagaaaacagcttgcgtcatgaagaagaaacaggagtgaaagtccacaccggagattcctcgaagccggcaacttaaaccaaggttcgaatctatcggttcgaaacagaacaatcaggttttgtgagaattcttgaatgtattgtaacgattaatattgttttattcgtatttatattcaacactaaataaatattgttatgggaagtgatggtttcgtc

SEQ ID NO: 47472 - protein, 345 aa, Arabidopsis thaliana
  peptide (1)..(345): Ceres Seq. ID no. 13588328
  misc_feature (6)..(71): Pfam Name: DnaJ domain Pfam Description: DnaJ domain
  misc_feature (1)..(329): Homolog of NCBI NO: 2230757 NR Description: dnaJ-like protein [Arabidopsis thaliana]
  misc_feature (1)..(343): Homolog of NCBI NO: 18394951 NR Description: DnaJ protein family [Arabidopsis thaliana]
  misc_feature (1)..(133): Homolog of NCBI NO: 27817868 NR Description: OJ1081_B12.17 [Oryza sativa (japonica
  misc_feature (133)..(316): Homolog of NCBI NO: 27817868 NR Description: OJ1081_B12.17 [Oryza sativa (japonica
  misc_feature (1)..(329): Homolog of NCBI NO: 26449747 NR Description: putative DnaJ protein [Arabidopsis thaliana]
  misc_feature (230)..(313): Homolog of NCBI NO: 25458468 NR Description: dnaJ-like protein [imported] - rice
  misc_feature (1)..(199): Homolog of NCBI NO: 25458468 NR Description: dnaJ-like protein [imported] - rice
  misc_feature (1)..(329): Homolog of NCBI NO: 15223142 NR Description: DnaJ protein family [Arabidopsis thaliana]
  misc_feature (1)..(342): Homolog of NCBI NO: 15226572 NR Description: DnaJ protein family [Arabidopsis thaliana]
  misc_feature (1)..(345): Homolog of NCBI NO: 15234962 NR Description: DnaJ protein family [Arabidopsis thaliana]
MVKESEYYDILGVKIDASGAEIKKAYYVQARQVHPDKNPGDPQAAKNFQILGEAYQVLGDPEKRTAYDKYGKEGVQQDAMVDPAAVFGMLFGSELFEDYVGQLALASAASIDAELESYEPEIRKQMLQEKIKAIQKDRVDKLVTTLKIKLEPFVEGQTDEFVNWATAEAKRLSTAGFGEAMLHTVGYIYTRKAAKELGKDKRFMKVPFLAEWVRDKGHQVKSQVMAASGAVNLLLLQDEVSKLNQGENKEENIQKAIEAKKDAMLQSLWQINVVDIESTLSRVCQAVLKDPSVSKDVLRARARGLRKLGNVFQGSKKAYSRENSLRHEEETGVKVHTGDSSKPAT

SEQ ID NO: 47473 - protein, 266 aa, Arabidopsis thaliana
  peptide (1)..(266): Ceres Seq. ID no. 13588329
  misc_feature (1)..(250): Homolog of NCBI NO: 2230757 NR Description: dnaJ-like protein [Arabidopsis thaliana]
  misc_feature (1)..(264): Homolog of NCBI NO: 18394951 NR Description: DnaJ protein family [Arabidopsis thaliana]
  misc_feature (1)..(54): Homolog of NCBI NO: 27817868 NR Description: OJ1081_B12.17 [Oryza sativa (japonica
  misc_feature (54)..(237): Homolog of NCBI NO: 27817868 NR Description: OJ1081_B12.17 [Oryza sativa (japonica
  misc_feature (1)..(250): Homolog of NCBI NO: 26449747 NR Description: putative DnaJ protein [Arabidopsis thaliana]
  misc_feature (151)..(234): Homolog of NCBI NO: 25458468 NR Description: dnaJ-like protein [imported] - rice
  misc_feature (1)..(120): Homolog of NCBI NO: 25458468 NR Description: dnaJ-like protein [imported] - rice
  misc_feature (1)..(250): Homolog of NCBI NO: 15223142 NR Description: DnaJ protein family [Arabidopsis thaliana]
  misc_feature (1)..(263): Homolog of NCBI NO: 15226572 NR Description: DnaJ protein family [Arabidopsis thaliana]
  misc_feature (1)..(266): Homolog of NCBI NO: 15234962 NR Description: DnaJ protein family [Arabidopsis thaliana]
MVDPAAVFGMLFGSELFEDYVGQLALASAASIDAELESYEPEIRKQMLQEKIKAIQKDRVDKLVTTLKIKLEPFVEGQTDEFVNWATAEAKRLSTAGFGEAMLHTVGYIYTRKAAKELGKDKRFMKVPFLAEWVRDKGHQVKSQVMAASGAVNLLLLQDEVSKLNQGENKEENIQKAIEAKKDAMLQSLWQINVVDIESTLSRVCQAVLKDPSVSKDVLRARARGLRKLGNVFQGSKKAYSRENSLRHEEETGVKVHTGDSSKPAT

SEQ ID NO: 47474 - protein, 257 aa, Arabidopsis thaliana
  peptide (1)..(257): Ceres Seq. ID no. 13588330
  misc_feature (1)..(241): Homolog of NCBI NO: 2230757 NR Description: dnaJ-like protein [Arabidopsis thaliana]
  misc_feature (1)..(255): Homolog of NCBI NO: 18394951 NR Description: DnaJ protein family [Arabidopsis thaliana]
  misc_feature (1)..(45): Homolog of NCBI NO: 27817868 NR Description: OJ1081_B12.17 [Oryza sativa (japonica
  misc_feature (45)..(228): Homolog of NCBI NO: 27817868 NR Description: OJ1081_B12.17 [Oryza sativa (japonica
  misc_feature (1)..(241): Homolog of NCBI NO: 26449747 NR Description: putative DnaJ protein [Arabidopsis thaliana]
  misc_feature (142)..(225): Homolog of NCBI NO: 25458468 NR Description: dnaJ-like protein [imported] - rice
  misc_feature (1)..(111): Homolog of NCBI NO: 25458468 NR Description: dnaJ-like protein [imported] - rice
  misc_feature (1)..(241): Homolog of NCBI NO: 15223142 NR Description: DnaJ protein family [Arabidopsis thaliana]
  misc_feature (1)..(254): Homolog of NCBI NO: 15226572 NR Description: DnaJ protein family [Arabidopsis thaliana]
  misc_feature (1)..(257): Homolog of NCBI NO: 15234962 NR Description: DnaJ protein family [Arabidopsis thaliana]
MLFGSELFEDYVGQLALASAASIDAELESYEPEIRKQMLQEKIKAIQKDRVDKLVTTLKIKLEPFVEGQTDEFVNWATAEAKRLSTAGFGEAMLHTVGYIYTRKAAKELGKDKRFMKVPFLAEWVRDKGHQVKSQVMAASGAVNLLLLQDEVSKLNQGENKEENIQKAIEAKKDAMLQSLWQINVVDIESTLSRVCQAVLKDPSVSKDVLRARARGLRKLGNVFQGSKKAYSRENSLRHEEETGVKVHTGDSSKPAT

SEQ ID NO: 47475 - DNA, 1754 bp, Arabidopsis thaliana
  misc_feature (1)..(1754): Ceres Seq. ID no. 13592310
  misc_feature: MA Experiment ID: 20000794 Result: Up-regulated in Transcription
  misc_feature: MA Experiment 20000794 PARAMETER Experiment Name: At_Petals_P Parameter: Age (day) Value: 23-25 days
  misc_feature: MA Experiment 20000794 PARAMETER Experiment Name: At_Petals_P Parameter: Plant Line Value: WS
  misc_feature: MA Experiment 20000794 PARAMETER Experiment Name: At_Petals_P Parameter: Tissue Value: Petals vs. Whole plant
  misc_feature: MA Experiment ID: 20001557 Result: Down-regulated in Transcription
  misc_feature: MA Experiment 20001557 PARAMETER Experiment Name: At_Drought_Soil_Dry_P Parameter: Age (day) Value: 27
  misc_feature: MA Experiment 20001557 PARAMETER Experiment Name: At_Drought_Soil_Dry_P Parameter: Organism Value: A. thaliana
  misc_feature: MA Experiment 20001557 PARAMETER Experiment Name: At_Drought_Soil_Dry_P Parameter: Plant Line Value: WS
  misc_feature: MA Experiment 20001557 PARAMETER Experiment Name: At_Drought_Soil_Dry_P Parameter: Post Timepoint (hr) Value: 3
  misc_feature: MA Experiment 20001557 PARAMETER Experiment Name: At_Drought_Soil_Dry_P Parameter: Post-Treatment Value: Re-Water vs. No Drought
  misc_feature: MA Experiment 20001557 PARAMETER Experiment Name: At_Drought_Soil_Dry_P Parameter: Timepoint (day) Value: 13
  misc_feature: MA Experiment 20001557 PARAMETER Experiment Name: At_Drought_Soil_Dry_P Parameter: Treatment Value: Drought vs. No Drought
aattcaggtcgtatacgggtacagtcaaataacccgacccgaaatgctcaacggatctgcacggacgttcgcatcgacgattcacggctttcgcgaatcgcatcacgagccttccttctctcctacgcctctttcatcaacccttctctgcgaatccaattctgataaaagtttgtaaagaatgacaaagaaaatgagaagagtgggcaagtacgaggttggtcgcacaataggtgaaggaacctttgctaaggttaagtttgcgaggaacacagacactggtgataatgtagccatcaaaattatggctaagagtacaatacttaagaacagaatggttgatcagataaaaagagagatatctataatgaagattgttcgtcacccgaacatagtgaggttgtatgaggtgttggcgagtccttcgaaaatatatatagttttggagtttgtgacaggaggagagctctttgatagaattgttcataaagggaggcttgaagaaagtgagtctcggaaatactttcaacagcttgtagatgctgttgctcattgtcactgcaagggtgtttaccaccgtgacctaaagccagaaaatcttttactcgatacaaatggaaatctgaaggtttcggatttcggactcagtgcattgcctcaggaaggagtagaacttctgcgtaccacatgtggaactccgaactatgtagctccagaggtacttagtggacagggttacgatggttcagcagctgatatttggtcttgcggggttattcttttcgttatattggctggatatttacctttttccgagacggatcttccagggttgtacagaaaaataaatgcagcagagttttcttgtccaccgtggttttccgcagaagtgaagtttttaatacataggatacttgaccccaatcccaaaacacgtattcaaattcaaggaatcaagaaagatccttggttcagattaaattatgtgcctatacgagcaagggaagaagaagaagtgaatttggatgatattcgtgcagtttttgatggaattgagggcagttatgtagcggagaatgtagagagaaatgatgaagggcccctgatgatgaatgcctttgagatgattaccttatcacaaggcttaaatttatctgcactatttgacaggcgacaggattttgttaaaaggcaaacccgttttgtttctcgaagggaacctagtgagataattgctaacattgaggctgtagcgaactcaatgggttttaagtctcatacacgaaacttcaagacaaggctcgagggattatcttcgatcaaggccggacagttagctgttgtgatagagatttacgaggtggcaccatcgcttttcatggtagacgtaagaaaggctgctggtgaaactcttgaatatcacaagttctacaagaagctatgttcgaaactggaaaacataatatggagggcaacagaaggaataccaaagtcagagattctcagaacaatcacgttttgatcccaacttaaatccaataaaaatgtacacttgtgtaataaatgacctaattattcttcagggagattggaagatttgcttcttgagctagtattctaatttgattgtgtcttgtagtttgctttggccattggtttggatccctctgttctctgtgtatggcaatacttctcaaaacttgtcctgcgaggacatgtactaacaaaacacatccaatatgagtttgcttact

SEQ ID NO: 47476 - protein, 446 aa, Arabidopsis thaliana
  peptide (1)..(446): Ceres Seq. ID no. 13592311
  misc_feature (11)..(264): Pfam Name: Protein kinase domain Pfam Description: Protein kinase domain
  misc_feature (11)..(264): Pfam Name: Protein kinase domain Pfam Description: Protein kinase domain
  misc_feature (3)..(437): Homolog of NCBI NO: 30688193 NR Description: NAF specific protein kinase family [Arabidopsis
  misc_feature (2)..(433): Homolog of NCBI NO: 7446372 NR Description: probable serine/threonine kinase (EC 2.7.1.-)
  misc_feature (1)..(433): Homolog of NCBI NO: 30683336 NR Description: CBL-interacting protein kinase 3 [Arabidopsis
  misc_feature (2)..(433): Homolog of NCBI NO: 7446371 NR Description: probable serine/threonine kinase (EC 2.7.1.-)
  misc_feature (7)..(435): Homolog of NCBI NO: 34393400 NR Description: putative CBL-interacting protein kinase 23
  misc_feature (3)..(437): Homolog of NCBI NO: 30688193 NR Description: NAF specific protein kinase family [Arabidopsis
  misc_feature (1)..(433): Homolog of NCBI NO: 30683336 NR Description: CBL-interacting protein kinase 3 [Arabidopsis
  misc_feature (7)..(435): Homolog of NCBI NO: 34393400 NR Description: putative CBL-interacting protein kinase 23
  misc_feature (1)..(446): Homolog of NCBI NO: 15238499 NR Description: CBL-interacting protein kinase 24 [Arabidopsis
  misc_feature (10)..(371): Homolog of NCBI NO: 7682805 NR Description: contains similarity to Pfam family PF00069
  misc_feature (5)..(442): Homolog of NCBI NO: 15233820 NR Description: CBL-interacting protein kinase 8 [Arabidopsis
  misc_feature (7)..(433): Homolog of NCBI NO: 25387051 NR Description: probable serine/threonine kinase
  misc_feature (7)..(433): Homolog of NCBI NO: 18397430 NR Description: CBL-interacting protein kinase 23 [Arabidopsis
  misc_feature (2)..(433): Homolog of NCBI NO: 7446371 NR Description: probable serine/threonine kinase (EC 2.7.1.-)
  misc_feature (2)..(433): Homolog of NCBI NO: 7446372 NR Description: probable serine/threonine kinase (EC 2.7.1.-)
  misc_feature (7)..(433): Homolog of NCBI NO: 18397430 NR Description: CBL-interacting protein kinase 23 [Arabidopsis
  misc_feature (7)..(433): Homolog of NCBI NO: 25387051 NR Description: probable serine/threonine kinase
  misc_feature (5)..(442): Homolog of NCBI NO: 15233820 NR Description: CBL-interacting protein kinase 8 [Arabidopsis
  misc_feature (10)..(371): Homolog of NCBI NO: 7682805 NR Description: contains similarity to Pfam family PF00069
  misc_feature (1)..(446): Homolog of NCBI NO: 15238499 NR Description: CBL-interacting protein kinase 24 [Arabidopsis
MTKKMRRVGKYEVGRTIGEGTFAKVKFARNTDTGDNVAIKIMAKSTILKNRMVDQIKREISIMKIVRHPNIVRLYEVLASPSKIYIVLEFVTGGELFDRIVHKGRLEESESRKYFQQLVDAVAHCHCKGVYHRDLKPENLLLDTNGNLKVSDFGLSALPQEGVELLRTTCGTPNYVAPEVLSGQGYDGSAADIWSCGVILFVILAGYLPFSETDLPGLYRKINAAEFSCPPWFSAEVKFLIHRILDPNPKTRIQIQGIKKDPWFRLNYVPIRAREEEEVNLDDIRAVFDGIEGSYVAENVERNDEGPLMMNAFEMITLSQGLNLSALFDRRQDFVKRQTRFVSRREPSEIIANIEAVANSMGFKSHTRNFKTRLEGLSSIKAGQLAVVIEIYEVAPSLFMVDVRKAAGETLEYHKFYKKLCSKLENIIWRATEGIPKSEILRTITF

SEQ ID NO: 47477 - protein, 442 aa, Arabidopsis thaliana
  peptide (1)..(442): Ceres Seq. ID no. 13592312
  misc_feature (7)..(260): Pfam Name: Protein kinase domain Pfam Description: Protein kinase domain
  misc_feature (7)..(260): Pfam Name: Protein kinase domain Pfam Description: Protein kinase domain
  misc_feature (1)..(433): Homolog of NCBI NO: 30688193 NR Description: NAF specific protein kinase family [Arabidopsis
  misc_feature (1)..(429): Homolog of NCBI NO: 7446372 NR Description: probable serine/threonine kinase (EC 2.7.1.-)
  misc_feature (1)..(429): Homolog of NCBI NO: 30683336 NR Description: CBL-interacting protein kinase 3 [Arabidopsis
  misc_feature (1)..(429): Homolog of NCBI NO: 7446371 NR Description: probable serine/threonine kinase (EC 2.7.1.-)
  misc_feature (3)..(431): Homolog of NCBI NO: 34393400 NR Description: putative CBL-interacting protein kinase 23
  misc_feature (1)..(433): Homolog of NCBI NO: 30688193 NR Description: NAF specific protein kinase family [Arabidopsis
  misc_feature (1)..(429): Homolog of NCBI NO: 30683336 NR Description: CBL-interacting protein kinase 3 [Arabidopsis
  misc_feature (3)..(431): Homolog of NCBI NO: 34393400 NR Description: putative CBL-interacting protein kinase 23
  misc_feature (1)..(442): Homolog of NCBI NO: 15238499 NR Description: CBL-interacting protein kinase 24 [Arabidopsis
  misc_feature (6)..(367): Homolog of NCBI NO: 7682805 NR Description: contains similarity to Pfam family PF00069
  misc_feature (1)..(438): Homolog of NCBI NO: 15233820 NR Description: CBL-interacting protein kinase 8 [Arabidopsis
  misc_feature (3)..(429): Homolog of NCBI NO: 25387051 NR Description: probable serine/threonine kinase
  misc_feature (3)..(429): Homolog of NCBI NO: 18397430 NR Description: CBL-interacting protein kinase 23 [Arabidopsis
  misc_feature (1)..(429): Homolog of NCBI NO: 7446371 NR Description: probable serine/threonine kinase (EC 2.7.1.-)
  misc_feature (1)..(429): Homolog of NCBI NO: 7446372 NR Description: probable serine/threonine kinase (EC 2.7.1.-)
  misc_feature (3)..(429): Homolog of NCBI NO: 18397430 NR Description: CBL-interacting protein kinase 23 [Arabidopsis
  misc_feature (3)..(429): Homolog of NCBI NO: 25387051 NR Description: probable serine/threonine kinase
  misc_feature (1)..(438): Homolog of NCBI NO: 15233820 NR Description: CBL-interacting protein kinase 8 [Arabidopsis
  misc_feature (6)..(367): Homolog of NCBI NO: 7682805 NR Description: contains similarity to Pfam family PF00069
  misc_feature (1)..(442): Homolog of NCBI NO: 15238499 NR Description: CBL-interacting protein kinase 24 [Arabidopsis
MRRVGKYEVGRTIGEGTFAKVKFARNTDTGDNVAIKIMAKSTILKNRMVDQIKREISIMKIVRHPNIVRLYEVLASPSKIYIVLEFVTGGELFDRIVHKGRLEESESRKYFQQLVDAVAHCHCKGVYHRDLKPENLLLDTNGNLKVSDFGLSALPQEGVELLRTTCGTPNYVAPEVLSGQGYDGSAADIWSCGVILFVILAGYLPFSETDLPGLYRKINAAEFSCPPWFSAEVKFLIHRILDPNPKTRIQIQGIKKDPWFRLNYVPIRAREEEEVNLDDIRAVFDGIEGSYVAENVERNDEGPLMMNAFEMITLSQGLNLSALFDRRQDFVKRQTRFVSRREPSEIIANIEAVANSMGFKSHTRNFKTRLEGLSSIKAGQLAVVIEIYEVAPSLFMVDVRKAAGETLEYHKFYKKLCSKLENIIWRATEGIPKSEILRTITF

SEQ ID NO: 47478 - protein, 405 aa, Arabidopsis thaliana
  peptide (1)..(405): Ceres Seq. ID no. 13592313
  misc_feature (1)..(223): Pfam Name: Protein kinase domain Pfam Description: Protein kinase domain
  misc_feature (1)..(223): Pfam Name: Protein kinase domain Pfam Description: Protein kinase domain
  misc_feature (1)..(396): Homolog of NCBI NO: 30688193 NR Description: NAF specific protein kinase family [Arabidopsis
  misc_feature (1)..(392): Homolog of NCBI NO: 7446372 NR Description: probable serine/threonine kinase (EC 2.7.1.-)
  misc_feature (1)..(392): Homolog of NCBI NO: 30683336 NR Description: CBL-interacting protein kinase 3 [Arabidopsis
  misc_feature (1)..(392): Homolog of NCBI NO: 7446371 NR Description: probable serine/threonine kinase (EC 2.7.1.-)
  misc_feature (1)..(394): Homolog of NCBI NO: 34393400 NR Description: putative CBL-interacting protein kinase 23
  misc_feature (1)..(396): Homolog of NCBI NO: 30688193 NR Description: NAF specific protein kinase family [Arabidopsis
  misc_feature (1)..(392): Homolog of NCBI NO: 30683336 NR Description: CBL-interacting protein kinase 3 [Arabidopsis
  misc_feature (1)..(394): Homolog of NCBI NO: 34393400 NR Description: putative CBL-interacting protein kinase 23
  misc_feature (1)..(405): Homolog of NCBI NO: 15238499 NR Description: CBL-interacting protein kinase 24 [Arabidopsis
  misc_feature (1)..(330): Homolog of NCBI NO: 7682805 NR Description: contains similarity to Pfam family PF00069
  misc_feature (1)..(401): Homolog of NCBI NO: 15233820 NR Description: CBL-interacting protein kinase 8 [Arabidopsis
  misc_feature (1)..(392): Homolog of NCBI NO: 25387051 NR Description: probable serine/threonine kinase
  misc_feature (1)..(392): Homolog of NCBI NO: 18397430 NR Description: CBL-interacting protein kinase 23 [Arabidopsis
  misc_feature (1)..(392): Homolog of NCBI NO: 7446371 NR Description: probable serine/threonine kinase (EC 2.7.1.-)
  misc_feature (1)..(392): Homolog of NCBI NO: 7446372 NR Description: probable serine/threonine kinase (EC 2.7.1.-)
  misc_feature (1)..(392): Homolog of NCBI NO: 18397430 NR Description: CBL-interacting protein kinase 23 [Arabidopsis
  misc_feature (1)..(392): Homolog of NCBI NO: 25387051 NR Description: probable serine/threonine kinase
  misc_feature (1)..(401): Homolog of NCBI NO: 15233820 NR Description: CBL-interacting protein kinase 8 [Arabidopsis
  misc_feature (1)..(330): Homolog of NCBI NO: 7682805 NR Description: contains similarity to Pfam family PF00069
  misc_feature (1)..(405): Homolog of NCBI NO: 15238499 NR Description: CBL-interacting protein kinase 24 [Arabidopsis
MAKSTILKNRMVDQIKREISIMKIVRHPNIVRLYEVLASPSKIYIVLEFVTGGELFDRIVHKGRLEESESRKYFQQLVDAVAHCHCKGVYHRDLKPENLLLDTNGNLKVSDFGLSALPQEGVELLRTTCGTPNYVAPEVLSGQGYDGSAADIWSCGVILFVILAGYLPFSETDLPGLYRKINAAEFSCPPWFSAEVKFLIHRILDPNPKTRIQIQGIKKDPWFRLNYVPIRAREEEEVNLDDIRAVFDGIEGSYVAENVERNDEGPLMMNAFEMITLSQGLNLSALFDRRQDFVKRQTRFVSRREPSEIIANIEAVANSMGFKSHTRNFKTRLEGLSSIKAGQLAVVIEIYEVAPSLFMVDVRKAAGETLEYHKFYKKLCSKLENIIWRATEGIPKSEILRTITF

SEQ ID NO: 47479 - DNA, 2714 bp, Arabidopsis thaliana; identical to SEQ ID NO: 44952
  misc_feature (1)..(2714): Ceres Seq. ID no. 12600111
  misc_feature: MA Experiment ID: 20000169 Result: Up-regulated in Transcription
  misc_feature: MA Experiment 20000169 PARAMETER Experiment Name: At_100uM_ABA_P Parameter: Age (day) Value: 14
  misc_feature: MA Experiment 20000169 PARAMETER Experiment Name: At_100uM_ABA_P Parameter: Organism Value: A. thaliana
  misc_feature: MA Experiment 20000169 PARAMETER Experiment Name: At_100uM_ABA_P Parameter: Plant Line Value: WS
  misc_feature: MA Experiment 20000169 PARAMETER Experiment Name: At_100uM_ABA_P Parameter: Timepoint (hr) Value: 6
  misc_feature: MA Experiment 20000169 PARAMETER Experiment Name: At_100uM_ABA_P Parameter: Tissue Value: Aerial
  misc_feature: MA Experiment 20000169 PARAMETER Experiment Name: At_100uM_ABA_P Parameter: Treatment Value: 100uM ABA vs. No Treatment
  misc_feature: MA Experiment ID: 20000173 Result: Up-regulated in Transcription
  misc_feature: MA Experiment 20000173 PARAMETER Experiment Name: At_42deg_Heat_P Parameter: Age (day) Value: 14
  misc_feature: MA Experiment 20000173 PARAMETER Experiment Name: At_42deg_Heat_P Parameter: Organism Value: A. thaliana
  misc_feature: MA Experiment 20000173 PARAMETER Experiment Name: At_42deg_Heat_P Parameter: Plant Line Value: WS
  misc_feature: MA Experiment 20000173 PARAMETER Experiment Name: At_42deg_Heat_P Parameter: Temperature (deg C) Value: 42 vs. 22
  misc_feature: MA Experiment 20000173 PARAMETER Experiment Name: At_42deg_Heat_P Parameter: Timepoint (hr) Value: 6
  misc_feature: MA Experiment 20000173 PARAMETER Experiment Name: At_42deg_Heat_P Parameter: Tissue Value: Aerial
  misc_feature: MA Experiment ID: 20000179 Result: Down-regulated in Transcription
  misc_feature: MA Experiment 20000179 PARAMETER Experiment Name: At_Germinating_Seeds_P Parameter: Age (hr) Value: 6 vs. 0
  misc_feature: MA Experiment 20000179 PARAMETER Experiment Name: At_Germinating_Seeds_P Parameter: Tissue Value: Germinating Seeds
  misc_feature: MA Experiment ID: 20000180 Result: Down-regulated in Transcription
  misc_feature: MA Experiment 20000180 PARAMETER Experiment Name: At_Germinating_Seeds_P Parameter: Age (hr) Value: 24 vs. 0
  misc_feature: MA Experiment 20000180 PARAMETER Experiment Name: At_Germinating_Seeds_P Parameter: Tissue Value: Germinating Seeds
  misc_feature: MA Experiment ID: 20000182 Result: Up-regulated in Transcription
  misc_feature: MA Experiment 20000182 PARAMETER Experiment Name: At_2mM_SA_P Parameter: Age (day) Value: 14
  misc_feature: MA Experiment 20000182 PARAMETER Experiment Name: At_2mM_SA_P Parameter: Organism Value: A. thaliana
  misc_feature: MA Experiment 20000182 PARAMETER Experiment Name: At_2mM_SA_P Parameter: Plant Line Value: WS
  misc_feature: MA Experiment 20000182 PARAMETER Experiment Name: At_2mM_SA_P Parameter: Timepoint (hr) Value: 6
  misc_feature: MA Experiment 20000182 PARAMETER Experiment Name: At_2mM_SA_P Parameter: Tissue Value: Aerial
  misc_feature: MA Experiment 20000182 PARAMETER Experiment Name: At_2mM_SA_P Parameter: Treatment Value: 2mM SA vs. No Treatment
  misc_feature: MA Experiment ID: 20000184 Result: Down-regulated in Transcription
  misc_feature: MA Experiment 20000184 PARAMETER Experiment Name: At_Shoots__P Parameter: Age (day) Value: 7
  misc_feature: MA Experiment 20000184 PARAMETER Experiment Name: At_Shoots__P Parameter: Tissue Value: Shoots vs. Whole Plant
  misc_feature: MA Experiment ID: 20000185 Result: Down-regulated in Transcription
  misc_feature: MA Experiment 20000185 PARAMETER Experiment Name: At_Roots__P Parameter: Age (day) Value: 7 vs. 21
  misc_feature: MA Experiment 20000185 PARAMETER Experiment Name: At_Roots__P Parameter: Organism Value: A. thaliana
  misc_feature: MA Experiment 20000185 PARAMETER Experiment Name: At_Roots__P Parameter: Tissue Value: Roots vs. Whole Plant
  misc_feature: MA Experiment ID: 20000211 Result: Up-regulated in Transcription
  misc_feature: MA Experiment 20000211 PARAMETER Experiment Name: At_0.001percent_MeJA__P Parameter: Age (day) Value: 14
  misc_feature: MA Experiment 20000211 PARAMETER Experiment Name: At_0.001percent_MeJA__P Parameter: Organism Value: A. thaliana
  misc_feature: MA Experiment 20000211 PARAMETER Experiment Name: At_0.001percent_MeJA__P Parameter: Plant Line Value: WS
  misc_feature: MA Experiment 20000211 PARAMETER Experiment Name: At_0.001percent_MeJA__P Parameter: Timepoint (hr) Value: 1
  misc_feature: MA Experiment 20000211 PARAMETER Experiment Name: At_0.001percent_MeJA__P Parameter: Tissue Value: Aerial
  misc_feature: MA Experiment 20000211 PARAMETER Experiment Name: At_0.001percent_MeJA__P Parameter: Treatment Value: 0.001percent MeJA vs. No Treatment
  misc_feature: MA Experiment ID: 20000264 Result: Down-regulated in Transcription
  misc_feature: MA Experiment 20000264 PARAMETER Experiment Name: At_Open_Flower_P Parameter: Age (day) Value: 21
  misc_feature: MA Experiment 20000264 PARAMETER Experiment Name: At_Open_Flower_P Parameter: Plant Line Value: WS
  misc_feature: MA Experiment 20000264 PARAMETER Experiment Name: At_Open_Flower_P Parameter: Tissue Value: Open Flower vs. Whole Plant
  misc_feature: MA Experiment ID: 20000265 Result: Down-regulated in Transcription
  misc_feature: MA Experiment 20000265 PARAMETER Experiment Name: At_Open_Flower_P Parameter: Age (day) Value: 21
  misc_feature: MA Experiment 20000265 PARAMETER Experiment Name: At_Open_Flower_P Parameter: Plant Line Value: WS
  misc_feature: MA Experiment 20000265 PARAMETER Experiment Name: At_Open_Flower_P Parameter: Tissue Value: Closed Flower vs. Whole Plant
  misc_feature: MA Experiment ID: 20000267 Result: Up-regulated in Transcription
  misc_feature: MA Experiment 20000267 PARAMETER Experiment Name: At_Drought_P Parameter: Age (day) Value: 7
  misc_feature: MA Experiment 20000267 PARAMETER Experiment Name: At_Drought_P Parameter: Organism Value: A. thaliana
  misc_feature: MA Experiment 20000267 PARAMETER Experiment Name: At_Drought_P Parameter: Plant Line Value: WS
  misc_feature: MA Experiment 20000267 PARAMETER Experiment Name: At_Drought_P Parameter: Timepoint (hr) Value: 6
  misc_feature: MA Experiment 20000267 PARAMETER Experiment Name: At_Drought_P Parameter: Tissue Value: Whole Plant
  misc_feature: MA Experiment 20000267 PARAMETER Experiment Name: At_Drought_P Parameter: Treatment Value: Drought vs. No Drought
  misc_feature: MA Experiment ID: 20000436 Result: Up-regulated in Transcription
  misc_feature: MA Experiment 20000436 PARAMETER Experiment Name: At_Drought_P Parameter: Age (day) Value: 7
  misc_feature: MA Experiment 20000436 PARAMETER Experiment Name: At_Drought_P Parameter: Organism Value: A. thaliana
  misc_feature: MA Experiment 20000436 PARAMETER Experiment Name: At_Drought_P Parameter: Plant Line Value: WS
  misc_feature: MA Experiment 20000436 PARAMETER Experiment Name: At_Drought_P Parameter: Timepoint (hr) Value: 12
  misc_feature: MA Experiment 20000436 PARAMETER Experiment Name: At_Drought_P Parameter: Tissue Value: Whole Plant
  misc_feature: MA Experiment 20000436 PARAMETER Experiment Name: At_Drought_P Parameter: Treatment Value: Drought vs. No Drought
  misc_feature: MA Experiment ID: 20000437 Result: Up-regulated in Transcription
  misc_feature: MA Experiment 20000437 PARAMETER Experiment Name: At_Drought_P Parameter: Age (day) Value: 8
  misc_feature: MA Experiment 20000437 PARAMETER Experiment Name: At_Drought_P Parameter: Organism Value: A. thaliana
  misc_feature: MA Experiment 20000437 PARAMETER Experiment Name: At_Drought_P Parameter: Plant Line Value: WS
  misc_feature: MA Experiment 20000437 PARAMETER Experiment Name: At_Drought_P Parameter: Timepoint (hr) Value: 24
  misc_feature: MA Experiment 20000437 PARAMETER Experiment Name: At_Drought_P Parameter: Tissue Value: Whole Plant
  misc_feature: MA Experiment 20000437 PARAMETER Experiment Name: At_Drought_P Parameter: Treatment Value: Drought vs. No Drought
  misc_feature: MA Experiment ID: 20000438 Result: Down-regulated in Transcription
  misc_feature: MA Experiment 20000438 PARAMETER Experiment Name: At_Shoots__P Parameter: Age (day) Value: 14
  misc_feature: MA Experiment 20000438 PARAMETER Experiment Name: At_Shoots__P Parameter: Tissue Value: Shoots vs. Whole Plant
  misc_feature: MA Experiment ID: 20000439 Result: Down-regulated in Transcription
  misc_feature: MA Experiment 20000439 PARAMETER Experiment Name: At_Roots__P Parameter: Age (day) Value: 14 vs. 21
  misc_feature: MA Experiment 20000439 PARAMETER Experiment Name: At_Roots__P Parameter: Organism Value: A. thaliana
  misc_feature: MA Experiment 20000439 PARAMETER Experiment Name: At_Roots__P Parameter: Tissue Value: Roots vs. Whole Plant
  misc_feature: MA Experiment ID: 20000441 Result: Up-regulated in Transcription
  misc_feature: MA Experiment 20000441 PARAMETER Experiment Name: At_1uM_BR-BRZ__P Parameter: Tissue Value: Shoot Apices
  misc_feature: MA Experiment 20000441 PARAMETER Experiment Name: At_1uM_BR-BRZ__P Parameter: Treatment Value: 1uM BR vs. No Treatment
  misc_feature: MA Experiment ID: 20000452 Result: Down-regulated in Transcription
  misc_feature: MA Experiment 20000452 PARAMETER Experiment Name: At_CS6879_Shoots-Roots_P Parameter: Age (day) Value: 14
  misc_feature: MA Experiment 20000452 PARAMETER Experiment Name: At_CS6879_Shoots-Roots_P Parameter: Organism Value: A. thaliana
  misc_feature: MA Experiment 20000452 PARAMETER Experiment Name: At_CS6879_Shoots-Roots_P Parameter: Plant Line Value: CS6879 vs. WS
  misc_feature: MA Experiment 20000452 PARAMETER Experiment Name: At_CS6879_Shoots-Roots_P Parameter: Tissue Value: Shoots
  misc_feature: MA Experiment ID: 20000453 Result: Up-regulated in Transcription
  misc_feature: MA Experiment 20000453 PARAMETER Experiment Name: At_100uM_ABA_P Parameter: Age (day) Value: 15
  misc_feature: MA Experiment 20000453 PARAMETER Experiment Name: At_100uM_ABA_P Parameter: Organism Value: A. thaliana
  misc_feature: MA Experiment 20000453 PARAMETER Experiment Name: At_100uM_ABA_P Parameter: Plant Line Value: WS
  misc_feature: MA Experiment 20000453 PARAMETER Experiment Name: At_100uM_ABA_P Parameter: Timepoint (hr) Value: 24
  misc_feature: MA Experiment 20000453 PARAMETER Experiment Name: At_100uM_ABA_P Parameter: Tissue Value: Aerial
  misc_feature: MA Experiment 20000453 PARAMETER Experiment Name: At_100uM_ABA_P Parameter: Treatment Value: 100uM ABA vs. No Treatment
  misc_feature: MA Experiment ID: 20000527 Result: Up-regulated in Transcription
  misc_feature: MA Experiment 20000527 PARAMETER Experiment Name: At_10percent_PEG_P Parameter: Age (day) Value: 20
  misc_feature: MA Experiment 20000527 PARAMETER Experiment Name: At_10percent_PEG_P Parameter: Organism Value: A. thaliana
  misc_feature: MA Experiment 20000527 PARAMETER Experiment Name: At_10percent_PEG_P Parameter: Plant Line Value: WS
  misc_feature: MA Experiment 20000527 PARAMETER Experiment Name: At_10percent_PEG_P Parameter: Timepoint (day) Value: 20
  misc_feature: MA Experiment 20000527 PARAMETER Experiment Name: At_10percent_PEG_P Parameter: Tissue Value: Whole Plant
  misc_feature: MA Experiment 20000527 PARAMETER Experiment Name: At_10percent_PEG_P Parameter: Treatment Value: 10percent PEG vs. No Treatment
  misc_feature: MA Experiment ID: 20000573 Result: Up-regulated in Transcription
  misc_feature: MA Experiment 20000573 PARAMETER Experiment Name: At_100uM_ABA_Mutants__P Parameter: Organism Value: A. thaliana
  misc_feature: MA Experiment 20000573 PARAMETER Experiment Name: At_100uM_ABA_Mutants__P Parameter: Plant Line Value: CS22 vs. Ler wt
  misc_feature: MA Experiment 20000573 PARAMETER Experiment Name: At_100uM_ABA_Mutants__P Parameter: Timepoint (hr) Value: N/A
  misc_feature: MA Experiment 20000573 PARAMETER Experiment Name: At_100uM_ABA_Mutants__P Parameter: Tissue Value: Whole Plant
  misc_feature: MA Experiment 20000573 PARAMETER Experiment Name: At_100uM_ABA_Mutants__P Parameter: Treatment Value: None
  misc_feature: MA Experiment ID: 20000578 Result: Up-regulated in Transcription
  misc_feature: MA Experiment 20000578 PARAMETER Experiment Name: At_CS3726__P Parameter: Organism Value: A. thaliana
  misc_feature: MA Experiment 20000578 PARAMETER Experiment Name: At_CS3726__P Parameter: Plant Line Value: CS3726
  misc_feature: MA Experiment 20000578 PARAMETER Experiment Name: At_CS3726__P Parameter: Tissue Value: Whole Plant
  misc_feature: MA Experiment ID: 20000606 Result: Up-regulated in Transcription
  misc_feature: MA Experiment 20000606 PARAMETER Experiment Name: At_CS8548_Mutant_P Parameter: Age (day) Value: 14
  misc_feature: MA Experiment 20000606 PARAMETER Experiment Name: At_CS8548_Mutant_P Parameter: Plant Line Value: CS8548 vs. wt
  misc_feature: MA Experiment 20000606 PARAMETER Experiment Name: At_CS8548_Mutant_P Parameter: Tissue Value: Whole Plant
  misc_feature: MA Experiment ID: 20000709 Result: Up-regulated in Transcription
  misc_feature: MA Experiment 20000709 PARAMETER Experiment Name: At_15mM_NH4NO3_L-to-H_P Parameter: Age (hr) Value: 14
  misc_feature: MA Experiment 20000709 PARAMETER Experiment Name: At_15mM_NH4NO3_L-to-H_P Parameter: Organism Value: A. thaliana
  misc_feature: MA Experiment 20000709 PARAMETER Experiment Name: At_15mM_NH4NO3_L-to-H_P Parameter: Plant Line Value: WS
  misc_feature: MA Experiment 20000709 PARAMETER Experiment Name: At_15mM_NH4NO3_L-to-H_P Parameter: Timepoint (hr) Value: 4
  misc_feature: MA Experiment 20000709 PARAMETER Experiment Name: At_15mM_NH4NO3_L-to-H_P Parameter: Tissue Value: Aerial
  misc_feature: MA Experiment 20000709 PARAMETER Experiment Name: At_15mM_NH4NO3_L-to-H_P Parameter: Treatment Value: 15mM NH4NO3 vs. 30mM Mannitol
  misc_feature: MA Experiment ID: 20001248 Result: Up-regulated in Transcription
  misc_feature: MA Experiment 20001248 PARAMETER Experiment Name: At_Far-red-induction_P Parameter: Age (day) Value: 7
  misc_feature: MA Experiment 20001248 PARAMETER Experiment Name: At_Far-red-induction_P Parameter: Light Value: Far-red vs. White
  misc_feature: MA Experiment 20001248 PARAMETER Experiment Name: At_Far-red-induction_P Parameter: Organism Value: A. thaliana
  misc_feature: MA Experiment 20001248 PARAMETER Experiment Name: At_Far-red-induction_P Parameter: Plant Line Value: Columbia
  misc_feature: MA Experiment 20001248 PARAMETER Experiment Name: At_Far-red-induction_P Parameter: Timepoint (hr) Value: 4
  misc_feature: MA Experiment 20001248 PARAMETER Experiment Name: At_Far-red-induction_P Parameter: Tissue Value: Whole Plant
  misc_feature: MA Experiment ID: 20001450 Result: Up-regulated in Transcription
  misc_feature: MA Experiment 20001450 PARAMETER Experiment Name: At_Far-red-induction_P Parameter: Age (day) Value: 7
  misc_feature: MA Experiment 20001450 PARAMETER Experiment Name: At_Far-red-induction_P Parameter: Light Value: Far-red vs. White
  misc_feature: MA Experiment 20001450 PARAMETER Experiment Name: At_Far-red-induction_P Parameter: Organism Value: A. thaliana
  misc_feature: MA Experiment 20001450 PARAMETER Experiment Name: At_Far-red-induction_P Parameter: Plant Line Value: Columbia
  misc_feature: MA Experiment 20001450 PARAMETER Experiment Name: At_Far-red-induction_P Parameter: Timepoint (hr) Value: 8
  misc_feature: MA Experiment 20001450 PARAMETER Experiment Name: At_Far-red-induction_P Parameter: Tissue Value: Whole Plant
  misc_feature: MA Experiment ID: 20001451 Result: Up-regulated in Transcription
  misc_feature: MA Experiment 20001451 PARAMETER Experiment Name: At_Far-red-induction_P Parameter: Age (day) Value: 7
  misc_feature: MA Experiment 20001451 PARAMETER Experiment Name: At_Far-red-induction_P Parameter: Light Value: Far-red vs. White
  misc_feature: MA Experiment 20001451 PARAMETER Experiment Name: At_Far-red-induction_P Parameter: Organism Value: A. thaliana
  misc_feature: MA Experiment 20001451 PARAMETER Experiment Name: At_Far-red-induction_P Parameter: Plant Line Value: Columbia
  misc_feature: MA Experiment 20001451 PARAMETER Experiment Name: At_Far-red-induction_P Parameter: Timepoint (hr) Value: 24
  misc_feature: MA Experiment 20001451 PARAMETER Experiment Name: At_Far-red-induction_P Parameter: Tissue Value: Whole Plant
  misc_feature: MA Experiment ID: 20001554 Result: Up-regulated in Transcription
  misc_feature: MA Experiment 20001554 PARAMETER Experiment Name: At_Drought_Soil_Dry_P Parameter: Age (day) Value: 21
  misc_feature: MA Experiment 20001554 PARAMETER Experiment Name: At_Drought_Soil_Dry_P Parameter: Organism Value: A. thaliana
  misc_feature: MA Experiment 20001554 PARAMETER Experiment Name: At_Drought_Soil_Dry_P Parameter: Plant Line Value: WS
  misc_feature: MA Experiment 20001554 PARAMETER Experiment Name: At_Drought_Soil_Dry_P Parameter: Post Timepoint (hr) Value: None
  misc_feature: MA Experiment 20001554 PARAMETER Experiment Name: At_Drought_Soil_Dry_P Parameter: Post-Treatment Value: None
  misc_feature: MA Experiment 20001554 PARAMETER Experiment Name: At_Drought_Soil_Dry_P Parameter: Timepoint (day) Value: 7
  misc_feature: MA Experiment 20001554 PARAMETER Experiment Name: At_Drought_Soil_Dry_P Parameter: Treatment Value: Drought vs. No Drought
  misc_feature: MA Experiment ID: 20001555 Result: Up-regulated in Transcription
  misc_feature: MA Experiment 20001555 PARAMETER Experiment Name: At_Drought_Soil_Dry_P Parameter: Age (day) Value: 24
  misc_feature: MA Experiment 20001555 PARAMETER Experiment Name: At_Drought_Soil_Dry_P Parameter: Organism Value: A. thaliana
  misc_feature: MA Experiment 20001555 PARAMETER Experiment Name: At_Drought_Soil_Dry_P Parameter: Plant Line Value: WS
  misc_feature: MA Experiment 20001555 PARAMETER Experiment Name: At_Drought_Soil_Dry_P Parameter: Post Timepoint (hr) Value: None
  misc_feature: MA Experiment 20001555 PARAMETER Experiment Name: At_Drought_Soil_Dry_P Parameter: Post-Treatment Value: None
  misc_feature: MA Experiment 20001555 PARAMETER Experiment Name: At_Drought_Soil_Dry_P Parameter: Timepoint (day) Value: 10
  misc_feature: MA Experiment 20001555 PARAMETER Experiment Name: At_Drought_Soil_Dry_P Parameter: Treatment Value: Drought vs. No Drought
  misc_feature: MA Experiment ID: 20001556 Result: Up-regulated in Transcription
  misc_feature: MA Experiment 20001556 PARAMETER Experiment Name: At_Drought_Soil_Dry_P Parameter: Age (day) Value: 26
  misc_feature: MA Experiment 20001556 PARAMETER Experiment Name: At_Drought_Soil_Dry_P Parameter: Organism Value: A. thaliana
  misc_feature: MA Experiment 20001556 PARAMETER Experiment Name: At_Drought_Soil_Dry_P Parameter: Plant Line Value: WS
  misc_feature: MA Experiment 20001556 PARAMETER Experiment Name: At_Drought_Soil_Dry_P Parameter: Post Timepoint (hr) Value: None
  misc_feature: MA Experiment 20001556 PARAMETER Experiment Name: At_Drought_Soil_Dry_P Parameter: Post-Treatment Value: None
  misc_feature: MA Experiment 20001556 PARAMETER Experiment Name: At_Drought_Soil_Dry_P Parameter: Timepoint (day) Value: 12
  misc_feature: MA Experiment 20001556 PARAMETER Experiment Name: At_Drought_Soil_Dry_P Parameter: Treatment Value: Drought vs. No Drought
  misc_feature: MA Experiment ID: 20001557 Result: Up-regulated in Transcription
  misc_feature: MA Experiment 20001557 PARAMETER Experiment Name: At_Drought_Soil_Dry_P Parameter: Age (day) Value: 27
  misc_feature: MA Experiment 20001557 PARAMETER Experiment Name: At_Drought_Soil_Dry_P Parameter: Organism Value: A. thaliana
  misc_feature: MA Experiment 20001557 PARAMETER Experiment Name: At_Drought_Soil_Dry_P Parameter: Plant Line Value: WS
  misc_feature: MA Experiment 20001557 PARAMETER Experiment Name: At_Drought_Soil_Dry_P Parameter: Post Timepoint (hr) Value: 3
  misc_feature: MA Experiment 20001557 PARAMETER Experiment Name: At_Drought_Soil_Dry_P Parameter: Post-Treatment Value: Re-Water vs. No Drought
  misc_feature: MA Experiment 20001557 PARAMETER Experiment Name: At_Drought_Soil_Dry_P Parameter: Timepoint (day) Value: 13
  misc_feature: MA Experiment 20001557 PARAMETER Experiment Name: At_Drought_Soil_Dry_P Parameter: Treatment Value: Drought vs. No Drought
  misc_feature: MA Experiment ID: 20001558 Result: Up-regulated in Transcription
  misc_feature: MA Experiment 20001558 PARAMETER Experiment Name: At_Drought_Soil_Dry_P Parameter: Age (day) Value: 27
  misc_feature: MA Experiment 20001558 PARAMETER Experiment Name: At_Drought_Soil_Dry_P Parameter: Organism Value: A. thaliana
  misc_feature: MA Experiment 20001558 PARAMETER Experiment Name: At_Drought_Soil_Dry_P Parameter: Plant Line Value: WS
  misc_feature: MA Experiment 20001558 PARAMETER Experiment Name: At_Drought_Soil_Dry_P Parameter: Post Timepoint (hr) Value: 6
  misc_feature: MA Experiment 20001558 PARAMETER Experiment Name: At_Drought_Soil_Dry_P Parameter: Post-Treatment Value: Re-Water vs. No Drought
  misc_feature: MA Experiment 20001558 PARAMETER Experiment Name: At_Drought_Soil_Dry_P Parameter: Timepoint (day) Value: 13
  misc_feature: MA Experiment 20001558 PARAMETER Experiment Name: At_Drought_Soil_Dry_P Parameter: Treatment Value: Drought vs. No Drought
  misc_feature: MA Experiment ID: 20001757 Result: Up-regulated in Transcription
  misc_feature: MA Experiment 20001757 PARAMETER Experiment Name: At_50mM_NH4NO3_L-to-H_P Parameter: Timepoint (hr) Value: 6
  misc_feature: MA Experiment 20001757 PARAMETER Experiment Name: At_50mM_NH4NO3_L-to-H_P Parameter: Tissue Value: Leaf
  misc_feature: MA Experiment 20001757 PARAMETER Experiment Name: At_50mM_NH4NO3_L-to-H_P Parameter: Treatment Value: 50mM NH4NO3 vs 100mM Mannitol
  misc_feature: MA Experiment ID: 20001905 Result: Up-regulated in Transcription
  misc_feature: MA Experiment 20001905 PARAMETER Experiment Name: At_Drought_Reproduction_P Parameter: Age (day) Value: 40
  misc_feature: MA Experiment 20001905 PARAMETER Experiment Name: At_Drought_Reproduction_P Parameter: Organism Value: A. thaliana
  misc_feature: MA Experiment 20001905 PARAMETER Experiment Name: At_Drought_Reproduction_P Parameter: Plant Line Value: WS
  misc_feature: MA Experiment 20001905 PARAMETER Experiment Name: At_Drought_Reproduction_P Parameter: Timepoint (day) Value: 10
  misc_feature: MA Experiment 20001905 PARAMETER Experiment Name: At_Drought_Reproduction_P Parameter: Tissue Value: Rosettes
  misc_feature: MA Experiment 20001905 PARAMETER Experiment Name: At_Drought_Reproduction_P Parameter: Treatment Value: Drought vs. No Drought
  misc_feature: MA Experiment ID: 20001908 Result: Up-regulated in Transcription
  misc_feature: MA Experiment 20001908 PARAMETER Experiment Name: At_Drought_Reproduction_P Parameter: Age (day) Value: 40
  misc_feature: MA Experiment 20001908 PARAMETER Experiment Name: At_Drought_Reproduction_P Parameter: Organism Value: A. thaliana
  misc_feature: MA Experiment 20001908 PARAMETER Experiment Name: At_Drought_Reproduction_P Parameter: Plant Line Value: WS
  misc_feature: MA Experiment 20001908 PARAMETER Experiment Name: At_Drought_Reproduction_P Parameter: Timepoint (day) Value: 10
  misc_feature: MA Experiment 20001908 PARAMETER Experiment Name: At_Drought_Reproduction_P Parameter: Tissue Value: Siliques
  misc_feature: MA Experiment 20001908 PARAMETER Experiment Name: At_Drought_Reproduction_P Parameter: Treatment Value: Drought vs. No Drought
  misc_feature: MA Experiment ID: 20001911 Result: Up-regulated in Transcription
  misc_feature: MA Experiment 20001911 PARAMETER Experiment Name: At_Drought_Reproduction_P Parameter: Age (day) Value: 40
  misc_feature: MA Experiment 20001911 PARAMETER Experiment Name: At_Drought_Reproduction_P Parameter: Organism Value: A. thaliana
  misc_feature: MA Experiment 20001911 PARAMETER Experiment Name: At_Drought_Reproduction_P Parameter: Plant Line Value: WS
  misc_feature: MA Experiment 20001911 PARAMETER Experiment Name: At_Drought_Reproduction_P Parameter: Timepoint (day) Value: 10
  misc_feature: MA Experiment 20001911 PARAMETER Experiment Name: At_Drought_Reproduction_P Parameter: Tissue Value: Flowers
  misc_feature: MA Experiment 20001911 PARAMETER Experiment Name: At_Drought_Reproduction_P Parameter: Treatment Value: Drought vs. No Drought

SEQ ID NO: 47480 - protein, 773 aa, Arabidopsis thaliana; identical to SEQ ID NO: 44953
  peptide (1)..(773): Ceres Seq. ID no. 12600112
  misc_feature (714)..(769): Homolog of NCBI NO: 30687712 NR Description: glycosyl hydrolase family 36 [Arabidopsis
  misc_feature (1)..(680): Homolog of NCBI NO: 30687712 NR Description: glycosyl hydrolase family 36 [Arabidopsis
  misc_feature (706)..(771): Homolog of NCBI NO: 15222768 NR Description: glycosyl hydrolase family 36; protein id:
  misc_feature (1)..(680): Homolog of NCBI NO: 15222768 NR Description: glycosyl hydrolase family 36; protein id:
  misc_feature (713)..(771): Homolog of NCBI NO: 23452226 NR Description: alkaline alpha-galactosidase seed imbibition
  misc_feature (1)..(680): Homolog of NCBI NO: 23452226 NR Description: alkaline alpha-galactosidase seed imbibition
  misc_feature (707)..(771): Homolog of NCBI NO: 29838629 NR Description: alkaline alpha galactosidase I [Cucumis melo]
  misc_feature (1)..(684): Homolog of NCBI NO: 29838629 NR Description: alkaline alpha galactosidase I [Cucumis melo]
  misc_feature (712)..(773): Homolog of NCBI NO: 282994 NR Description: Sip1 protein - barley
  misc_feature (1)..(689): Homolog of NCBI NO: 282994 NR Description: Sip1 protein - barley
  misc_feature (714)..(769): Homolog of NCBI NO: 30687712 NR Description: glycosyl hydrolase family 36 [Arabidopsis
  misc_feature (1)..(680): Homolog of NCBI NO: 30687712 NR Description: glycosyl hydrolase family 36 [Arabidopsis
  misc_feature (706)..(771): Homolog of NCBI NO: 15222768 NR Description: glycosyl hydrolase family 36; protein id:
  misc_feature (1)..(680): Homolog of NCBI NO: 15222768 NR Description: glycosyl hydrolase family 36; protein id:
  misc_feature (713)..(771): Homolog of NCBI NO: 23452226 NR Description: alkaline alpha-galactosidase seed imbibition
  misc_feature (1)..(680): Homolog of NCBI NO: 23452226 NR Description: alkaline alpha-galactosidase seed imbibition
  misc_feature (707)..(771): Homolog of NCBI NO: 29838629 NR Description: alkaline alpha galactosidase I [Cucumis melo]
  misc_feature (1)..(684): Homolog of NCBI NO: 29838629 NR Description: alkaline alpha galactosidase I [Cucumis melo]
  misc_feature (712)..(773): Homolog of NCBI NO: 282994 NR Description: Sip1 protein - barley
  misc_feature (1)..(689): Homolog of NCBI NO: 282994 NR Description: Sip1 protein - barley
  misc_feature (714)..(769): Homolog of NCBI NO: 30687712 NR Description: glycosyl hydrolase family 36 [Arabidopsis
  misc_feature (1)..(680): Homolog of NCBI NO: 30687712 NR Description: glycosyl hydrolase family 36 [Arabidopsis
  misc_feature (706)..(771): Homolog of NCBI NO: 15222768 NR Description: glycosyl hydrolase family 36; protein id:
  misc_feature (1)..(680): Homolog of NCBI NO: 15222768 NR Description: glycosyl hydrolase family 36; protein id:
  misc_feature (713)..(771): Homolog of NCBI NO: 23452226 NR Description: alkaline alpha-galactosidase seed imbibition
  misc_feature (1)..(680): Homolog of NCBI NO: 23452226 NR Description: alkaline alpha-galactosidase seed imbibition
  misc_feature (707)..(771): Homolog of NCBI NO: 29838629 NR Description: alkaline alpha galactosidase I [Cucumis melo]
  misc_feature (1)..(684): Homolog of NCBI NO: 29838629 NR Description: alkaline alpha galactosidase I [Cucumis melo]
  misc_feature (712)..(773): Homolog of NCBI NO: 282994 NR Description: Sip1 protein - barley
  misc_feature (1)..(689): Homolog of NCBI NO: 282994 NR Description: Sip1 protein - barley

SEQ ID NO: 47481 - protein, 705 aa, Arabidopsis thaliana; identical to SEQ ID NO: 44954
  peptide (1)..(705): Ceres Seq. ID no. 12600113
  misc_feature (646)..(701): Homolog of NCBI NO: 30687712 NR Description: glycosyl hydrolase family 36 [Arabidopsis
  misc_feature (1)..(612): Homolog of NCBI NO: 30687712 NR Description: glycosyl hydrolase family 36 [Arabidopsis
  misc_feature (638)..(703): Homolog of NCBI NO: 15222768 NR Description: glycosyl hydrolase family 36; protein id:
  misc_feature (1)..(612): Homolog of NCBI NO: 15222768 NR Description: glycosyl hydrolase family 36; protein id:
  misc_feature (645)..(703): Homolog of NCBI NO: 23452226 NR Description: alkaline alpha-galactosidase seed imbibition
  misc_feature (1)..(612): Homolog of NCBI NO: 23452226 NR Description: alkaline alpha-galactosidase seed imbibition
  misc_feature (639)..(703): Homolog of NCBI NO: 29838629 NR Description: alkaline alpha galactosidase I [Cucumis melo]
  misc_feature (1)..(616): Homolog of NCBI NO: 29838629 NR Description: alkaline alpha galactosidase I [Cucumis melo]
  misc_feature (644)..(705): Homolog of NCBI NO: 282994 NR Description: Sip1 protein - barley
  misc_feature (1)..(621): Homolog of NCBI NO: 282994 NR Description: Sip1 protein - barley
  misc_feature (646)..(701): Homolog of NCBI NO: 30687712 NR Description: glycosyl hydrolase family 36 [Arabidopsis
  misc_feature (1)..(612): Homolog of NCBI NO: 30687712 NR Description: glycosyl hydrolase family 36 [Arabidopsis
  misc_feature (638)..(703): Homolog of NCBI NO: 15222768 NR Description: glycosyl hydrolase family 36; protein id:
  misc_feature (1)..(612): Homolog of NCBI NO: 15222768 NR Description: glycosyl hydrolase family 36; protein id:
  misc_feature (645)..(703): Homolog of NCBI NO: 23452226 NR Description: alkaline alpha-galactosidase seed imbibition
  misc_feature (1)..(612): Homolog of NCBI NO: 23452226 NR Description: alkaline alpha-galactosidase seed imbibition
  misc_feature (639)..(703): Homolog of NCBI NO: 29838629 NR Description: alkaline alpha galactosidase I [Cucumis melo]
  misc_feature (1)..(616): Homolog of NCBI NO: 29838629 NR Description: alkaline alpha galactosidase I [Cucumis melo]
  misc_feature (644)..(705): Homolog of NCBI NO: 282994 NR Description: Sip1 protein - barley
  misc_feature (1)..(621): Homolog of NCBI NO: 282994 NR Description: Sip1 protein - barley
  misc_feature (646)..(701): Homolog of NCBI NO: 30687712 NR Description: glycosyl hydrolase family 36 [Arabidopsis
  misc_feature (1)..(612): Homolog of NCBI NO: 30687712 NR Description: glycosyl hydrolase family 36 [Arabidopsis
  misc_feature (638)..(703): Homolog of NCBI NO: 15222768 NR Description: glycosyl hydrolase family 36; protein id:
  misc_feature (1)..(612): Homolog of NCBI NO: 15222768 NR Description: glycosyl hydrolase family 36; protein id:
  misc_feature (645)..(703): Homolog of NCBI NO: 23452226 NR Description: alkaline alpha-galactosidase seed imbibition
  misc_feature (1)..(612): Homolog of NCBI NO: 23452226 NR Description: alkaline alpha-galactosidase seed imbibition
  misc_feature (639)..(703): Homolog of NCBI NO: 29838629 NR Description: alkaline alpha galactosidase I [Cucumis melo]
  misc_feature (1)..(616): Homolog of NCBI NO: 29838629 NR Description: alkaline alpha galactosidase I [Cucumis melo]
  misc_feature (644)..(705): Homolog of NCBI NO: 282994 NR Description: Sip1 protein - barley
  misc_feature (1)..(621): Homolog of NCBI NO: 282994 NR Description: Sip1 protein - barley

SEQ ID NO: 47482 - protein, 695 aa, Arabidopsis thaliana; identical to SEQ ID NO: 44955
  peptide (1)..(695): Ceres Seq. ID no. 12600114
  misc_feature (636)..(691): Homolog of NCBI NO: 30687712 NR Description: glycosyl hydrolase family 36 [Arabidopsis
  misc_feature (1)..(602): Homolog of NCBI NO: 30687712 NR Description: glycosyl hydrolase family 36 [Arabidopsis
  misc_feature (628)..(693): Homolog of NCBI NO: 15222768 NR Description: glycosyl hydrolase family 36; protein id:
  misc_feature (1)..(602): Homolog of NCBI NO: 15222768 NR Description: glycosyl hydrolase family 36; protein id:
  misc_feature (635)..(693): Homolog of NCBI NO: 23452226 NR Description: alkaline alpha-galactosidase seed imbibition
  misc_feature (1)..(602): Homolog of NCBI NO: 23452226 NR Description: alkaline alpha-galactosidase seed imbibition
  misc_feature (629)..(693): Homolog of NCBI NO: 29838629 NR Description: alkaline alpha galactosidase I [Cucumis melo]
  misc_feature (1)..(606): Homolog of NCBI NO: 29838629 NR Description: alkaline alpha galactosidase I [Cucumis melo]
  misc_feature (634)..(695): Homolog of NCBI NO: 282994 NR Description: Sip1 protein - barley
  misc_feature (1)..(611): Homolog of NCBI NO: 282994 NR Description: Sip1 protein - barley
  misc_feature (636)..(691): Homolog of NCBI NO: 30687712 NR Description: glycosyl hydrolase family 36 [Arabidopsis
  misc_feature (1)..(602): Homolog of NCBI NO: 30687712 NR Description: glycosyl hydrolase family 36 [Arabidopsis
  misc_feature (628)..(693): Homolog of NCBI NO: 15222768 NR Description: glycosyl hydrolase family 36; protein id:
  misc_feature (1)..(602): Homolog of NCBI NO: 15222768 NR Description: glycosyl hydrolase family 36; protein id:
  misc_feature (635)..(693): Homolog of NCBI NO: 23452226 NR Description: alkaline alpha-galactosidase seed imbibition
  misc_feature (1)..(602): Homolog of NCBI NO: 23452226 NR Description: alkaline alpha-galactosidase seed imbibition
  misc_feature (629)..(693): Homolog of NCBI NO: 29838629 NR Description: alkaline alpha galactosidase I [Cucumis melo]
  misc_feature (1)..(606): Homolog of NCBI NO: 29838629 NR Description: alkaline alpha galactosidase I [Cucumis melo]
  misc_feature (634)..(695): Homolog of NCBI NO: 282994 NR Description: Sip1 protein - barley
  misc_feature (1)..(611): Homolog of NCBI NO: 282994 NR Description: Sip1 protein - barley
  misc_feature (636)..(691): Homolog of NCBI NO: 30687712 NR Description: glycosyl hydrolase family 36 [Arabidopsis
  misc_feature (1)..(602): Homolog of NCBI NO: 30687712 NR Description: glycosyl hydrolase family 36 [Arabidopsis
  misc_feature (628)..(693): Homolog of NCBI NO: 15222768 NR Description: glycosyl hydrolase family 36; protein id:
  misc_feature (1)..(602): Homolog of NCBI NO: 15222768 NR Description: glycosyl hydrolase family 36; protein id:
  misc_feature (635)..(693): Homolog of NCBI NO: 23452226 NR Description: alkaline alpha-galactosidase seed imbibition
  misc_feature (1)..(602): Homolog of NCBI NO: 23452226 NR Description: alkaline alpha-galactosidase seed imbibition
  misc_feature (629)..(693): Homolog of NCBI NO: 29838629 NR Description: alkaline alpha galactosidase I [Cucumis melo]
  misc_feature (1)..(606): Homolog of NCBI NO: 29838629 NR Description: alkaline alpha galactosidase I [Cucumis melo]
  misc_feature (634)..(695): Homolog of NCBI NO: 282994 NR Description: Sip1 protein - barley
  misc_feature (1)..(611): Homolog of NCBI NO: 282994 NR Description: Sip1 protein - barley

SEQ ID NO: 47483 - DNA, 663 bp, Arabidopsis thaliana
  misc_feature (1)..(663): Ceres Seq. ID no. 13592479
  misc_feature: MA Experiment ID: 20000306 Result: Up-regulated in Transcription
  misc_feature: MA Experiment 20000306 PARAMETER Experiment Name: At_Germinating_Seeds_Sub_P Parameter: Age (hr) Value: 6 vs. 0
  misc_feature: MA Experiment 20000306 PARAMETER Experiment Name: At_Germinating_Seeds_Sub_P Parameter: Organism Value: A. thaliana
  misc_feature: MA Experiment 20000306 PARAMETER Experiment Name: At_Germinating_Seeds_Sub_P Parameter: Plant Line Value: WS
  misc_feature: MA Experiment 20000306 PARAMETER Experiment Name: At_Germinating_Seeds_Sub_P Parameter: Tissue Value: Germinating Seeds
  misc_feature: MA Experiment ID: 20000307 Result: Up-regulated in Transcription
  misc_feature: MA Experiment 20000307 PARAMETER Experiment Name: At_Germinating_Seeds_Sub_P Parameter: Age (hr) Value: 24 vs. 0
  misc_feature: MA Experiment 20000307 PARAMETER Experiment Name: At_Germinating_Seeds_Sub_P Parameter: Organism Value: A. thaliana
  misc_feature: MA Experiment 20000307 PARAMETER Experiment Name: At_Germinating_Seeds_Sub_P Parameter: Plant Line Value: WS
  misc_feature: MA Experiment 20000307 PARAMETER Experiment Name: At_Germinating_Seeds_Sub_P Parameter: Tissue Value: Germinating Seeds
atttcaatcacaaaatcgtctttgtgctgctgattggaagcttctctctctctcggtttagatccctttcaattctccaaaggatcaacagttaaaagggaaatggggctttcatttgcaaagctttttagccggctttttgccaagaaggagatgcgaatccttatggttggtcttgatgctgctggtaagaccaccattttgtacaagctcaagcttggtgagattgtcaccaccattcccaccatcgggtttaatgtggagacggttgagtacaagaacatcagcttcacggtttgggatgtcgggggtcaggacaagatccgtcccttgtggagacactacttccaaaacactcaaggtctgatatttgttgttgatagcaatgacagagaccgtgttgttgaagccagagatgaacttcacaggatgttgaatgaagatgagcttcgggatgcagtattgcttgtgtttgccaacaagcaggatcttccaaacgctatgaatgctgctgagattactgataagcttggccttcactcactccggcaacgccactggtacatccaaagcacatgcgcaactagcggtgaagggctctatgaaggtctggattggctttccaacaacattgctagcaaagtaagacttctgaattcatga

SEQ ID NO: 47484 - protein, 186 aa, Arabidopsis thaliana
  peptide (1)..(186): Ceres Seq. ID no. 13592480
  misc_feature (4)..(177): Pfam Name: ADP-ribosylation factor family Pfam Description: ADP-ribosylation factor family
  misc_feature (1)..(180): Homolog of NCBI NO: 39653273 NR Description: ADP-ribosylation factor [Medicago sativa]
  misc_feature (1)..(180): Homolog of NCBI NO: 25294169 NR Description: ADP-ribosylation factor [imported] - pepper
  misc_feature (1)..(180): Homolog of NCBI NO: 34909214 NR Description: putative ADP-ribosylation factor
  misc_feature (1)..(180): Homolog of NCBI NO: 15226521 NR Description: ADP-ribosylation factor 1 (ARF1) [Arabidopsis
  misc_feature (1)..(180): Homolog of NCBI NO: 15223164 NR Description: ADP-ribosylation factor 1 (ARF1), putative
  misc_feature (1)..(180): Homolog of NCBI NO: 17154685 NR Description: ADP-ribosylation factor [Gossypium hirsutum]
  misc_feature (1)..(180): Homolog of NCBI NO: 30681825 NR Description: ADP-ribosylation factor, putative [Arabidopsis
  misc_feature (1)..(181): Homolog of NCBI NO: 25294174 NR Description: F5O8.5 protein - Arabidopsis thaliana
  misc_feature (1)..(185): Homolog of NCBI NO: 15241463 NR Description: ADP-ribosylation factor ARF1, putative
  misc_feature (1)..(186): Homolog of NCBI NO: 6573751 NR Description: F20B24.7 [Arabidopsis thaliana]
MGLSFAKLFSRLFAKKEMRILMVGLDAAGKTTILYKLKLGEIVTTIPTIGFNVETVEYKNISFTVWDVGGQDKIRPLWRHYFQNTQGLIFVVDSNDRDRVVEARDELHRMLNEDELRDAVLLVFANKQDLPNAMNAAEITDKLGLHSLRQRHWYIQSTCATSGEGLYEGLDWLSNNIASKVRLLNS

SEQ ID NO: 47485 - protein, 169 aa, Arabidopsis thaliana
  peptide (1)..(169): Ceres Seq. ID no. 13592481
  misc_feature (1)..(160): Pfam Name: ADP-ribosylation factor family Pfam Description: ADP-ribosylation factor family
  misc_feature (1)..(163): Homolog of NCBI NO: 39653273 NR Description: ADP-ribosylation factor [Medicago sativa]
  misc_feature (1)..(163): Homolog of NCBI NO: 25294169 NR Description: ADP-ribosylation factor [imported] - pepper
  misc_feature (1)..(163): Homolog of NCBI NO: 34909214 NR Description: putative ADP-ribosylation factor
  misc_feature (1)..(163): Homolog of NCBI NO: 15226521 NR Description: ADP-ribosylation factor 1 (ARF1) [Arabidopsis
  misc_feature (1)..(163): Homolog of NCBI NO: 15223164 NR Description: ADP-ribosylation factor 1 (ARF1), putative
  misc_feature (1)..(163): Homolog of NCBI NO: 17154685 NR Description: ADP-ribosylation factor [Gossypium hirsutum]
  misc_feature (1)..(163): Homolog of NCBI NO: 30681825 NR Description: ADP-ribosylation factor, putative [Arabidopsis
  misc_feature (1)..(164): Homolog of NCBI NO: 25294174 NR Description: F5O8.5 protein - Arabidopsis thaliana
  misc_feature (1)..(168): Homolog of NCBI NO: 15241463 NR Description: ADP-ribosylation factor ARF1, putative
  misc_feature (1)..(169): Homolog of NCBI NO: 6573751 NR Description: F20B24.7 [Arabidopsis thaliana]
MRILMVGLDAAGKTTILYKLKLGEIVTTIPTIGFNVETVEYKNISFTVWDVGGQDKIRPLWRHYFQNTQGLIFVVDSNDRDRVVEARDELHRMLNEDELRDAVLLVFANKQDLPNAMNAAEITDKLGLHSLRQRHWYIQSTCATSGEGLYEGLDWLSNNIASKVRLLNS

SEQ ID NO: 47486 - protein, 165 aa, Arabidopsis thaliana
  peptide (1)..(165): Ceres Seq. ID no. 13592482
  misc_feature (1)..(156): Pfam Name: ADP-ribosylation factor family Pfam Description: ADP-ribosylation factor family
  misc_feature (1)..(159): Homolog of NCBI NO: 39653273 NR Description: ADP-ribosylation factor [Medicago sativa]
  misc_feature (1)..(159): Homolog of NCBI NO: 25294169 NR Description: ADP-ribosylation factor [imported] - pepper
  misc_feature (1)..(159): Homolog of NCBI NO: 34909214 NR Description: putative ADP-ribosylation factor
  misc_feature (1)..(159): Homolog of NCBI NO: 15226521 NR Description: ADP-ribosylation factor 1 (ARF1) [Arabidopsis
  misc_feature (1)..(159): Homolog of NCBI NO: 15223164 NR Description: ADP-ribosylation factor 1 (ARF1), putative
  misc_feature (1)..(159): Homolog of NCBI NO: 17154685 NR Description: ADP-ribosylation factor [Gossypium hirsutum]
  misc_feature (1)..(159): Homolog of NCBI NO: 30681825 NR Description: ADP-ribosylation factor, putative [Arabidopsis
  misc_feature (1)..(160): Homolog of NCBI NO: 25294174 NR Description: F5O8.5 protein - Arabidopsis thaliana
  misc_feature (1)..(164): Homolog of NCBI NO: 15241463 NR Description: ADP-ribosylation factor ARF1, putative
  misc_feature (1)..(165): Homolog of NCBI NO: 6573751 NR Description: F20B24.7 [Arabidopsis thaliana]
MVGLDAAGKTTILYKLKLGEIVTTIPTIGFNVETVEYKNISFTVWDVGGQDKIRPLWRHYFQNTQGLIFVVDSNDRDRVVEARDELHRMLNEDELRDAVLLVFANKQDLPNAMNAAEITDKLGLHSLRQRHWYIQSTCATSGEGLYEGLDWLSNNIASKVRLLNS

SEQ ID NO: 47487 - DNA, 1499 bp, Arabidopsis thaliana; identical to SEQ ID NO: 37087
  misc_feature (1)..(1499): Ceres Seq. ID no. 13593683
  misc_feature: MA Experiment ID: 20000182 Result: Down-regulated in Transcription
  misc_feature: MA Experiment 20000182 PARAMETER Experiment Name: At_2mM_SA_P Parameter: Age (day) Value: 14
  misc_feature: MA Experiment 20000182 PARAMETER Experiment Name: At_2mM_SA_P Parameter: Organism Value: A. thaliana
  misc_feature: MA Experiment 20000182 PARAMETER Experiment Name: At_2mM_SA_P Parameter: Plant Line Value: WS
  misc_feature: MA Experiment 20000182 PARAMETER Experiment Name: At_2mM_SA_P Parameter: Timepoint (hr) Value: 6
  misc_feature: MA Experiment 20000182 PARAMETER Experiment Name: At_2mM_SA_P Parameter: Tissue Value: Aerial
  misc_feature: MA Experiment 20000182 PARAMETER Experiment Name: At_2mM_SA_P Parameter: Treatment Value: 2mM SA vs. No Treatment
  misc_feature: MA Experiment ID: 20000185 Result: Down-regulated in Transcription
  misc_feature: MA Experiment 20000185 PARAMETER Experiment Name: At_Roots__P Parameter: Age (day) Value: 7 vs. 21
  misc_feature: MA Experiment 20000185 PARAMETER Experiment Name: At_Roots__P Parameter: Organism Value: A. thaliana
  misc_feature: MA Experiment 20000185 PARAMETER Experiment Name: At_Roots__P Parameter: Tissue Value: Roots vs. Whole Plant
  misc_feature: MA Experiment ID: 20000227 Result: Down-regulated in Transcription
  misc_feature: MA Experiment 20000227 PARAMETER Experiment Name: At_Root-Tips-vs-Tops_P Parameter: Tissue Value: Root Tips vs. Root Tops
  misc_feature: MA Experiment ID: 20000234 Result: Down-regulated in Transcription
  misc_feature: MA Experiment 20000234 PARAMETER Experiment Name: At_Siliques_P Parameter: Age (day) Value: 21
  misc_feature: MA Experiment 20000234 PARAMETER Experiment Name: At_Siliques_P Parameter: Organism Value: A. thaliana
  misc_feature: MA Experiment 20000234 PARAMETER Experiment Name: At_Siliques_P Parameter: Plant Line Value: WS
  misc_feature: MA Experiment 20000234 PARAMETER Experiment Name: At_Siliques_P Parameter: Tissue Value: Less Than 5mm Siliques vs. Whole Plant
  misc_feature: MA Experiment ID: 20000264 Result: Down-regulated in Transcription
  misc_feature: MA Experiment 20000264 PARAMETER Experiment Name: At_Open_Flower_P Parameter: Age (day) Value: 21
  misc_feature: MA Experiment 20000264 PARAMETER Experiment Name: At_Open_Flower_P Parameter: Plant Line Value: WS
  misc_feature: MA Experiment 20000264 PARAMETER Experiment Name: At_Open_Flower_P Parameter: Tissue Value: Open Flower vs. Whole Plant
  misc_feature: MA Experiment ID: 20000265 Result: Down-regulated in Transcription
  misc_feature: MA Experiment 20000265 PARAMETER Experiment Name: At_Open_Flower_P Parameter: Age (day) Value: 21
  misc_feature: MA Experiment 20000265 PARAMETER Experiment Name: At_Open_Flower_P Parameter: Plant Line Value: WS
  misc_feature: MA Experiment 20000265 PARAMETER Experiment Name: At_Open_Flower_P Parameter: Tissue Value: Closed Flower vs. Whole Plant
  misc_feature: MA Experiment ID: 20000286 Result: Down-regulated in Transcription
  misc_feature: MA Experiment 20000286 PARAMETER Experiment Name: At_Open_Flower_P Parameter: Age (day) Value: 21
  misc_feature: MA Experiment 20000286 PARAMETER Experiment Name: At_Open_Flower_P Parameter: Plant Line Value: WS
  misc_feature: MA Experiment 20000286 PARAMETER Experiment Name: At_Open_Flower_P Parameter: Tissue Value: Half Open vs. Whole Plant
  misc_feature: MA Experiment ID: 20000438 Result: Down-regulated in Transcription
  misc_feature: MA Experiment 20000438 PARAMETER Experiment Name: At_Shoots__P Parameter: Age (day) Value: 14
  misc_feature: MA Experiment 20000438 PARAMETER Experiment Name: At_Shoots__P Parameter: Tissue Value: Shoots vs. Whole Plant
  misc_feature: MA Experiment ID: 20000439 Result: Down-regulated in Transcription
  misc_feature: MA Experiment 20000439 PARAMETER Experiment Name: At_Roots__P Parameter: Age (day) Value: 14 vs. 21
  misc_feature: MA Experiment 20000439 PARAMETER Experiment Name: At_Roots__P Parameter: Organism Value: A. thaliana
  misc_feature: MA Experiment 20000439 PARAMETER Experiment Name: At_Roots__P Parameter: Tissue Value: Roots vs. Whole Plant
  misc_feature: MA Experiment ID: 20000794 Result: Down-regulated in Transcription
  misc_feature: MA Experiment 20000794 PARAMETER Experiment Name: At_Petals_P Parameter: Age (day) Value: 23-25 days
  misc_feature: MA Experiment 20000794 PARAMETER Experiment Name: At_Petals_P Parameter: Plant Line Value: WS
  misc_feature: MA Experiment 20000794 PARAMETER Experiment Name: At_Petals_P Parameter: Tissue Value: Petals vs. Whole plant
  misc_feature: MA Experiment ID: 20001248 Result: Up-regulated in Transcription
  misc_feature: MA Experiment 20001248 PARAMETER Experiment Name: At_Far-red-induction_P Parameter: Age (day) Value: 7
  misc_feature: MA Experiment 20001248 PARAMETER Experiment Name: At_Far-red-induction_P Parameter: Light Value: Far-red vs. White
  misc_feature: MA Experiment 20001248 PARAMETER Experiment Name: At_Far-red-induction_P Parameter: Organism Value: A. thaliana
  misc_feature: MA Experiment 20001248 PARAMETER Experiment Name: At_Far-red-induction_P Parameter: Plant Line Value: Columbia
  misc_feature: MA Experiment 20001248 PARAMETER Experiment Name: At_Far-red-induction_P Parameter: Timepoint (hr) Value: 4
  misc_feature: MA Experiment 20001248 PARAMETER Experiment Name: At_Far-red-induction_P Parameter: Tissue Value: Whole Plant
  misc_feature: MA Experiment ID: 20001904 Result: Down-regulated in Transcription
  misc_feature: MA Experiment 20001904 PARAMETER Experiment Name: At_Drought_Reproduction_P Parameter: Age (day) Value: 37
  misc_feature: MA Experiment 20001904 PARAMETER Experiment Name: At_Drought_Reproduction_P Parameter: Organism Value: A. thaliana
  misc_feature: MA Experiment 20001904 PARAMETER Experiment Name: At_Drought_Reproduction_P Parameter: Plant Line Value: WS
  misc_feature: MA Experiment 20001904 PARAMETER Experiment Name: At_Drought_Reproduction_P Parameter: Timepoint (day) Value: 7
  misc_feature: MA Experiment 20001904 PARAMETER Experiment Name: At_Drought_Reproduction_P Parameter: Tissue Value: Rosettes
  misc_feature: MA Experiment 20001904 PARAMETER Experiment Name: At_Drought_Reproduction_P Parameter: Treatment Value: Drought vs. No Drought

SEQ ID NO: 47488 - protein, 435 aa, Arabidopsis thaliana; identical to SEQ ID NO: 37088
  peptide (1)..(435): Ceres Seq. ID no. 13593684
  misc_feature (19)..(425): Pfam Name: Amidase Pfam Description: Amidase
  misc_feature (19)..(425): Pfam Name: Amidase Pfam Description: Amidase
  misc_feature (11)..(200): Homolog of NCBI NO: 23499864 NR Description: conserved hypothetical protein [Brucella suis
  misc_feature (16)..(351): Homolog of NCBI NO: 38344119 NR Description: OSJNBb0050O03.16 [Oryza sativa (japonica
  misc_feature (16)..(435): Homolog of NCBI NO: 13937285 NR Description: chloroplast protein-translocon-like protein
  misc_feature (5)..(425): Homolog of NCBI NO: 30682691 NR Description: subunit of TOC complex -related [Arabidopsis
  misc_feature (5)..(425): Homolog of NCBI NO: 9955529 NR Description: putative subunit of TOC complex [Arabidopsis
  misc_feature (11)..(200): Homolog of NCBI NO: 23499864 NR Description: conserved hypothetical protein [Brucella suis
  misc_feature (16)..(435): Homolog of NCBI NO: 13937285 NR Description: chloroplast protein-translocon-like protein
  misc_feature (5)..(425): Homolog of NCBI NO: 9955529 NR Description: putative subunit of TOC complex [Arabidopsis
  misc_feature (11)..(435): Homolog of NCBI NO: 18390964 NR Description: amidase [Arabidopsis thaliana]
  misc_feature (11)..(234): Homolog of NCBI NO: 25402505 NR Description: hypothetical protein [imported] - Arabidopsis
  misc_feature (260)..(303): Homolog of NCBI NO: 25402505 NR Description: hypothetical protein [imported] - Arabidopsis
  misc_feature (1)..(431): Homolog of NCBI NO: 7453538 NR Description: Toc64 [Pisum sativum]
  misc_feature (1)..(431): Homolog of NCBI NO: 30684733 NR Description: chloroplast outer membrane translocon subunit,
  misc_feature (5)..(425): Homolog of NCBI NO: 30682691 NR Description: subunit of TOC complex -related [Arabidopsis
  misc_feature (16)..(351): Homolog of NCBI NO: 38344119 NR Description: OSJNBb0050O03.16 [Oryza sativa (japonica
  misc_feature (1)..(431): Homolog of NCBI NO: 30684733 NR Description: chloroplast outer membrane translocon subunit,
  misc_feature (1)..(431): Homolog of NCBI NO: 7453538 NR Description: Toc64 [Pisum sativum]
  misc_feature (260)..(303): Homolog of NCBI NO: 25402505 NR Description: hypothetical protein [imported] - Arabidopsis
  misc_feature (11)..(234): Homolog of NCBI NO: 25402505 NR Description: hypothetical protein [imported] - Arabidopsis
  misc_feature (11)..(435): Homolog of NCBI NO: 18390964 NR Description: amidase [Arabidopsis thaliana]

SEQ ID NO: 47489 - protein, 425 aa, Arabidopsis thaliana; identical to SEQ ID NO: 37089
  peptide (1)..(425): Ceres Seq. ID no. 13593685
  misc_feature (9)..(415): Pfam Name: Amidase Pfam Description: Amidase
  misc_feature (9)..(415): Pfam Name: Amidase Pfam Description: Amidase
  misc_feature (1)..(190): Homolog of NCBI NO: 23499864 NR Description: conserved hypothetical protein [Brucella suis
  misc_feature (6)..(341): Homolog of NCBI NO: 38344119 NR Description: OSJNBb0050O03.16 [Oryza sativa (japonica
  misc_feature (6)..(425): Homolog of NCBI NO: 13937285 NR Description: chloroplast protein-translocon-like protein
  misc_feature (1)..(415): Homolog of NCBI NO: 30682691 NR Description: subunit of TOC complex -related [Arabidopsis
  misc_feature (1)..(415): Homolog of NCBI NO: 9955529 NR Description: putative subunit of TOC complex [Arabidopsis
  misc_feature (1)..(190): Homolog of NCBI NO: 23499864 NR Description: conserved hypothetical protein [Brucella suis
  misc_feature (6)..(425): Homolog of NCBI NO: 13937285 NR Description: chloroplast protein-translocon-like protein
  misc_feature (1)..(415): Homolog of NCBI NO: 9955529 NR Description: putative subunit of TOC complex [Arabidopsis
  misc_feature (1)..(425): Homolog of NCBI NO: 18390964 NR Description: amidase [Arabidopsis thaliana]
  misc_feature (1)..(224): Homolog of NCBI NO: 25402505 NR Description: hypothetical protein [imported] - Arabidopsis
  misc_feature (250)..(293): Homolog of NCBI NO: 25402505 NR Description: hypothetical protein [imported] - Arabidopsis
  misc_feature (1)..(421): Homolog of NCBI NO: 7453538 NR Description: Toc64 [Pisum sativum]
  misc_feature (1)..(421): Homolog of NCBI NO: 30684733 NR Description: chloroplast outer membrane translocon subunit,
  misc_feature (1)..(415): Homolog of NCBI NO: 30682691 NR Description: subunit of TOC complex -related [Arabidopsis
  misc_feature (6)..(341): Homolog of NCBI NO: 38344119 NR Description: OSJNBb0050O03.16 [Oryza sativa (japonica
  misc_feature (1)..(421): Homolog of NCBI NO: 30684733 NR Description: chloroplast outer membrane translocon subunit,
  misc_feature (1)..(421): Homolog of NCBI NO: 7453538 NR Description: Toc64 [Pisum sativum]
  misc_feature (250)..(293): Homolog of NCBI NO: 25402505 NR Description: hypothetical protein [imported] - Arabidopsis
  misc_feature (1)..(224): Homolog of NCBI NO: 25402505 NR Description: hypothetical protein [imported] - Arabidopsis
  misc_feature (1)..(425): Homolog of NCBI NO: 18390964 NR Description: amidase [Arabidopsis thaliana]

SEQ ID NO: 47490 - protein, 343 aa, Arabidopsis thaliana; identical to SEQ ID NO: 37090
  peptide (1)..(343): Ceres Seq. ID no. 13593686
  misc_feature (1)..(333): Pfam Name: Amidase Pfam Description: Amidase
  misc_feature (1)..(333): Pfam Name: Amidase Pfam Description: Amidase
  misc_feature (1)..(108): Homolog of NCBI NO: 23499864 NR Description: conserved hypothetical protein [Brucella suis
  misc_feature (1)..(259): Homolog of NCBI NO: 38344119 NR Description: OSJNBb0050O03.16 [Oryza sativa (japonica
  misc_feature (1)..(343): Homolog of NCBI NO: 13937285 NR Description: chloroplast protein-translocon-like protein
  misc_feature (1)..(333): Homolog of NCBI NO: 30682691 NR Description: subunit of TOC complex -related [Arabidopsis
  misc_feature (1)..(333): Homolog of NCBI NO: 9955529 NR Description: putative subunit of TOC complex [Arabidopsis
  misc_feature (1)..(108): Homolog of NCBI NO: 23499864 NR Description: conserved hypothetical protein [Brucella suis
  misc_feature (1)..(343): Homolog of NCBI NO: 13937285 NR Description: chloroplast protein-translocon-like protein
  misc_feature (1)..(333): Homolog of NCBI NO: 9955529 NR Description: putative subunit of TOC complex [Arabidopsis
  misc_feature (1)..(343): Homolog of NCBI NO: 18390964 NR Description: amidase [Arabidopsis thaliana]
  misc_feature (1)..(142): Homolog of NCBI NO: 25402505 NR Description: hypothetical protein [imported] - Arabidopsis
  misc_feature (168)..(211): Homolog of NCBI NO: 25402505 NR Description: hypothetical protein [imported] - Arabidopsis
  misc_feature (1)..(339): Homolog of NCBI NO: 7453538 NR Description: Toc64 [Pisum sativum]
  misc_feature (1)..(339): Homolog of NCBI NO: 30684733 NR Description: chloroplast outer membrane translocon subunit,
  misc_feature (1)..(333): Homolog of NCBI NO: 30682691 NR Description: subunit of TOC complex -related [Arabidopsis
  misc_feature (1)..(259): Homolog of NCBI NO: 38344119 NR Description: OSJNBb0050O03.16 [Oryza sativa (japonica
  misc_feature (1)..(339): Homolog of NCBI NO: 30684733 NR Description: chloroplast outer membrane translocon subunit,
  misc_feature (1)..(339): Homolog of NCBI NO: 7453538 NR Description: Toc64 [Pisum sativum]
  misc_feature (168)..(211): Homolog of NCBI NO: 25402505 NR Description: hypothetical protein [imported] - Arabidopsis
  misc_feature (1)..(142): Homolog of NCBI NO: 25402505 NR Description: hypothetical protein [imported] - Arabidopsis
  misc_feature (1)..(343): Homolog of NCBI NO: 18390964 NR Description: amidase [Arabidopsis thaliana]

SEQ ID NO: 47491 - DNA, 1002 bp, Arabidopsis thaliana
  misc_feature (1)..(1002): Ceres Seq. ID no. 13592496
  misc_feature: MA Experiment ID: 20000180 Result: Up-regulated in Transcription
  misc_feature: MA Experiment 20000180 PARAMETER Experiment Name: At_Germinating_Seeds_P Parameter: Age (hr) Value: 24 vs. 0
  misc_feature: MA Experiment 20000180 PARAMETER Experiment Name: At_Germinating_Seeds_P Parameter: Tissue Value: Germinating Seeds
  misc_feature: MA Experiment ID: 20000182 Result: Down-regulated in Transcription
  misc_feature: MA Experiment 20000182 PARAMETER Experiment Name: At_2mM_SA_P Parameter: Age (day) Value: 14
  misc_feature: MA Experiment 20000182 PARAMETER Experiment Name: At_2mM_SA_P Parameter: Organism Value: A. thaliana
  misc_feature: MA Experiment 20000182 PARAMETER Experiment Name: At_2mM_SA_P Parameter: Plant Line Value: WS
  misc_feature: MA Experiment 20000182 PARAMETER Experiment Name: At_2mM_SA_P Parameter: Timepoint (hr) Value: 6
  misc_feature: MA Experiment 20000182 PARAMETER Experiment Name: At_2mM_SA_P Parameter: Tissue Value: Aerial
  misc_feature: MA Experiment 20000182 PARAMETER Experiment Name: At_2mM_SA_P Parameter: Treatment Value: 2mM SA vs. No Treatment
  misc_feature: MA Experiment ID: 20000437 Result: Down-regulated in Transcription
  misc_feature: MA Experiment 20000437 PARAMETER Experiment Name: At_Drought_P Parameter: Age (day) Value: 8
  misc_feature: MA Experiment 20000437 PARAMETER Experiment Name: At_Drought_P Parameter: Organism Value: A. thaliana
  misc_feature: MA Experiment 20000437 PARAMETER Experiment Name: At_Drought_P Parameter: Plant Line Value: WS
  misc_feature: MA Experiment 20000437 PARAMETER Experiment Name: At_Drought_P Parameter: Timepoint (hr) Value: 24
  misc_feature: MA Experiment 20000437 PARAMETER Experiment Name: At_Drought_P Parameter: Tissue Value: Whole Plant
  misc_feature: MA Experiment 20000437 PARAMETER Experiment Name: At_Drought_P Parameter: Treatment Value: Drought vs. No Drought
  misc_feature: MA Experiment ID: 20000439 Result: Down-regulated in Transcription
  misc_feature: MA Experiment 20000439 PARAMETER Experiment Name: At_Roots__P Parameter: Age (day) Value: 14 vs. 21
  misc_feature: MA Experiment 20000439 PARAMETER Experiment Name: At_Roots__P Parameter: Organism Value: A. thaliana
  misc_feature: MA Experiment 20000439 PARAMETER Experiment Name: At_Roots__P Parameter: Tissue Value: Roots vs. Whole Plant
  misc_feature: MA Experiment ID: 20000495 Result: Down-regulated in Transcription
  misc_feature: MA Experiment 20000495 PARAMETER Experiment Name: At_Guard_Cells_P Parameter: Harvest Date Value: 8/2/2002
  misc_feature: MA Experiment 20000495 PARAMETER Experiment Name: At_Guard_Cells_P Parameter: Organism Value: A. thaliana
  misc_feature: MA Experiment 20000495 PARAMETER Experiment Name: At_Guard_Cells_P Parameter: Tissue Value: Guard Cells vs. Leaves
  misc_feature: MA Experiment ID: 20001905 Result: Down-regulated in Transcription
  misc_feature: MA Experiment 20001905 PARAMETER Experiment Name: At_Drought_Reproduction_P Parameter: Age (day) Value: 40
  misc_feature: MA Experiment 20001905 PARAMETER Experiment Name: At_Drought_Reproduction_P Parameter: Organism Value: A. thaliana
  misc_feature: MA Experiment 20001905 PARAMETER Experiment Name: At_Drought_Reproduction_P Parameter: Plant Line Value: WS
  misc_feature: MA Experiment 20001905 PARAMETER Experiment Name: At_Drought_Reproduction_P Parameter: Timepoint (day) Value: 10
  misc_feature: MA Experiment 20001905 PARAMETER Experiment Name: At_Drought_Reproduction_P Parameter: Tissue Value: Rosettes
  misc_feature: MA Experiment 20001905 PARAMETER Experiment Name: At_Drought_Reproduction_P Parameter: Treatment Value: Drought vs. No Drought
  misc_feature: MA Experiment ID: 20001906 Result: Down-regulated in Transcription
  misc_feature: MA Experiment 20001906 PARAMETER Experiment Name: At_Drought_Reproduction_P Parameter: Age (day) Value: 35
  misc_feature: MA Experiment 20001906 PARAMETER Experiment Name: At_Drought_Reproduction_P Parameter: Organism Value: A. thaliana
  misc_feature: MA Experiment 20001906 PARAMETER Experiment Name: At_Drought_Reproduction_P Parameter: Plant Line Value: WS
  misc_feature: MA Experiment 20001906 PARAMETER Experiment Name: At_Drought_Reproduction_P Parameter: Timepoint (day) Value: 5
  misc_feature: MA Experiment 20001906 PARAMETER Experiment Name: At_Drought_Reproduction_P Parameter: Tissue Value: Siliques
  misc_feature: MA Experiment 20001906 PARAMETER Experiment Name: At_Drought_Reproduction_P Parameter: Treatment Value: Drought vs. No Drought
  misc_feature: MA Experiment ID: 20001911 Result: Down-regulated in Transcription
  misc_feature: MA Experiment 20001911 PARAMETER Experiment Name: At_Drought_Reproduction_P Parameter: Age (day) Value: 40
  misc_feature: MA Experiment 20001911 PARAMETER Experiment Name: At_Drought_Reproduction_P Parameter: Organism Value: A. thaliana
  misc_feature: MA Experiment 20001911 PARAMETER Experiment Name: At_Drought_Reproduction_P Parameter: Plant Line Value: WS
  misc_feature: MA Experiment 20001911 PARAMETER Experiment Name: At_Drought_Reproduction_P Parameter: Timepoint (day) Value: 10
  misc_feature: MA Experiment 20001911 PARAMETER Experiment Name: At_Drought_Reproduction_P Parameter: Tissue Value: Flowers
  misc_feature: MA Experiment 20001911 PARAMETER Experiment Name: At_Drought_Reproduction_P Parameter: Treatment Value: Drought vs. No Drought
gaaaatgcaatctttatctctgcaatcgcttccatggaaaccaaattcagtgactttacctgaaatttatcttttgaatcccaagcaattgactgcctcgagttctcagtatcgtagaactcgaaactggagaattagaagttcgtcggaagataatgtagcaatttcgagtgacggcggagatttgaagaattctctgtccggtattgtgggaaatcaagtggaggagctattgagcagagaagagaacaaaggtttgcttgatggtctggaaaaagcttcgttgagagtggagattgcgaagagagagctcgaagatatagagagacaagaaattgaggcgaaattgctacaggattatattaatcagctcgaatcaagagccgcagagattgcagaatgccagcaggagattgacgcagcaagatcaatggttgaggaagcagaacgctccttgtcattagcagataactcgacaattggaagttcggagaaaggttattcgattgataaagacaaggagaggttagaatctgcaaaagcggcagtgatcgcagctgcggttgggaccattgcggaactcccatttgctctttctcaagtcgcaagcatggagcagcttgttctgcccctgggaatagcgtttgcaagctgtgcattgtttggagtcacattcaggtatgcagtcagaagagacttggatgataatcatctcaaatccggagccgttgcagcttttgggtttgttaaaggacttggtatgttgagcagaggaccgccattggagctgagctgggaaagcttgttttcacatgggatagacggcgccgttttggtgtctcagagcgtcttgatatttgcgtttgcgtccataggtttggacttctgtttcaagatgaagctcttaagaccatttcctagctctgactagattgaagagcaaattaaaaatgtagaaatgaacaaaatcttcttttgaagactttatttgtttttttttat

SEQ ID NO: 47492 - protein, 309 aa, Arabidopsis thaliana
  peptide (1)..(309): Ceres Seq. ID no. 13592497
  misc_feature (213)..(307): Homolog of NCBI NO: 23130310 NR Description: hypothetical protein [Nostoc punctiforme]
  misc_feature (2)..(309): Homolog of NCBI NO: 7487177 NR Description: hypothetical protein T19F6.80 - Arabidopsis
  misc_feature (2)..(309): Homolog of NCBI NO: 28393641 NR Description: unknown protein [Arabidopsis thaliana]
  misc_feature (2)..(309): Homolog of NCBI NO: 30686406 NR Description: expressed protein [Arabidopsis thaliana]
KMQSLSLQSLPWKPNSVTLPEIYLLNPKQLTASSSQYRRTRNWRIRSSSEDNVAISSDGGDLKNSLSGIVGNQVEELLSREENKGLLDGLEKASLRVEIAKRELEDIERQEIEAKLLQDYINQLESRAAEIAECQQEIDAARSMVEEAERSLSLADNSTIGSSEKGYSIDKDKERLESAKAAVIAAAVGTIAELPFALSQVASMEQLVLPLGIAFASCALFGVTFRYAVRRDLDDNHLKSGAVAAFGFVKGLGMLSRGPPLELSWESLFSHGIDGAVLVSQSVLIFAFASIGLDFCFKMKLLRPFPSSD

SEQ ID NO: 47493 - protein, 308 aa, Arabidopsis thaliana
  peptide (1)..(308): Ceres Seq. ID no. 13592498
  misc_feature (212)..(306): Homolog of NCBI NO: 23130310 NR Description: hypothetical protein [Nostoc punctiforme]
  misc_feature (1)..(308): Homolog of NCBI NO: 7487177 NR Description: hypothetical protein T19F6.80 - Arabidopsis
  misc_feature (1)..(308): Homolog of NCBI NO: 28393641 NR Description: unknown protein [Arabidopsis thaliana]
  misc_feature (1)..(308): Homolog of NCBI NO: 30686406 NR Description: expressed protein [Arabidopsis thaliana]
MQSLSLQSLPWKPNSVTLPEIYLLNPKQLTASSSQYRRTRNWRIRSSSEDNVAISSDGGDLKNSLSGIVGNQVEELLSREENKGLLDGLEKASLRVEIAKRELEDIERQEIEAKLLQDYINQLESRAAEIAECQQEIDAARSMVEEAERSLSLADNSTIGSSEKGYSIDKDKERLESAKAAVIAAAVGTIAELPFALSQVASMEQLVLPLGIAFASCALFGVTFRYAVRRDLDDNHLKSGAVAAFGFVKGLGMLSRGPPLELSWESLFSHGIDGAVLVSQSVLIFAFASIGLDFCFKMKLLRPFPSSD

SEQ ID NO: 47494 - protein, 166 aa, Arabidopsis thaliana
  peptide (1)..(166): Ceres Seq. ID no. 13592499
  misc_feature (70)..(164): Homolog of NCBI NO: 23130310 NR Description: hypothetical protein [Nostoc punctiforme]
  misc_feature (1)..(166): Homolog of NCBI NO: 7487177 NR Description: hypothetical protein T19F6.80 - Arabidopsis
  misc_feature (1)..(166): Homolog of NCBI NO: 28393641 NR Description: unknown protein [Arabidopsis thaliana]
  misc_feature (1)..(166): Homolog of NCBI NO: 30686406 NR Description: expressed protein [Arabidopsis thaliana]
MVEEAERSLSLADNSTIGSSEKGYSIDKDKERLESAKAAVIAAAVGTIAELPFALSQVASMEQLVLPLGIAFASCALFGVTFRYAVRRDLDDNHLKSGAVAAFGFVKGLGMLSRGPPLELSWESLFSHGIDGAVLVSQSVLIFAFASIGLDFCFKMKLLRPFPSSD

SEQ ID NO: 47495 - DNA, 2322 bp, Arabidopsis thaliana
  misc_feature (1)..(2322): Ceres Seq. ID no. 12602034
  misc_feature: MA Experiment ID: 20000327 Result: Up-regulated in Transcription
  misc_feature: MA Experiment 20000327 PARAMETER Experiment Name: At_42deg_Heat_Sub_P Parameter: Age (day) Value: 14
  misc_feature: MA Experiment 20000327 PARAMETER Experiment Name: At_42deg_Heat_Sub_P Parameter: Organism Value: A. thaliana
  misc_feature: MA Experiment 20000327 PARAMETER Experiment Name: At_42deg_Heat_Sub_P Parameter: Plant Line Value: WS
  misc_feature: MA Experiment 20000327 PARAMETER Experiment Name: At_42deg_Heat_Sub_P Parameter: Temperature (deg C) Value: 42 vs. 22
  misc_feature: MA Experiment 20000327 PARAMETER Experiment Name: At_42deg_Heat_Sub_P Parameter: Timepoint (hr) Value: 1
  misc_feature: MA Experiment 20000327 PARAMETER Experiment Name: At_42deg_Heat_Sub_P Parameter: Tissue Value: Aerial
  misc_feature: MA Experiment ID: 20000355 Result: Down-regulated in Transcription
  misc_feature: MA Experiment 20000355 PARAMETER Experiment Name: At_Siliques_Sub_P Parameter: Age (day) Value: 21
  misc_feature: MA Experiment 20000355 PARAMETER Experiment Name: At_Siliques_Sub_P Parameter: Organism Value: A. thaliana
  misc_feature: MA Experiment 20000355 PARAMETER Experiment Name: At_Siliques_Sub_P Parameter: Plant Line Value: WS
  misc_feature: MA Experiment 20000355 PARAMETER Experiment Name: At_Siliques_Sub_P Parameter: Tissue Value: Less Than 5mm Siliques vs. Whole Plant
atgaagaagtcgtcggataagtcaccggtgcggcaacatgacacggcgacgcaaatcaactctgacgcagtgtcttcttctacttccttcactgattccgactctacttgttcctttttgactccctccatggagttcccggatcgaatcagtttccggagaatcgattttagtgaagcagctcctactggtgtcgttcttccttctacttccagtgagttaactcgttccaattccagtgagaataagattcccaatgaagatatttccgtttcaacttcttctcgctatttggtgtttgataaaattctagctcttatgaagaaatcaccaggacgaagaggagataagactagtccggcgcggcggttagaccgtagtgatgcggtgaggaggaatatcgattatgacgcaggtgaagattcttcttcgttgttgataactcgttctttggatttcccgaatcgtactagttttcgagtcgatggagttgatgatggagaaatagatcggatttatcagtatattggtgtttctggtcctgaagattttgctatttcttctgatgcttggaaagctcgtatggagcatgagcgttcttcttcagatgttgttaataagttaaagtctcttgatcttgatagtcgtgaagcaggtcctagtggtggtgttgttgcttctagttcaatgaatcataagtttcagggtcatgatttgagtgaagcaggttctattggtgttgttgttgcttctaattttacgctttctgagtcgaataagattgagaacttaaatagtttgagggataaggaaattgttgatggtgatatggtagagaataggtgcggtattgagcgaaaaccgactattttggtgaagtcgagagggtatcttgttcacaatgatgatgtgggtgttggtggtggaattaagggtgtaagaccaccagtactaaacgttcctcgtgcggataaggaagttgttgatggtggtacggtggagagcaagagtggtattgaatggaaaccaactattttggtgaagtcaaaagggtatcttgtttccaatgatggtggaataaagggggtaacatcaccggtactaaatcttcgcccgacagataaggaagttgttgatagtggtacggtagagaatagacgtggtattaagggcgtaagaccatcggtacttaagcctcctccggtgatgaaactacctccagttgatcttccgggatcatcttgggatatccttactcattttgctcctgatagtgaaatagttaggcggccgagttcctcttcttcttccgaaaatggttgtgatgaagaagaagccgaggatgacaaagtggaaaaggaagagacgggagatatgtttatccagttggaggatacgactgatgaggcatgctcattcactacaaacgagggtgactcctcaagtacagtatccaatacctcaccgatttgtgtctctgggggatctatcaatacttcttggcaaaagggtcaacttctgcgacaaggatcgtttggctctgtgtatgaagccatttcagaagatggggacttctttgctgtcaaggaagtttcacttcttgatcagggaagtcaggcacaagaatgcatacaacaacttgagggggaaattgcactacttagtcagcttgagcatcagaatattctgcgatatcgtggcacagacaaggacgggtcaaatttgtatatttttcttgagcttgtaacacaaggatcccttctagaactctaccgaagataccagattcgggactcgctaatctccttgtacacaaaacaaatccttgacggtttgaaatatcttcaccataaaggtttcattcacagggacattaaatgtgcaactatattggtggacgccaatggcaccgtcaaacttgcagattttggattggcaaaggtgtcaaagttaaacgacattaagtcccgcaaggaaactctattttggatggctccagaggttattaaccggaaggataatgatggttacagaagtccagctgatatatggagcctcgggtgcactgtgctggaaatgtgtactggtcagatcccatactctgatctagaacccgttgaagccctgtttaggatcagaaggggtacgcttccggaagtacctgatactttatcactagacgctcggcatttcatacttaagtgtctcaaattgaacccggaagagcgtccaactgcaactgagctactgaaccatccatttgtgagaaggcccttaccatcctcaggctcaggatcaacatctccgctaatccgtagatga

SEQ ID NO: 47496 - protein, 773 aa, Arabidopsis thaliana
  peptide (1)..(773): Ceres Seq. ID no. 12602035
  misc_feature (501)..(755): Pfam Name: Protein kinase domain Pfam Description: Protein kinase domain
  misc_feature (389)..(772): Homolog of NCBI NO: 29839687 NR Description: Probable WRKY transcription factor 19 (WRKY
  misc_feature (330)..(773): Homolog of NCBI NO: 3688209 NR Description: MAP3K beta 1 protein kinase [Brassica napus]
  misc_feature (199)..(325): Homolog of NCBI NO: 871812 NR Description: ARA.KIN gene product
  misc_feature (388)..(773): Homolog of NCBI NO: 871812 NR Description: ARA.KIN gene product
  misc_feature (101)..(325): Homolog of NCBI NO: 1255448 NR Description: mitogen-activated protein kinase [Arabidopsis
  misc_feature (388)..(773): Homolog of NCBI NO: 1255448 NR Description: mitogen-activated protein kinase [Arabidopsis
  misc_feature (101)..(325): Homolog of NCBI NO: 17064766 NR Description: Unknown protein [Arabidopsis thaliana]
  misc_feature (388)..(773): Homolog of NCBI NO: 17064766 NR Description: Unknown protein [Arabidopsis thaliana]
  misc_feature (101)..(325): Homolog of NCBI NO: 15236515 NR Description: MEKK1/MAP kinase kinase kinase
  misc_feature (388)..(773): Homolog of NCBI NO: 15236515 NR Description: MEKK1/MAP kinase kinase kinase
MKKSSDKSPVRQHDTATQINSDAVSSSTSFTDSDSTCSFLTPSMEFPDRISFRRIDFSEAAPTGVVLPSTSSELTRSNSSENKIPNEDISVSTSSRYLVFDKILALMKKSPGRRGDKTSPARRLDRSDAVRRNIDYDAGEDSSSLLITRSLDFPNRTSFRVDGVDDGEIDRIYQYIGVSGPEDFAISSDAWKARMEHERSSSDVVNKLKSLDLDSREAGPSGGVVASSSMNHKFQGHDLSEAGSIGVVVASNFTLSESNKIENLNSLRDKEIVDGDMVENRCGIERKPTILVKSRGYLVHNDDVGVGGGIKGVRPPVLNVPRADKEVVDGGTVESKSGIEWKPTILVKSKGYLVSNDGGIKGVTSPVLNLRPTDKEVVDSGTVENRRGIKGVRPSVLKPPPVMKLPPVDLPGSSWDILTHFAPDSEIVRRPSSSSSSENGCDEEEAEDDKVEKEETGDMFIQLEDTTDEACSFTTNEGDSSSTVSNTSPICVSGGSINTSWQKGQLLRQGSFGSVYEAISEDGDFFAVKEVSLLDQGSQAQECIQQLEGEIALLSQLEHQNILRYRGTDKDGSNLYIFLELVTQGSLLELYRRYQIRDSLISLYTKQILDGLKYLHHKGFIHRDIKCATILVDANGTVKLADFGLAKVSKLNDIKSRKETLFWMAPEVINRKDNDGYRSPADIWSLGCTVLEMCTGQIPYSDLEPVEALFRIRRGTLPEVPDTLSLDARHFILKCLKLNPEERPTATELLNHPFVRRPLPSSGSGSTSPLIRR

SEQ ID NO: 47497 - protein, 730 aa, Arabidopsis thaliana
  peptide (1)..(730): Ceres Seq. ID no. 12602036
  misc_feature (458)..(712): Pfam Name: Protein kinase domain Pfam Description: Protein kinase domain
  misc_feature (346)..(729): Homolog of NCBI NO: 29839687 NR Description: Probable WRKY transcription factor 19 (WRKY
  misc_feature (287)..(730): Homolog of NCBI NO: 3688209 NR Description: MAP3K beta 1 protein kinase [Brassica napus]
  misc_feature (156)..(282): Homolog of NCBI NO: 871812 NR Description: ARA.KIN gene product
  misc_feature (345)..(730): Homolog of NCBI NO: 871812 NR Description: ARA.KIN gene product
  misc_feature (58)..(282): Homolog of NCBI NO: 1255448 NR Description: mitogen-activated protein kinase [Arabidopsis
  misc_feature (345)..(730): Homolog of NCBI NO: 1255448 NR Description: mitogen-activated protein kinase [Arabidopsis
  misc_feature (58)..(282): Homolog of NCBI NO: 17064766 NR Description: Unknown protein [Arabidopsis thaliana]
  misc_feature (345)..(730): Homolog of NCBI NO: 17064766 NR Description: Unknown protein [Arabidopsis thaliana]
  misc_feature (58)..(282): Homolog of NCBI NO: 15236515 NR Description: MEKK1/MAP kinase kinase kinase
  misc_feature (345)..(730): Homolog of NCBI NO: 15236515 NR Description: MEKK1/MAP kinase kinase kinase
MEFPDRISFRRIDFSEAAPTGVVLPSTSSELTRSNSSENKIPNEDISVSTSSRYLVFDKILALMKKSPGRRGDKTSPARRLDRSDAVRRNIDYDAGEDSSSLLITRSLDFPNRTSFRVDGVDDGEIDRIYQYIGVSGPEDFAISSDAWKARMEHERSSSDVVNKLKSLDLDSREAGPSGGVVASSSMNHKFQGHDLSEAGSIGVVVASNFTLSESNKIENLNSLRDKEIVDGDMVENRCGIERKPTILVKSRGYLVHNDDVGVGGGIKGVRPPVLNVPRADKEVVDGGTVESKSGIEWKPTILVKSKGYLVSNDGGIKGVTSPVLNLRPTDKEVVDSGTVENRRGIKGVRPSVLKPPPVMKLPPVDLPGSSWDILTHFAPDSEIVRRPSSSSSSENGCDEEEAEDDKVEKEETGDMFIQLEDTTDEACSFTTNEGDSSSTVSNTSPICVSGGSINTSWQKGQLLRQGSFGSVYEAISEDGDFFAVKEVSLLDQGSQAQECIQQLEGEIALLSQLEHQNILRYRGTDKDGSNLYIFLELVTQGSLLELYRRYQIRDSLISLYTKQILDGLKYLHHKGFIHRDIKCATILVDANGTVKLADFGLAKVSKLNDIKSRKETLFWMAPEVINRKDNDGYRSPADIWSLGCTVLEMCTGQIPYSDLEPVEALFRIRRGTLPEVPDTLSLDARHFILKCLKLNPEERPTATELLNHPFVRRPLPSSGSGSTSPLIRR

SEQ ID NO: 47498 - protein, 667 aa, Arabidopsis thaliana
  peptide (1)..(667): Ceres Seq. ID no. 12602037
  misc_feature (395)..(649): Pfam Name: Protein kinase domain Pfam Description: Protein kinase domain
  misc_feature (283)..(666): Homolog of NCBI NO: 29839687 NR Description: Probable WRKY transcription factor 19 (WRKY
  misc_feature (224)..(667): Homolog of NCBI NO: 3688209 NR Description: MAP3K beta 1 protein kinase [Brassica napus]
  misc_feature (93)..(219): Homolog of NCBI NO: 871812 NR Description: ARA.KIN gene product
  misc_feature (282)..(667): Homolog of NCBI NO: 871812 NR Description: ARA.KIN gene product
  misc_feature (1)..(219): Homolog of NCBI NO: 1255448 NR Description: mitogen-activated protein kinase [Arabidopsis
  misc_feature (282)..(667): Homolog of NCBI NO: 1255448 NR Description: mitogen-activated protein kinase [Arabidopsis
  misc_feature (1)..(219): Homolog of NCBI NO: 17064766 NR Description: Unknown protein [Arabidopsis thaliana]
  misc_feature (282)..(667): Homolog of NCBI NO: 17064766 NR Description: Unknown protein [Arabidopsis thaliana]
  misc_feature (1)..(219): Homolog of NCBI NO: 15236515 NR Description: MEKK1/MAP kinase kinase kinase
  misc_feature (282)..(667): Homolog of NCBI NO: 15236515 NR Description: MEKK1/MAP kinase kinase kinase
MKKSPGRRGDKTSPARRLDRSDAVRRNIDYDAGEDSSSLLITRSLDFPNRTSFRVDGVDDGEIDRIYQYIGVSGPEDFAISSDAWKARMEHERSSSDVVNKLKSLDLDSREAGPSGGVVASSSMNHKFQGHDLSEAGSIGVVVASNFTLSESNKIENLNSLRDKEIVDGDMVENRCGIERKPTILVKSRGYLVHNDDVGVGGGIKGVRPPVLNVPRADKEVVDGGTVESKSGIEWKPTILVKSKGYLVSNDGGIKGVTSPVLNLRPTDKEVVDSGTVENRRGIKGVRPSVLKPPPVMKLPPVDLPGSSWDILTHFAPDSEIVRRPSSSSSSENGCDEEEAEDDKVEKEETGDMFIQLEDTTDEACSFTTNEGDSSSTVSNTSPICVSGGSINTSWQKGQLLRQGSFGSVYEAISEDGDFFAVKEVSLLDQGSQAQECIQQLEGEIALLSQLEHQNILRYRGTDKDGSNLYIFLELVTQGSLLELYRRYQIRDSLISLYTKQILDGLKYLHHKGFIHRDIKCATILVDANGTVKLADFGLAKVSKLNDIKSRKETLFWMAPEVINRKDNDGYRSPADIWSLGCTVLEMCTGQIPYSDLEPVEALFRIRRGTLPEVPDTLSLDARHFILKCLKLNPEERPTATELLNHPFVRRPLPSSGSGSTSPLIRR

SEQ ID NO: 47499 - DNA, 1118 bp, Arabidopsis thaliana
  misc_feature (1)..(1118): Ceres Seq. ID no. 13588331
  misc_feature: MA Experiment ID: 20001248 Result: Down-regulated in Transcription
  misc_feature: MA Experiment 20001248 PARAMETER Experiment Name: At_Far-red-induction_P Parameter: Age (day) Value: 7
  misc_feature: MA Experiment 20001248 PARAMETER Experiment Name: At_Far-red-induction_P Parameter: Light Value: Far-red vs. White
  misc_feature: MA Experiment 20001248 PARAMETER Experiment Name: At_Far-red-induction_P Parameter: Organism Value: A. thaliana
  misc_feature: MA Experiment 20001248 PARAMETER Experiment Name: At_Far-red-induction_P Parameter: Plant Line Value: Columbia
  misc_feature: MA Experiment 20001248 PARAMETER Experiment Name: At_Far-red-induction_P Parameter: Timepoint (hr) Value: 4
  misc_feature: MA Experiment 20001248 PARAMETER Experiment Name: At_Far-red-induction_P Parameter: Tissue Value: Whole Plant
  misc_feature: MA Experiment ID: 20001451 Result: Down-regulated in Transcription
  misc_feature: MA Experiment 20001451 PARAMETER Experiment Name: At_Far-red-induction_P Parameter: Age (day) Value: 7
  misc_feature: MA Experiment 20001451 PARAMETER Experiment Name: At_Far-red-induction_P Parameter: Light Value: Far-red vs. White
  misc_feature: MA Experiment 20001451 PARAMETER Experiment Name: At_Far-red-induction_P Parameter: Organism Value: A. thaliana
  misc_feature: MA Experiment 20001451 PARAMETER Experiment Name: At_Far-red-induction_P Parameter: Plant Line Value: Columbia
  misc_feature: MA Experiment 20001451 PARAMETER Experiment Name: At_Far-red-induction_P Parameter: Timepoint (hr) Value: 24
  misc_feature: MA Experiment 20001451 PARAMETER Experiment Name: At_Far-red-induction_P Parameter: Tissue Value: Whole Plant
  misc_feature: MA Experiment ID: 20001557 Result: Down-regulated in Transcription
  misc_feature: MA Experiment 20001557 PARAMETER Experiment Name: At_Drought_Soil_Dry_P Parameter: Age (day) Value: 27
  misc_feature: MA Experiment 20001557 PARAMETER Experiment Name: At_Drought_Soil_Dry_P Parameter: Organism Value: A. thaliana
  misc_feature: MA Experiment 20001557 PARAMETER Experiment Name: At_Drought_Soil_Dry_P Parameter: Plant Line Value: WS
  misc_feature: MA Experiment 20001557 PARAMETER Experiment Name: At_Drought_Soil_Dry_P Parameter: Post Timepoint (hr) Value: 3
  misc_feature: MA Experiment 20001557 PARAMETER Experiment Name: At_Drought_Soil_Dry_P Parameter: Post-Treatment Value: Re-Water vs. No Drought
  misc_feature: MA Experiment 20001557 PARAMETER Experiment Name: At_Drought_Soil_Dry_P Parameter: Timepoint (day) Value: 13
  misc_feature: MA Experiment 20001557 PARAMETER Experiment Name: At_Drought_Soil_Dry_P Parameter: Treatment Value: Drought vs. No Drought
  misc_feature: MA Experiment ID: 20001904 Result: Down-regulated in Transcription
  misc_feature: MA Experiment 20001904 PARAMETER Experiment Name: At_Drought_Reproduction_P Parameter: Age (day) Value: 37
  misc_feature: MA Experiment 20001904 PARAMETER Experiment Name: At_Drought_Reproduction_P Parameter: Organism Value: A. thaliana
  misc_feature: MA Experiment 20001904 PARAMETER Experiment Name: At_Drought_Reproduction_P Parameter: Plant Line Value: WS
  misc_feature: MA Experiment 20001904 PARAMETER Experiment Name: At_Drought_Reproduction_P Parameter: Timepoint (day) Value: 7
  misc_feature: MA Experiment 20001904 PARAMETER Experiment Name: At_Drought_Reproduction_P Parameter: Tissue Value: Rosettes
  misc_feature: MA Experiment 20001904 PARAMETER Experiment Name: At_Drought_Reproduction_P Parameter: Treatment Value: Drought vs. No Drought
  misc_feature: MA Experiment ID: 20001905 Result: Down-regulated in Transcription
  misc_feature: MA Experiment 20001905 PARAMETER Experiment Name: At_Drought_Reproduction_P Parameter: Age (day) Value: 40
  misc_feature: MA Experiment 20001905 PARAMETER Experiment Name: At_Drought_Reproduction_P Parameter: Organism Value: A. thaliana
  misc_feature: MA Experiment 20001905 PARAMETER Experiment Name: At_Drought_Reproduction_P Parameter: Plant Line Value: WS
  misc_feature: MA Experiment 20001905 PARAMETER Experiment Name: At_Drought_Reproduction_P Parameter: Timepoint (day) Value: 10
  misc_feature: MA Experiment 20001905 PARAMETER Experiment Name: At_Drought_Reproduction_P Parameter: Tissue Value: Rosettes
  misc_feature: MA Experiment 20001905 PARAMETER Experiment Name: At_Drought_Reproduction_P Parameter: Treatment Value: Drought vs. No Drought
  misc_feature: MA Experiment ID: 20001906 Result: Down-regulated in Transcription
  misc_feature: MA Experiment 20001906 PARAMETER Experiment Name: At_Drought_Reproduction_P Parameter: Age (day) Value: 35
  misc_feature: MA Experiment 20001906 PARAMETER Experiment Name: At_Drought_Reproduction_P Parameter: Organism Value: A. thaliana
  misc_feature: MA Experiment 20001906 PARAMETER Experiment Name: At_Drought_Reproduction_P Parameter: Plant Line Value: WS
  misc_feature: MA Experiment 20001906 PARAMETER Experiment Name: At_Drought_Reproduction_P Parameter: Timepoint (day) Value: 5
  misc_feature: MA Experiment 20001906 PARAMETER Experiment Name: At_Drought_Reproduction_P Parameter: Tissue Value: Siliques
  misc_feature: MA Experiment 20001906 PARAMETER Experiment Name: At_Drought_Reproduction_P Parameter: Treatment Value: Drought vs. No Drought
ggcagtcaaaggtccgtcaaaggcaattttcccggaaaattcttttgggagctgagaaagtgagagctgtgaggtatgagtgtgggactgaaagttagcgcgttcttacatccaacgcttgcgttatcctcgagagatgtctctctctcatcctcatcatcttctctctatcttgatcggaaaattctccgaccaggctccgggagacggtggtgtaaatcccgaagaaccgaaccaatattggctgttgtagagtcaagtcgagtaccggagcttgattcttcttcagaaccagttcaagtattcgatggatcaacaaggttgtacatatcttacacttgcccatttgctcagcgtgcgtggattgctcgcaactacaagggtctgcaaaacaagatagaacttgtaccgatcgatcttaaaaacaggcctgcttggtataaggagaaagtttactcggctaacaaggtgcctgcattagagcacaataaccgagtattgggagagagccttgatctgattaagtacattgacactaattttgaagggccttcgcttacacccgatggtttagagaagcaagttgtagctgatgagttactctcttacactgactccttctccaaggctgtaagatccacattaaacggcactgacactaatgcagcagatgttgcatttgattacatcgagcaggctctttccaaattcaatgaagggcctttctttcttggtcaatttagtttggttgatgttgcatatgctcctttcatagagagatttcggcttatcttaagtgatgtgatgaacgtcgatattacatctggtcggcctaaccttgccctttggattcaggagatgaacaaaatcgaagcttacaccgaaacccgtcaagatccacaagagcttgttgaaagatacaagagacgagtccaagcagaagcacgtctctaaccagatggttctccggatatctccatttacaagggtttagaaggatcaaatgggaagagatattgtaaccaaagttttttatatatataaattatattgtatcggtaaaagcatctacatgacatgcaacaattgttttcatttatatcagaattcatgagacc

SEQ ID NO: 47500 - protein, 292 aa, Arabidopsis thaliana
  peptide (1)..(292): Ceres Seq. ID no. 13588332
  misc_feature (65)..(286): Homolog of NCBI NO: 24796806 NR Description: putative glutathione S-transferase
  misc_feature (1)..(292): Homolog of NCBI NO: 15233164 NR Description: In2-1 protein, putative [Arabidopsis thaliana]
MSVGLKVSAFLHPTLALSSRDVSLSSSSSSLYLDRKILRPGSGRRWCKSRRTEPILAVVESSRVPELDSSSEPVQVFDGSTRLYISYTCPFAQRAWIARNYKGLQNKIELVPIDLKNRPAWYKEKVYSANKVPALEHNNRVLGESLDLIKYIDTNFEGPSLTPDGLEKQVVADELLSYTDSFSKAVRSTLNGTDTNAADVAFDYIEQALSKFNEGPFFLGQFSLVDVAYAPFIERFRLILSDVMNVDITSGRPNLALWIQEMNKIEAYTETRQDPQELVERYKRRVQAEARL

SEQ ID NO: 47501 - DNA, 2543 bp, Arabidopsis thaliana
  misc_feature (1)..(2543): Ceres Seq. ID no. 12601296
  misc_feature: MA Experiment ID: 20000227 Result: Up-regulated in Transcription
  misc_feature: MA Experiment 20000227 PARAMETER Experiment Name: At_Root-Tips-vs-Tops_P Parameter: Tissue Value: Root Tips vs. Root Tops
  misc_feature: MA Experiment ID: 20001451 Result: Down-regulated in Transcription
  misc_feature: MA Experiment 20001451 PARAMETER Experiment Name: At_Far-red-induction_P Parameter: Age (day) Value: 7
  misc_feature: MA Experiment 20001451 PARAMETER Experiment Name: At_Far-red-induction_P Parameter: Light Value: Far-red vs. White
  misc_feature: MA Experiment 20001451 PARAMETER Experiment Name: At_Far-red-induction_P Parameter: Organism Value: A. thaliana
  misc_feature: MA Experiment 20001451 PARAMETER Experiment Name: At_Far-red-induction_P Parameter: Plant Line Value: Columbia
  misc_feature: MA Experiment 20001451 PARAMETER Experiment Name: At_Far-red-induction_P Parameter: Timepoint (hr) Value: 24
  misc_feature: MA Experiment 20001451 PARAMETER Experiment Name: At_Far-red-induction_P Parameter: Tissue Value: Whole Plant
  misc_feature: MA Experiment ID: 20001911 Result: Down-regulated in Transcription
  misc_feature: MA Experiment 20001911 PARAMETER Experiment Name: At_Drought_Reproduction_P Parameter: Age (day) Value: 40
  misc_feature: MA Experiment 20001911 PARAMETER Experiment Name: At_Drought_Reproduction_P Parameter: Organism Value: A. thaliana
  misc_feature: MA Experiment 20001911 PARAMETER Experiment Name: At_Drought_Reproduction_P Parameter: Plant Line Value: WS
  misc_feature: MA Experiment 20001911 PARAMETER Experiment Name: At_Drought_Reproduction_P Parameter: Timepoint (day) Value: 10
  misc_feature: MA Experiment 20001911 PARAMETER Experiment Name: At_Drought_Reproduction_P Parameter: Tissue Value: Flowers
  misc_feature: MA Experiment 20001911 PARAMETER Experiment Name: At_Drought_Reproduction_P Parameter: Treatment Value: Drought vs. No Drought
gtcaaaagtacgcgtgaggttctctcttctctgcaaacaaaaatcctggcgttgatagcgattggttaattgtcggtgaatcaacgtttttctgttacacatatcaatcaatcatcatcctcttcatactctcttcttcttcttcatcgtaatcattagcttcaattccgagttttctcttcgtcgccgttgtgctagagttttgtcagatctcgccgggaaattagcaatggcgttttagtctgtttacctgtgaagcttttgcgtaaacgctggattcttctcaaatctctctcacctgatctcttattagattccgaggatggcgctaaagcgagggctatctggagttaaccggattagaggaagtggtggtggatctcgatctgtgcttgtgcttctcatatttttctgtgtttttgcacctctttgcttctttgttggccgaggagtgtatatcgattcctcaaatgattattcaattgtttctgtgaagcagaatcttgactggagagaacgtttagcaatgcaatctgttagatctcttttctcgaaagagatactagatgttatagcaaccagcacagctgatttgggtcctcttagccttgattcttttaagaaaaacaatttgtctgcatcatggcggggaaccggagtagacccctcctttagacattctgagaatccagcaactcctgatgtcaaatctaataacctgaatgaaaaacgtgacagcatttcaaaagatagtatccatcagaaagttgagacacctacaaagattcacagaaggcaactaagagagaaaaggcgtgagatgcgggcaaatgagttagttcagcacaatgatgacacgattttgaaactcgaaaatgctgccattgaacgctctaagtctgttgattctgcagtccttggtaaatacagtatttggagaagagaaaatgagaatgacaactctgattcaaatatacgcttgatgcgggatcaagtaataatggctagagtctatagtgggattgcaaaattgaaaaacaagaacgatttgttacaagaactccaggcccgacttaaggacagccaacgggttttgggggaagcaacatctgatgctgatcttcctcggagtgcgcatgagaaactcagagccatgggtcaagtcttggctaaagctaagatgcagttatatgactgcaagctggttactggaaagctgagagcaatgcttcagactgccgacgaacaagtgaggagcttaaagaagcagagtacttttctggctcagttagcagcaaaaaccattccaaatcctatccattgcctatcaatgcgcttgactatcgattactatcttctgtctccggagaaaagaaaattccctcggagtgaaaacctagaaaaccctaatctttatcattatgccctcttttccgacaatgtattagctgcatcagtagttgttaactcaaccatcatgaatgccaaggatccttctaagcatgtttttcaccttgtcacggataaactcaatttcggagcaatgaacatgtggttcctcctaaacccacccggaaaggcaaccatacatgtggaaaacgtcgatgagtttaagtggctcaattcatcttactgtcctgtccttcgtcagcttgaatctgcagcaatgagagagtactattttaaagcagaccatccaacttcaggctcttcgaatctaaaatacagaaacccaaagtatctatccatgttgaatcacttgagattctacctccctgaggtttatcccaagctgaacaaaatcctcttcctggacgatgacatcattgttcagaaagacttgactccactctgggaagttaacctgaacggcaaagtcaacggtgcagtcgaaacctgtggggaaagtttccacagattcgacaagtatctcaacttttcgaatcctcacattgcgaggaacttcaatccaaatgcttgtggatgggcttatggaatgaacatgttcgacctaaaggaatggaagaagagagacatcactggtatataccacaagtggcaaaacatgaatgagaacaggacactatggaagctagggacattgccaccaggattaataacattctacggattaacacatcccttaaacaaggcgtggcatgtgctgggacttggatataacccgagtatcgacaagaaggacattgagaatgcagcagtggttcactataacgggaacatgaaaccatggttggagttggcaatgtccaaatatcggccgtattggaccaagtacatcaagtttgatcacccatatcttcgtcgttgcaaccttcatgaataaaatcaaatctttgttagatgatttgaggtaattacttctaatgttctgttgttcccattccattgctctttattccacacattgttaattgtttattcatatcgttttttagtcattcttttcttctcttcttctttcgggttaaaaacacttatgttattttttgagtttttctaatgatagtaatatgtttctggag

SEQ ID NO: 47502 - protein, 673 aa, Arabidopsis thaliana
  peptide (1)..(673): Ceres Seq. ID no. 12601297
  misc_feature (227)..(670): Homolog of NCBI NO: 15230806 NR Description: glycosyl transferase, putative
  misc_feature (208)..(672): Homolog of NCBI NO: 38423965 NR Description: putative glycosyltransferase
  misc_feature (215)..(672): Homolog of NCBI NO: 18422837 NR Description: putative protein
  misc_feature (215)..(672): Homolog of NCBI NO: 10177914 NR Description: emb|CAB71043.1~gene_id:MCA23.10~strong similarity
  misc_feature (161)..(673): Homolog of NCBI NO: 37533460 NR Description: hypothetical protein [Oryza sativa (japonica
  misc_feature (544)..(673): Homolog of NCBI NO: 15227235 NR Description: hypothetical protein; protein id: At2g46480.1
  misc_feature (150)..(558): Homolog of NCBI NO: 15227235 NR Description: hypothetical protein; protein id: At2g46480.1
  misc_feature (90)..(673): Homolog of NCBI NO: 30691875 NR Description: glycosyltransferase family 8 [Arabidopsis
  misc_feature (90)..(673): Homolog of NCBI NO: 7485958 NR Description: hypothetical protein F22I13.40 - Arabidopsis
  misc_feature (86)..(673): Homolog of NCBI NO: 7271113 NR Description: 68 kDa protein [Cicer arietinum]
  misc_feature (227)..(670): Homolog of NCBI NO: 15230806 NR Description: glycosyl transferase, putative
  misc_feature (208)..(672): Homolog of NCBI NO: 38423965 NR Description: putative glycosyltransferase
  misc_feature (215)..(672): Homolog of NCBI NO: 18422837 NR Description: putative protein
  misc_feature (215)..(672): Homolog of NCBI NO: 10177914 NR Description: emb|CAB71043.1~gene_id:MCA23.10~strong similarity
  misc_feature (161)..(673): Homolog of NCBI NO: 37533460 NR Description: hypothetical protein [Oryza sativa (japonica
  misc_feature (544)..(673): Homolog of NCBI NO: 15227235 NR Description: hypothetical protein; protein id: At2g46480.1
  misc_feature (150)..(558): Homolog of NCBI NO: 15227235 NR Description: hypothetical protein; protein id: At2g46480.1
  misc_feature (90)..(673): Homolog of NCBI NO: 30691875 NR Description: glycosyltransferase family 8 [Arabidopsis
  misc_feature (90)..(673): Homolog of NCBI NO: 7485958 NR Description: hypothetical protein F22I13.40 - Arabidopsis
  misc_feature (86)..(673): Homolog of NCBI NO: 7271113 NR Description: 68 kDa protein [Cicer arietinum]
MALKRGLSGVNRIRGSGGGSRSVLVLLIFFCVFAPLCFFVGRGVYIDSSNDYSIVSVKQNLDWRERLAMQSVRSLFSKEILDVIATSTADLGPLSLDSFKKNNLSASWRGTGVDPSFRHSENPATPDVKSNNLNEKRDSISKDSIHQKVETPTKIHRRQLREKRREMRANELVQHNDDTILKLENAAIERSKSVDSAVLGKYSIWRRENENDNSDSNIRLMRDQVIMARVYSGIAKLKNKNDLLQELQARLKDSQRVLGEATSDADLPRSAHEKLRAMGQVLAKAKMQLYDCKLVTGKLRAMLQTADEQVRSLKKQSTFLAQLAAKTIPNPIHCLSMRLTIDYYLLSPEKRKFPRSENLENPNLYHYALFSDNVLAASVVVNSTIMNAKDPSKHVFHLVTDKLNFGAMNMWFLLNPPGKATIHVENVDEFKWLNSSYCPVLRQLESAAMREYYFKADHPTSGSSNLKYRNPKYLSMLNHLRFYLPEVYPKLNKILFLDDDIIVQKDLTPLWEVNLNGKVNGAVETCGESFHRFDKYLNFSNPHIARNFNPNACGWAYGMNMFDLKEWKKRDITGIYHKWQNMNENRTLWKLGTLPPGLITFYGLTHPLNKAWHVLGLGYNPSIDKKDIENAAVVHYNGNMKPWLELAMSKYRPYWTKYIKFDHPYLRRCNLHE

SEQ ID NO: 47503 - protein, 605 aa, Arabidopsis thaliana
  peptide (1)..(605): Ceres Seq. ID no. 12601298
  misc_feature (159)..(602): Homolog of NCBI NO: 15230806 NR Description: glycosyl transferase, putative
  misc_feature (140)..(604): Homolog of NCBI NO: 38423965 NR Description: putative glycosyltransferase
  misc_feature (147)..(604): Homolog of NCBI NO: 18422837 NR Description: putative protein
  misc_feature (147)..(604): Homolog of NCBI NO: 10177914 NR Description: emb|CAB71043.1~gene_id:MCA23.10~strong similarity
  misc_feature (93)..(605): Homolog of NCBI NO: 37533460 NR Description: hypothetical protein [Oryza sativa (japonica
  misc_feature (476)..(605): Homolog of NCBI NO: 15227235 NR Description: hypothetical protein; protein id: At2g46480.1
  misc_feature (82)..(490): Homolog of NCBI NO: 15227235 NR Description: hypothetical protein; protein id: At2g46480.1
  misc_feature (22)..(605): Homolog of NCBI NO: 30691875 NR Description: glycosyltransferase family 8 [Arabidopsis
  misc_feature (22)..(605): Homolog of NCBI NO: 7485958 NR Description: hypothetical protein F22I13.40 - Arabidopsis
  misc_feature (18)..(605): Homolog of NCBI NO: 7271113 NR Description: 68 kDa protein [Cicer arietinum]
  misc_feature (159)..(602): Homolog of NCBI NO: 15230806 NR Description: glycosyl transferase, putative
  misc_feature (140)..(604): Homolog of NCBI NO: 38423965 NR Description: putative glycosyltransferase
  misc_feature (147)..(604): Homolog of NCBI NO: 18422837 NR Description: putative protein
  misc_feature (147)..(604): Homolog of NCBI NO: 10177914 NR Description: emb|CAB71043.1~gene_id:MCA23.10~strong similarity
  misc_feature (93)..(605): Homolog of NCBI NO: 37533460 NR Description: hypothetical protein [Oryza sativa (japonica
  misc_feature (476)..(605): Homolog of NCBI NO: 15227235 NR Description: hypothetical protein; protein id: At2g46480.1
  misc_feature (82)..(490): Homolog of NCBI NO: 15227235 NR Description: hypothetical protein; protein id: At2g46480.1
  misc_feature (22)..(605): Homolog of NCBI NO: 30691875 NR Description: glycosyltransferase family 8 [Arabidopsis
  misc_feature (22)..(605): Homolog of NCBI NO: 7485958 NR Description: hypothetical protein F22I13.40 - Arabidopsis
  misc_feature (18)..(605): Homolog of NCBI NO: 7271113 NR Description: 68 kDa protein [Cicer arietinum]
MQSVRSLFSKEILDVIATSTADLGPLSLDSFKKNNLSASWRGTGVDPSFRHSENPATPDVKSNNLNEKRDSISKDSIHQKVETPTKIHRRQLREKRREMRANELVQHNDDTILKLENAAIERSKSVDSAVLGKYSIWRRENENDNSDSNIRLMRDQVIMARVYSGIAKLKNKNDLLQELQARLKDSQRVLGEATSDADLPRSAHEKLRAMGQVLAKAKMQLYDCKLVTGKLRAMLQTADEQVRSLKKQSTFLAQLAAKTIPNPIHCLSMRLTIDYYLLSPEKRKFPRSENLENPNLYHYALFSDNVLAASVVVNSTIMNAKDPSKHVFHLVTDKLNFGAMNMWFLLNPPGKATIHVENVDEFKWLNSSYCPVLRQLESAAMREYYFKADHPTSGSSNLKYRNPKYLSMLNHLRFYLPEVYPKLNKILFLDDDIIVQKDLTPLWEVNLNGKVNGAVETCGESFHRFDKYLNFSNPHIARNFNPNACGWAYGMNMFDLKEWKKRDITGIYHKWQNMNENRTLWKLGTLPPGLITFYGLTHPLNKAWHVLGLGYNPSIDKKDIENAAVVHYNGNMKPWLELAMSKYRPYWTKYIKFDHPYLRRCNLHE

SEQ ID NO: 47504 - protein, 507 aa, Arabidopsis thaliana
  peptide (1)..(507): Ceres Seq. ID no. 12601299
  misc_feature (61)..(504): Homolog of NCBI NO: 15230806 NR Description: glycosyl transferase, putative
  misc_feature (42)..(506): Homolog of NCBI NO: 38423965 NR Description: putative glycosyltransferase
  misc_feature (49)..(506): Homolog of NCBI NO: 18422837 NR Description: putative protein
  misc_feature (49)..(506): Homolog of NCBI NO: 10177914 NR Description: emb|CAB71043.1~gene_id:MCA23.10~strong similarity
  misc_feature (1)..(507): Homolog of NCBI NO: 37533460 NR Description: hypothetical protein [Oryza sativa (japonica
  misc_feature (378)..(507): Homolog of NCBI NO: 15227235 NR Description: hypothetical protein; protein id: At2g46480.1
  misc_feature (1)..(392): Homolog of NCBI NO: 15227235 NR Description: hypothetical protein; protein id: At2g46480.1
  misc_feature (1)..(507): Homolog of NCBI NO: 30691875 NR Description: glycosyltransferase family 8 [Arabidopsis
  misc_feature (1)..(507): Homolog of NCBI NO: 7485958 NR Description: hypothetical protein F22I13.40 - Arabidopsis
  misc_feature (1)..(507): Homolog of NCBI NO: 7271113 NR Description: 68 kDa protein [Cicer arietinum]
  misc_feature (61)..(504): Homolog of NCBI NO: 15230806 NR Description: glycosyl transferase, putative
  misc_feature (42)..(506): Homolog of NCBI NO: 38423965 NR Description: putative glycosyltransferase
  misc_feature (49)..(506): Homolog of NCBI NO: 18422837 NR Description: putative protein
  misc_feature (49)..(506): Homolog of NCBI NO: 10177914 NR Description: emb|CAB71043.1~gene_id:MCA23.10~strong similarity
  misc_feature (1)..(507): Homolog of NCBI NO: 37533460 NR Description: hypothetical protein [Oryza sativa (japonica
  misc_feature (378)..(507): Homolog of NCBI NO: 15227235 NR Description: hypothetical protein; protein id: At2g46480.1
  misc_feature (1)..(392): Homolog of NCBI NO: 15227235 NR Description: hypothetical protein; protein id: At2g46480.1
  misc_feature (1)..(507): Homolog of NCBI NO: 30691875 NR Description: glycosyltransferase family 8 [Arabidopsis
  misc_feature (1)..(507): Homolog of NCBI NO: 7485958 NR Description: hypothetical protein F22I13.40 - Arabidopsis
  misc_feature (1)..(507): Homolog of NCBI NO: 7271113 NR Description: 68 kDa protein [Cicer arietinum]
MRANELVQHNDDTILKLENAAIERSKSVDSAVLGKYSIWRRENENDNSDSNIRLMRDQVIMARVYSGIAKLKNKNDLLQELQARLKDSQRVLGEATSDADLPRSAHEKLRAMGQVLAKAKMQLYDCKLVTGKLRAMLQTADEQVRSLKKQSTFLAQLAAKTIPNPIHCLSMRLTIDYYLLSPEKRKFPRSENLENPNLYHYALFSDNVLAASVVVNSTIMNAKDPSKHVFHLVTDKLNFGAMNMWFLLNPPGKATIHVENVDEFKWLNSSYCPVLRQLESAAMREYYFKADHPTSGSSNLKYRNPKYLSMLNHLRFYLPEVYPKLNKILFLDDDIIVQKDLTPLWEVNLNGKVNGAVETCGESFHRFDKYLNFSNPHIARNFNPNACGWAYGMNMFDLKEWKKRDITGIYHKWQNMNENRTLWKLGTLPPGLITFYGLTHPLNKAWHVLGLGYNPSIDKKDIENAAVVHYNGNMKPWLELAMSKYRPYWTKYIKFDHPYLRRCNLHE

SEQ ID NO: 47505 - DNA, 1818 bp, Arabidopsis thaliana
  misc_feature (1)..(1818): Ceres Seq. ID no. 13592569
  misc_feature: MA Experiment ID: 20000171 Result: Down-regulated in Transcription
  misc_feature: MA Experiment 20000171 PARAMETER Experiment Name: At_42deg_Heat_P Parameter: Age (day) Value: 14
  misc_feature: MA Experiment 20000171 PARAMETER Experiment Name: At_42deg_Heat_P Parameter: Organism Value: A. thaliana
  misc_feature: MA Experiment 20000171 PARAMETER Experiment Name: At_42deg_Heat_P Parameter: Plant Line Value: WS
  misc_feature: MA Experiment 20000171 PARAMETER Experiment Name: At_42deg_Heat_P Parameter: Temperature (deg C) Value: 42 vs. 22
  misc_feature: MA Experiment 20000171 PARAMETER Experiment Name: At_42deg_Heat_P Parameter: Timepoint (hr) Value: 1
  misc_feature: MA Experiment 20000171 PARAMETER Experiment Name: At_42deg_Heat_P Parameter: Tissue Value: Aerial
  misc_feature: MA Experiment ID: 20000173 Result: Down-regulated in Transcription
  misc_feature: MA Experiment 20000173 PARAMETER Experiment Name: At_42deg_Heat_P Parameter: Age (day) Value: 14
  misc_feature: MA Experiment 20000173 PARAMETER Experiment Name: At_42deg_Heat_P Parameter: Organism Value: A. thaliana
  misc_feature: MA Experiment 20000173 PARAMETER Experiment Name: At_42deg_Heat_P Parameter: Plant Line Value: WS
  misc_feature: MA Experiment 20000173 PARAMETER Experiment Name: At_42deg_Heat_P Parameter: Temperature (deg C) Value: 42 vs. 22
  misc_feature: MA Experiment 20000173 PARAMETER Experiment Name: At_42deg_Heat_P Parameter: Timepoint (hr) Value: 6
  misc_feature: MA Experiment 20000173 PARAMETER Experiment Name: At_42deg_Heat_P Parameter: Tissue Value: Aerial
  misc_feature: MA Experiment ID: 20000235 Result: Up-regulated in Transcription
  misc_feature: MA Experiment 20000235 PARAMETER Experiment Name: At_Siliques_P Parameter: Age (day) Value: 21
  misc_feature: MA Experiment 20000235 PARAMETER Experiment Name: At_Siliques_P Parameter: Organism Value: A. thaliana
  misc_feature: MA Experiment 20000235 PARAMETER Experiment Name: At_Siliques_P Parameter: Plant Line Value: WS
  misc_feature: MA Experiment 20000235 PARAMETER Experiment Name: At_Siliques_P Parameter: Tissue Value: 5-10mm Siliques vs. Whole Plant
gacaacacttctctcactcaatcgctttctctttgagacgtttgtttagtttcaacaaacaaatcaaaacacacaaagtttgtgtcttcccttaagattcactcaaatctcgcaacacacacattcaacaaatcctgattcataacatctcaccaaatctctcaaaagatctccaaatctaaaatgttcttcttcttcttcttcatctgaatccaaaacaacaatggtgagacgtttcctctcttctcacaaatctctcatcactgttttctggatcgccactttcgcttccttattcatctggcaattcggcggcgtttccacaaatctctactccggtttctcccttttctggtcgtcgtcttcaacaaccaccaccgtcttctccggtggattccccaagctcagacctgtagttttcaatctaacagacttcggtgctgtcggcgatggtgtcacaatcaacactgaagctttcgagaaagctatttataagatctctaagcttgctaagaaaggaggtggtcaacttaatgttcctcctggtcgttggctcactgctccgtttaatctcactagttatatgactcttttcctctctgagaacgctgagattcttgctcttcaggatgaaaagtattggtctttgcttcctcctttaccttcatatggatatggaagagagcatcatggacctcgttatggaagtttcattcatggacagaatcttagagatgttgttgttacagggaataatggtagcatcaacgggcagggacaaacgtggtggaagaagtatcgccaaaagctgcttaaccacacgagaggaccactggtgcagataatgtggtcaagtgacattgtttttgccaatatcactttgcgtgattctccattttggacgcttcacccatatgactgcaaaaatgtcacaatcaccaatatgaccattttggcgcctgtgttcgaagccccaaacactgatggtatcgatccggattcgtgtgaggacatgttaatcgagaactcttacatcagcgttggggatgatggaatcgcaataaagagcggttgggaccagtatggaactacatatggaaaaccttcaaagaacatactcatccgcaacctcatcatccgctccatggttagcgctggtatatcaataggaagtgagatgtctggtggtgtctcgaatatcacagtcgagaatattctgatttggagctcccggcgtggagttaggattaaaaccgcaccaggacgaggtgggtatgtccgggatataacattccggaatgtcacattggatgagttgagagttggtattgtcattaaaacagactacaacgagcacccagatggtggattcaatccccaagcctttccgatactcgagaacataaactacactgggatatacggtcagggagtgcgtgtaccagtgcgtatccaaggaagcaaagagattcctgttaaaaatgtaaccttcagggacatgtcagtggggataacatacaagaaaaagcacatattccagtgtgcgtacgtggaggggcgtgtgataggcaccatcttcccagctccgtgtgataaccttgatcggtatgatgagcaggaacggttggtgaagcaatctgattcccagaatgcaacagatatagactacgagatctgaccaacaagagactgggtttggcctctgcaacaaatttgtttcgttggattttgtacatatacagaggaatctggaaagcaaaggaaattatcggtcagtcagattaaattgtatttgcactcttaaagaggaatttttcc

SEQ ID NO: 47506 - protein, 484 aa, Arabidopsis thaliana
  peptide (1)..(484): Ceres Seq. ID no. 13592570
  misc_feature (98)..(456): Pfam Name: Glycosyl hydrolases family 28 Pfam Description: Glycosyl hydrolases family 28
  misc_feature (68)..(459): Homolog of NCBI NO: 15224072 NR Description: polygalacturonase, putative [Arabidopsis
  misc_feature (59)..(459): Homolog of NCBI NO: 34897760 NR Description: ESTs AU029388(E30287),D49277(S16474) correspond a region of the predicted gene.~Similar to Arabidopsis thaliana
  misc_feature (68)..(469): Homolog of NCBI NO: 15229058 NR Description: polygalacturonase, putative [Arabidopsis
  misc_feature (26)..(459): Homolog of NCBI NO: 15236625 NR Description: polygalacturonase, putative [Arabidopsis
  misc_feature (6)..(136): Homolog of NCBI NO: 25518077 NR Description: T29M8.4 protein - Arabidopsis thaliana
  misc_feature (135)..(484): Homolog of NCBI NO: 25518077 NR Description: T29M8.4 protein - Arabidopsis thaliana
  misc_feature (6)..(484): Homolog of NCBI NO: 19698861 NR Description: unknown protein [Arabidopsis thaliana]
  misc_feature (6)..(484): Homolog of NCBI NO: 15221958 NR Description: polygalacturonase, putative [Arabidopsis thaliana]
  misc_feature (1)..(484): Homolog of NCBI NO: 23506093 NR Description: At3g42950/F18P9_110 [Arabidopsis thaliana]
  misc_feature (1)..(484): Homolog of NCBI NO: 15229188 NR Description: polygalacturonase, putative [Arabidopsis
MVRRFLSSHKSLITVFWIATFASLFIWQFGGVSTNLYSGFSLFWSSSSTTTTVFSGGFPKLRPVVFNLTDFGAVGDGVTINTEAFEKAIYKISKLAKKGGGQLNVPPGRWLTAPFNLTSYMTLFLSENAEILALQDEKYWSLLPPLPSYGYGREHHGPRYGSFIHGQNLRDVVVTGNNGSINGQGQTWWKKYRQKLLNHTRGPLVQIMWSSDIVFANITLRDSPFWTLHPYDCKNVTITNMTILAPVFEAPNTDGIDPDSCEDMLIENSYISVGDDGIAIKSGWDQYGTTYGKPSKNILIRNLIIRSMVSAGISIGSEMSGGVSNITVENILIWSSRRGVRIKTAPGRGGYVRDITFRNVTLDELRVGIVIKTDYNEHPDGGFNPQAFPILENINYTGIYGQGVRVPVRIQGSKEIPVKNVTFRDMSVGITYKKKHIFQCAYVEGRVIGTIFPAPCDNLDRYDEQERLVKQSDSQNATDIDYEI

SEQ ID NO: 47507 - protein, 364 aa, Arabidopsis thaliana
  peptide (1)..(364): Ceres Seq. ID no. 13592571
  misc_feature (1)..(336): Pfam Name: Glycosyl hydrolases family 28 Pfam Description: Glycosyl hydrolases family 28
  misc_feature (1)..(339): Homolog of NCBI NO: 15224072 NR Description: polygalacturonase, putative [Arabidopsis
  misc_feature (1)..(339): Homolog of NCBI NO: 34897760 NR Description: ESTs AU029388(E30287),D49277(S16474) correspond a region of the predicted gene.~Similar to Arabidopsis thaliana
  misc_feature (1)..(349): Homolog of NCBI NO: 15229058 NR Description: polygalacturonase, putative [Arabidopsis
  misc_feature (1)..(339): Homolog of NCBI NO: 15236625 NR Description: polygalacturonase, putative [Arabidopsis
  misc_feature (1)..(16): Homolog of NCBI NO: 25518077 NR Description: T29M8.4 protein - Arabidopsis thaliana
  misc_feature (15)..(364): Homolog of NCBI NO: 25518077 NR Description: T29M8.4 protein - Arabidopsis thaliana
  misc_feature (1)..(364): Homolog of NCBI NO: 19698861 NR Description: unknown protein [Arabidopsis thaliana]
  misc_feature (1)..(364): Homolog of NCBI NO: 15221958 NR Description: polygalacturonase, putative [Arabidopsis thaliana]
  misc_feature (1)..(364): Homolog of NCBI NO: 23506093 NR Description: At3g42950/F18P9_110 [Arabidopsis thaliana]
  misc_feature (1)..(364): Homolog of NCBI NO: 15229188 NR Description: polygalacturonase, putative [Arabidopsis
MTLFLSENAEILALQDEKYWSLLPPLPSYGYGREHHGPRYGSFIHGQNLRDVVVTGNNGSINGQGQTWWKKYRQKLLNHTRGPLVQIMWSSDIVFANITLRDSPFWTLHPYDCKNVTITNMTILAPVFEAPNTDGIDPDSCEDMLIENSYISVGDDGIAIKSGWDQYGTTYGKPSKNILIRNLIIRSMVSAGISIGSEMSGGVSNITVENILIWSSRRGVRIKTAPGRGGYVRDITFRNVTLDELRVGIVIKTDYNEHPDGGFNPQAFPILENINYTGIYGQGVRVPVRIQGSKEIPVKNVTFRDMSVGITYKKKHIFQCAYVEGRVIGTIFPAPCDNLDRYDEQERLVKQSDSQNATDIDYEI

SEQ ID NO: 47508 - protein, 277 aa, Arabidopsis thaliana
  peptide (1)..(277): Ceres Seq. ID no. 13592572
  misc_feature (1)..(249): Pfam Name: Glycosyl hydrolases family 28 Pfam Description: Glycosyl hydrolases family 28
  misc_feature (1)..(252): Homolog of NCBI NO: 18412253 NR Description: polygalacturonase, putative [Arabidopsis
  misc_feature (1)..(252): Homolog of NCBI NO: 15224072 NR Description: polygalacturonase, putative [Arabidopsis
  misc_feature (1)..(252): Homolog of NCBI NO: 34897760 NR Description: ESTs AU029388(E30287),D49277(S16474) correspond a region of the predicted gene.~Similar to Arabidopsis thaliana
  misc_feature (1)..(262): Homolog of NCBI NO: 15229058 NR Description: polygalacturonase, putative [Arabidopsis
  misc_feature (1)..(252): Homolog of NCBI NO: 15236625 NR Description: polygalacturonase, putative [Arabidopsis
  misc_feature (1)..(277): Homolog of NCBI NO: 25518077 NR Description: T29M8.4 protein - Arabidopsis thaliana
  misc_feature (1)..(277): Homolog of NCBI NO: 19698861 NR Description: unknown protein [Arabidopsis thaliana]
  misc_feature (1)..(277): Homolog of NCBI NO: 15221958 NR Description: polygalacturonase, putative [Arabidopsis thaliana]
  misc_feature (1)..(277): Homolog of NCBI NO: 23506093 NR Description: At3g42950/F18P9_110 [Arabidopsis thaliana]
  misc_feature (1)..(277): Homolog of NCBI NO: 15229188 NR Description: polygalacturonase, putative [Arabidopsis
MWSSDIVFANITLRDSPFWTLHPYDCKNVTITNMTILAPVFEAPNTDGIDPDSCEDMLIENSYISVGDDGIAIKSGWDQYGTTYGKPSKNILIRNLIIRSMVSAGISIGSEMSGGVSNITVENILIWSSRRGVRIKTAPGRGGYVRDITFRNVTLDELRVGIVIKTDYNEHPDGGFNPQAFPILENINYTGIYGQGVRVPVRIQGSKEIPVKNVTFRDMSVGITYKKKHIFQCAYVEGRVIGTIFPAPCDNLDRYDEQERLVKQSDSQNATDIDYEI

SEQ ID NO: 47509 - DNA, 1237 bp, Arabidopsis thaliana
  misc_feature (1)..(1237): Ceres Seq. ID no. 13588421
  misc_feature: MA Experiment ID: 20000166 Result: Down-regulated in Transcription
  misc_feature: MA Experiment 20000166 PARAMETER Experiment Name: At_100uM_ABA_P Parameter: Age (day) Value: 14
  misc_feature: MA Experiment 20000166 PARAMETER Experiment Name: At_100uM_ABA_P Parameter: Organism Value: A. thaliana
  misc_feature: MA Experiment 20000166 PARAMETER Experiment Name: At_100uM_ABA_P Parameter: Plant Line Value: WS
  misc_feature: MA Experiment 20000166 PARAMETER Experiment Name: At_100uM_ABA_P Parameter: Timepoint (hr) Value: 1
  misc_feature: MA Experiment 20000166 PARAMETER Experiment Name: At_100uM_ABA_P Parameter: Tissue Value: Aerial
  misc_feature: MA Experiment 20000166 PARAMETER Experiment Name: At_100uM_ABA_P Parameter: Treatment Value: 100uM ABA vs. No Treatment
  misc_feature: MA Experiment ID: 20000184 Result: Up-regulated in Transcription
  misc_feature: MA Experiment 20000184 PARAMETER Experiment Name: At_Shoots__P Parameter: Age (day) Value: 7
  misc_feature: MA Experiment 20000184 PARAMETER Experiment Name: At_Shoots__P Parameter: Tissue Value: Shoots vs. Whole Plant
  misc_feature: MA Experiment ID: 20000265 Result: Down-regulated in Transcription
  misc_feature: MA Experiment 20000265 PARAMETER Experiment Name: At_Open_Flower_P Parameter: Age (day) Value: 21
  misc_feature: MA Experiment 20000265 PARAMETER Experiment Name: At_Open_Flower_P Parameter: Plant Line Value: WS
  misc_feature: MA Experiment 20000265 PARAMETER Experiment Name: At_Open_Flower_P Parameter: Tissue Value: Closed Flower vs. Whole Plant
  misc_feature: MA Experiment ID: 20000439 Result: Up-regulated in Transcription
  misc_feature: MA Experiment 20000439 PARAMETER Experiment Name: At_Roots__P Parameter: Age (day) Value: 14 vs. 21
  misc_feature: MA Experiment 20000439 PARAMETER Experiment Name: At_Roots__P Parameter: Organism Value: A. thaliana
  misc_feature: MA Experiment 20000439 PARAMETER Experiment Name: At_Roots__P Parameter: Tissue Value: Roots vs. Whole Plant
  misc_feature: MA Experiment ID: 20000460 Result: Down-regulated in Transcription
  misc_feature: MA Experiment 20000460 PARAMETER Experiment Name: At_10percent_PEG_P Parameter: Age (day) Value: 12
  misc_feature: MA Experiment 20000460 PARAMETER Experiment Name: At_10percent_PEG_P Parameter: Organism Value: A. thaliana
  misc_feature: MA Experiment 20000460 PARAMETER Experiment Name: At_10percent_PEG_P Parameter: Plant Line Value: WS
  misc_feature: MA Experiment 20000460 PARAMETER Experiment Name: At_10percent_PEG_P Parameter: Timepoint (day) Value: 12
  misc_feature: MA Experiment 20000460 PARAMETER Experiment Name: At_10percent_PEG_P Parameter: Tissue Value: Whole Plant
  misc_feature: MA Experiment 20000460 PARAMETER Experiment Name: At_10percent_PEG_P Parameter: Treatment Value: 10percent PEG vs. No Treatment
  misc_feature: MA Experiment ID: 20000527 Result: Down-regulated in Transcription
  misc_feature: MA Experiment 20000527 PARAMETER Experiment Name: At_10percent_PEG_P Parameter: Age (day) Value: 20
  misc_feature: MA Experiment 20000527 PARAMETER Experiment Name: At_10percent_PEG_P Parameter: Organism Value: A. thaliana
  misc_feature: MA Experiment 20000527 PARAMETER Experiment Name: At_10percent_PEG_P Parameter: Plant Line Value: WS
  misc_feature: MA Experiment 20000527 PARAMETER Experiment Name: At_10percent_PEG_P Parameter: Timepoint (day) Value: 20
  misc_feature: MA Experiment 20000527 PARAMETER Experiment Name: At_10percent_PEG_P Parameter: Tissue Value: Whole Plant
  misc_feature: MA Experiment 20000527 PARAMETER Experiment Name: At_10percent_PEG_P Parameter: Treatment Value: 10percent PEG vs. No Treatment
gagctcataacagaaagaagaaacacaaagtgagacagaactctctaattagtcccgaaggtttcaaaagggtattttggtaaaatcgaaagagaatcatggacgcttttgatgcgattccagatcctgtggtcatcgacattttgaacagagtcggtgacgtcaaaacgttaatacgatgtcgttccgtttctaaacgattcaactcgttagccactcagtctgagtcgctccttctccaactcgatcagatcctcggagccaccgaatctgactccgagatcgattctcctatcgctagcttcttccgatctctcttcaaatccattcacggtctccttcctcctatcttctccaaaccagctaactctgacgaaatcctaacccgatctccgaaaactccggctcagattctctccggatttgaacggatccggaatctggaggtggaattatacggtggtgatgtcaagcttgagaaaggcgccgccgttaagtggaaggctgagttcgggaaaactctcaagagctgcgtcatcgtcgctttccgttccgcgacggttaatacttcagcagctacggaagctgccgccgtcgtcgacggtgttgttgagtcagattcggagtttgtttgtggattgaagacgcgcgtggtgtggacgatcagcgcgttgatggcggcttccacgcgtcattacttgatgagagatttggtgaaagatcacaaggagatggagaaattgattgtgcgtgacagtgatggtgaaggtacggtggtgatggacgcggcggggatgaaagaatacagagagacggaggtgcgtggggataataaagaatcagagcgcgtgggggaacgaactgtggtacctagcgtgaggatgagtatgagacacgcgccgtcgctgatgctgaagagcgggatttgtctcgaagcagcgacgctggtggtcgtaaggccgactggtgtggcttccgatgataacgatgttgagctggtgacggaggcgttcgccggagatggcgacgattgtatgtacggagaagctgttacggcgttgcttaagcgtaggagaaatgtgttagagatgaattctttctaaggcctagtgggctttttttgggcttccgtttgtttggccctttttaatgtatatacatacgcatcgtacaaagccaactgtactattggcgtacgacttttgggtcaaatgacatcaaatccgaattattcctc

SEQ ID NO: 47510 - protein, 334 aa, Arabidopsis thaliana
  peptide (1)..(334): Ceres Seq. ID no. 13588422
  misc_feature (2)..(60): Homolog of NCBI NO: 18397400 NR Description: expressed protein [Arabidopsis thaliana]
  misc_feature (89)..(334): Homolog of NCBI NO: 18397400 NR Description: expressed protein [Arabidopsis thaliana]
  misc_feature (1)..(222): Homolog of NCBI NO: 15219845 NR Description: F-box protein family [Arabidopsis thaliana]
  misc_feature (1)..(84): Homolog of NCBI NO: 15237391 NR Description: F-box protein family [Arabidopsis thaliana]
  misc_feature (101)..(334): Homolog of NCBI NO: 15237391 NR Description: F-box protein family [Arabidopsis thaliana]
  misc_feature (2)..(332): Homolog of NCBI NO: 34909194 NR Description: P0425G02.20 [Oryza sativa (japonica
  misc_feature (1)..(108): Homolog of NCBI NO: 15236865 NR Description: F-box protein family [Arabidopsis thaliana]
  misc_feature (101)..(334): Homolog of NCBI NO: 15236865 NR Description: F-box protein family [Arabidopsis thaliana]
  misc_feature (34)..(334): Homolog of NCBI NO: 15219845 NR Description: F-box protein family [Arabidopsis thaliana]
  misc_feature (1)..(334): Homolog of NCBI NO: 18411823 NR Description: F-box protein family [Arabidopsis thaliana]
MDAFDAIPDPVVIDILNRVGDVKTLIRCRSVSKRFNSLATQSESLLLQLDQILGATESDSEIDSPIASFFRSLFKSIHGLLPPIFSKPANSDEILTRSPKTPAQILSGFERIRNLEVELYGGDVKLEKGAAVKWKAEFGKTLKSCVIVAFRSATVNTSAATEAAAVVDGVVESDSEFVCGLKTRVVWTISALMAASTRHYLMRDLVKDHKEMEKLIVRDSDGEGTVVMDAAGMKEYRETEVRGDNKESERVGERTVVPSVRMSMRHAPSLMLKSGICLEAATLVVVRPTGVASDDNDVELVTEAFAGDGDDCMYGEAVTALLKRRRNVLEMNSF

SEQ ID NO: 47511 - DNA, 1896 bp, Arabidopsis thaliana; identical to SEQ ID NO: 41271
  misc_feature (1)..(1896): Ceres Seq. ID no. 13504759
  misc_feature: MA Experiment ID: 108434 Result: Down-regulated in Transcription
  misc_feature: MA Experiment 108434 PARAMETER Experiment Name: At_Root_Tips_cDNA_P Parameter: Tissue Value: Root Tips
  misc_feature: MA Experiment ID: 108462 Result: Down-regulated in Transcription
  misc_feature: MA Experiment 108462 PARAMETER Experiment Name: At_Germinating_Seeds_cDNA_P Parameter: Age (day) Value: 2 vs. 0
  misc_feature: MA Experiment 108462 PARAMETER Experiment Name: At_Germinating_Seeds_cDNA_P Parameter: Tissue Value: Germinating Seeds
  misc_feature: MA Experiment ID: 108463 Result: Down-regulated in Transcription
  misc_feature: MA Experiment 108463 PARAMETER Experiment Name: At_Germinating_Seeds_cDNA_P Parameter: Age (day) Value: 3 vs. 0
  misc_feature: MA Experiment 108463 PARAMETER Experiment Name: At_Germinating_Seeds_cDNA_P Parameter: Tissue Value: Germinating Seeds
  misc_feature: MA Experiment ID: 108464 Result: Down-regulated in Transcription
  misc_feature: MA Experiment 108464 PARAMETER Experiment Name: At_Germinating_Seeds_cDNA_P Parameter: Age (day) Value: 4 vs. 0
  misc_feature: MA Experiment 108464 PARAMETER Experiment Name: At_Germinating_Seeds_cDNA_P Parameter: Tissue Value: Germinating Seeds
  misc_feature: MA Experiment ID: 108501 Result: Up-regulated in Transcription
  misc_feature: MA Experiment 108501 PARAMETER Experiment Name: At_ap2_floral_buds_cDNA_P Parameter: Plant Line Value: ap2 (Ler.)
  misc_feature: MA Experiment 108501 PARAMETER Experiment Name: At_ap2_floral_buds_cDNA_P Parameter: Tissue Value: Closed Flower
  misc_feature: MA Experiment ID: 108595 Result: Down-regulated in Transcription
  misc_feature: MA Experiment 108595 PARAMETER Experiment Name: At_Ler-pi_Ovule_cDNA_P Parameter: Plant Line Value: null
  misc_feature: MA Experiment ID: 108607 Result: Down-regulated in Transcription
  misc_feature: MA Experiment 108607 PARAMETER Experiment Name: At_100uM_ABA_cDNA_P Parameter: Timepoint (hr) Value: 4
  misc_feature: MA Experiment 108607 PARAMETER Experiment Name: At_100uM_ABA_cDNA_P Parameter: Tissue Value: Aerial
  misc_feature: MA Experiment 108607 PARAMETER Experiment Name: At_100uM_ABA_cDNA_P Parameter: Treatment Value: 100uM ABA vs. No Treatment
  misc_feature: MA Experiment ID: 108668 Result: Down-regulated in Transcription
  misc_feature: MA Experiment 108668 PARAMETER Experiment Name: At_2mM_SA_cDNA_P Parameter: Plant Line Value: WS
  misc_feature: MA Experiment 108668 PARAMETER Experiment Name: At_2mM_SA_cDNA_P Parameter: Timepoint (hr) Value: 6
  misc_feature: MA Experiment 108668 PARAMETER Experiment Name: At_2mM_SA_cDNA_P Parameter: Treatment Value: 2mM SA vs. No Treatment
  misc_feature: MA Experiment ID: 20000068 Result: Down-regulated in Transcription
  misc_feature: MA Experiment ID: 20000113 Result: Down-regulated in Transcription
  misc_feature: MA Experiment 20000113 PARAMETER Experiment Name: At_42deg_Heat_cDNA_P Parameter: Temperature (deg C) Value: 42 vs. 22
  misc_feature: MA Experiment 20000113 PARAMETER Experiment Name: At_42deg_Heat_cDNA_P Parameter: Timepoint (hr) Value: 8
  misc_feature: MA Experiment 20000113 PARAMETER Experiment Name: At_42deg_Heat_cDNA_P Parameter: Tissue Value: Aerial
  misc_feature: MA Experiment ID: 20000173 Result: Down-regulated in Transcription
  misc_feature: MA Experiment 20000173 PARAMETER Experiment Name: At_42deg_Heat_P Parameter: Age (day) Value: 14
  misc_feature: MA Experiment 20000173 PARAMETER Experiment Name: At_42deg_Heat_P Parameter: Organism Value: A. thaliana
  misc_feature: MA Experiment 20000173 PARAMETER Experiment Name: At_42deg_Heat_P Parameter: Plant Line Value: WS
  misc_feature: MA Experiment 20000173 PARAMETER Experiment Name: At_42deg_Heat_P Parameter: Temperature (deg C) Value: 42 vs. 22
  misc_feature: MA Experiment 20000173 PARAMETER Experiment Name: At_42deg_Heat_P Parameter: Timepoint (hr) Value: 6
  misc_feature: MA Experiment 20000173 PARAMETER Experiment Name: At_42deg_Heat_P Parameter: Tissue Value: Aerial
  misc_feature: MA Experiment ID: 20000184 Result: Down-regulated in Transcription
  misc_feature: MA Experiment 20000184 PARAMETER Experiment Name: At_Shoots__P Parameter: Age (day) Value: 7
  misc_feature: MA Experiment 20000184 PARAMETER Experiment Name: At_Shoots__P Parameter: Tissue Value: Shoots vs. Whole Plant
  misc_feature: MA Experiment ID: 20000185 Result: Down-regulated in Transcription
  misc_feature: MA Experiment 20000185 PARAMETER Experiment Name: At_Roots__P Parameter: Age (day) Value: 7 vs. 21
  misc_feature: MA Experiment 20000185 PARAMETER Experiment Name: At_Roots__P Parameter: Organism Value: A. thaliana
  misc_feature: MA Experiment 20000185 PARAMETER Experiment Name: At_Roots__P Parameter: Tissue Value: Roots vs. Whole Plant
  misc_feature: MA Experiment ID: 20000234 Result: Down-regulated in Transcription
  misc_feature: MA Experiment 20000234 PARAMETER Experiment Name: At_Siliques_P Parameter: Age (day) Value: 21
  misc_feature: MA Experiment 20000234 PARAMETER Experiment Name: At_Siliques_P Parameter: Organism Value: A. thaliana
  misc_feature: MA Experiment 20000234 PARAMETER Experiment Name: At_Siliques_P Parameter: Plant Line Value: WS
  misc_feature: MA Experiment 20000234 PARAMETER Experiment Name: At_Siliques_P Parameter: Tissue Value: Less Than 5mm Siliques vs. Whole Plant
  misc_feature: MA Experiment ID: 20000235 Result: Down-regulated in Transcription
  misc_feature: MA Experiment 20000235 PARAMETER Experiment Name: At_Siliques_P Parameter: Age (day) Value: 21
  misc_feature: MA Experiment 20000235 PARAMETER Experiment Name: At_Siliques_P Parameter: Organism Value: A. thaliana
  misc_feature: MA Experiment 20000235 PARAMETER Experiment Name: At_Siliques_P Parameter: Plant Line Value: WS
  misc_feature: MA Experiment 20000235 PARAMETER Experiment Name: At_Siliques_P Parameter: Tissue Value: 5-10mm Siliques vs. Whole Plant
  misc_feature: MA Experiment ID: 20000264 Result: Down-regulated in Transcription
  misc_feature: MA Experiment 20000264 PARAMETER Experiment Name: At_Open_Flower_P Parameter: Age (day) Value: 21
  misc_feature: MA Experiment 20000264 PARAMETER Experiment Name: At_Open_Flower_P Parameter: Plant Line Value: WS
  misc_feature: MA Experiment 20000264 PARAMETER Experiment Name: At_Open_Flower_P Parameter: Tissue Value: Open Flower vs. Whole Plant
  misc_feature: MA Experiment ID: 20000265 Result: Down-regulated in Transcription
  misc_feature: MA Experiment 20000265 PARAMETER Experiment Name: At_Open_Flower_P Parameter: Age (day) Value: 21
  misc_feature: MA Experiment 20000265 PARAMETER Experiment Name: At_Open_Flower_P Parameter: Plant Line Value: WS
  misc_feature: MA Experiment 20000265 PARAMETER Experiment Name: At_Open_Flower_P Parameter: Tissue Value: Closed Flower vs. Whole Plant
  misc_feature: MA Experiment ID: 20000269 Result: Down-regulated in Transcription
  misc_feature: MA Experiment 20000269 PARAMETER Experiment Name: At_1mM_KNO3_L-vs-H_Roots_P Parameter: Age (day) Value: 7,10,12
  misc_feature: MA Experiment 20000269 PARAMETER Experiment Name: At_1mM_KNO3_L-vs-H_Roots_P Parameter: Organism Value: A. thaliana
  misc_feature: MA Experiment 20000269 PARAMETER Experiment Name: At_1mM_KNO3_L-vs-H_Roots_P Parameter: Plant Line Value: WS
  misc_feature: MA Experiment 20000269 PARAMETER Experiment Name: At_1mM_KNO3_L-vs-H_Roots_P Parameter: Timepoint (day) Value: 7,10,12
  misc_feature: MA Experiment 20000269 PARAMETER Experiment Name: At_1mM_KNO3_L-vs-H_Roots_P Parameter: Tissue Value: Roots
  misc_feature: MA Experiment 20000269 PARAMETER Experiment Name: At_1mM_KNO3_L-vs-H_Roots_P Parameter: Treatment Value: 1mM KNO3 vs. 50mM KNO3
  misc_feature: MA Experiment ID: 20000286 Result: Down-regulated in Transcription
  misc_feature: MA Experiment 20000286 PARAMETER Experiment Name: At_Open_Flower_P Parameter: Age (day) Value: 21
  misc_feature: MA Experiment 20000286 PARAMETER Experiment Name: At_Open_Flower_P Parameter: Plant Line Value: WS
  misc_feature: MA Experiment 20000286 PARAMETER Experiment Name: At_Open_Flower_P Parameter: Tissue Value: Half Open vs. Whole Plant
  misc_feature: MA Experiment ID: 20000308 Result: Up-regulated in Transcription
  misc_feature: MA Experiment 20000308 PARAMETER Experiment Name: At_100mM_NaCl__P Parameter: Age (day) Value: 17
  misc_feature: MA Experiment 20000308 PARAMETER Experiment Name: At_100mM_NaCl__P Parameter: Organism Value: A. thaliana
  misc_feature: MA Experiment 20000308 PARAMETER Experiment Name: At_100mM_NaCl__P Parameter: Plant Line Value: WS
  misc_feature: MA Experiment 20000308 PARAMETER Experiment Name: At_100mM_NaCl__P Parameter: Timepoint (hr) Value: 72
  misc_feature: MA Experiment 20000308 PARAMETER Experiment Name: At_100mM_NaCl__P Parameter: Tissue Value: Whole Plant
  misc_feature: MA Experiment 20000308 PARAMETER Experiment Name: At_100mM_NaCl__P Parameter: Treatment Value: 100mM NaCl vs. No Treatment
  misc_feature: MA Experiment ID: 20000436 Result: Down-regulated in Transcription
  misc_feature: MA Experiment 20000436 PARAMETER Experiment Name: At_Drought_P Parameter: Age (day) Value: 7
  misc_feature: MA Experiment 20000436 PARAMETER Experiment Name: At_Drought_P Parameter: Organism Value: A. thaliana
  misc_feature: MA Experiment 20000436 PARAMETER Experiment Name: At_Drought_P Parameter: Plant Line Value: WS
  misc_feature: MA Experiment 20000436 PARAMETER Experiment Name: At_Drought_P Parameter: Timepoint (hr) Value: 12
  misc_feature: MA Experiment 20000436 PARAMETER Experiment Name: At_Drought_P Parameter: Tissue Value: Whole Plant
  misc_feature: MA Experiment 20000436 PARAMETER Experiment Name: At_Drought_P Parameter: Treatment Value: Drought vs. No Drought
  misc_feature: MA Experiment ID: 20000438 Result: Down-regulated in Transcription
  misc_feature: MA Experiment 20000438 PARAMETER Experiment Name: At_Shoots__P Parameter: Age (day) Value: 14
  misc_feature: MA Experiment 20000438 PARAMETER Experiment Name: At_Shoots__P Parameter: Tissue Value: Shoots vs. Whole Plant
  misc_feature: MA Experiment ID: 20000439 Result: Down-regulated in Transcription
  misc_feature: MA Experiment 20000439 PARAMETER Experiment Name: At_Roots__P Parameter: Age (day) Value: 14 vs. 21
  misc_feature: MA Experiment 20000439 PARAMETER Experiment Name: At_Roots__P Parameter: Organism Value: A. thaliana
  misc_feature: MA Experiment 20000439 PARAMETER Experiment Name: At_Roots__P Parameter: Tissue Value: Roots vs. Whole Plant
  misc_feature: MA Experiment ID: 20000527 Result: Down-regulated in Transcription
  misc_feature: MA Experiment 20000527 PARAMETER Experiment Name: At_10percent_PEG_P Parameter: Age (day) Value: 20
  misc_feature: MA Experiment 20000527 PARAMETER Experiment Name: At_10percent_PEG_P Parameter: Organism Value: A. thaliana
  misc_feature: MA Experiment 20000527 PARAMETER Experiment Name: At_10percent_PEG_P Parameter: Plant Line Value: WS
  misc_feature: MA Experiment 20000527 PARAMETER Experiment Name: At_10percent_PEG_P Parameter: Timepoint (day) Value: 20
  misc_feature: MA Experiment 20000527 PARAMETER Experiment Name: At_10percent_PEG_P Parameter: Tissue Value: Whole Plant
  misc_feature: MA Experiment 20000527 PARAMETER Experiment Name: At_10percent_PEG_P Parameter: Treatment Value: 10percent PEG vs. No Treatment
  misc_feature: MA Experiment ID: 20001450 Result: Down-regulated in Transcription
  misc_feature: MA Experiment 20001450 PARAMETER Experiment Name: At_Far-red-induction_P Parameter: Age (day) Value: 7
  misc_feature: MA Experiment 20001450 PARAMETER Experiment Name: At_Far-red-induction_P Parameter: Light Value: Far-red vs. White
  misc_feature: MA Experiment 20001450 PARAMETER Experiment Name: At_Far-red-induction_P Parameter: Organism Value: A. thaliana
  misc_feature: MA Experiment 20001450 PARAMETER Experiment Name: At_Far-red-induction_P Parameter: Plant Line Value: Columbia
  misc_feature: MA Experiment 20001450 PARAMETER Experiment Name: At_Far-red-induction_P Parameter: Timepoint (hr) Value: 8
  misc_feature: MA Experiment 20001450 PARAMETER Experiment Name: At_Far-red-induction_P Parameter: Tissue Value: Whole Plant
  misc_feature: MA Experiment ID: 20001451 Result: Down-regulated in Transcription
  misc_feature: MA Experiment 20001451 PARAMETER Experiment Name: At_Far-red-induction_P Parameter: Age (day) Value: 7
  misc_feature: MA Experiment 20001451 PARAMETER Experiment Name: At_Far-red-induction_P Parameter: Light Value: Far-red vs. White
  misc_feature: MA Experiment 20001451 PARAMETER Experiment Name: At_Far-red-induction_P Parameter: Organism Value: A. thaliana
  misc_feature: MA Experiment 20001451 PARAMETER Experiment Name: At_Far-red-induction_P Parameter: Plant Line Value: Columbia
  misc_feature: MA Experiment 20001451 PARAMETER Experiment Name: At_Far-red-induction_P Parameter: Timepoint (hr) Value: 24
  misc_feature: MA Experiment 20001451 PARAMETER Experiment Name: At_Far-red-induction_P Parameter: Tissue Value: Whole Plant
  misc_feature: MA Experiment ID: 20001458 Result: Up-regulated in Transcription
  misc_feature: MA Experiment 20001458 PARAMETER Experiment Name: At_50mM_NH4NO3_L-to-H_P Parameter: Age (day) Value: Undefined
  misc_feature: MA Experiment 20001458 PARAMETER Experiment Name: At_50mM_NH4NO3_L-to-H_P Parameter: Organism Value: Undefined
  misc_feature: MA Experiment 20001458 PARAMETER Experiment Name: At_50mM_NH4NO3_L-to-H_P Parameter: Plant Line Value: Undefined
  misc_feature: MA Experiment 20001458 PARAMETER Experiment Name: At_50mM_NH4NO3_L-to-H_P Parameter: Timepoint (hr) Value: 2
  misc_feature: MA Experiment 20001458 PARAMETER Experiment Name: At_50mM_NH4NO3_L-to-H_P Parameter: Tissue Value: Siliques
  misc_feature: MA Experiment 20001458 PARAMETER Experiment Name: At_50mM_NH4NO3_L-to-H_P Parameter: Treatment Value: 50mM NH4NO3 vs. 100mM Manitol
  misc_feature: MA Experiment ID: 20001459 Result: Up-regulated in Transcription
  misc_feature: MA Experiment 20001459 PARAMETER Experiment Name: At_50mM_NH4NO3_L-to-H_P Parameter: Age (day) Value: Undefined
  misc_feature: MA Experiment 20001459 PARAMETER Experiment Name: At_50mM_NH4NO3_L-to-H_P Parameter: Organism Value: Undefined
  misc_feature: MA Experiment 20001459 PARAMETER Experiment Name: At_50mM_NH4NO3_L-to-H_P Parameter: Plant Line Value: Undefined
  misc_feature: MA Experiment 20001459 PARAMETER Experiment Name: At_50mM_NH4NO3_L-to-H_P Parameter: Timepoint (hr) Value: 4
  misc_feature: MA Experiment 20001459 PARAMETER Experiment Name: At_50mM_NH4NO3_L-to-H_P Parameter: Tissue Value: Siliques
  misc_feature: MA Experiment 20001459 PARAMETER Experiment Name: At_50mM_NH4NO3_L-to-H_P Parameter: Treatment Value: 50mM NH4NO3 vs. 100mM Manitol
  misc_feature: MA Experiment ID: 20001554 Result: Down-regulated in Transcription
  misc_feature: MA Experiment 20001554 PARAMETER Experiment Name: At_Drought_Soil_Dry_P Parameter: Age (day) Value: 21
  misc_feature: MA Experiment 20001554 PARAMETER Experiment Name: At_Drought_Soil_Dry_P Parameter: Organism Value: A. thaliana
  misc_feature: MA Experiment 20001554 PARAMETER Experiment Name: At_Drought_Soil_Dry_P Parameter: Plant Line Value: WS
  misc_feature: MA Experiment 20001554 PARAMETER Experiment Name: At_Drought_Soil_Dry_P Parameter: Post Timepoint (hr) Value: None
  misc_feature: MA Experiment 20001554 PARAMETER Experiment Name: At_Drought_Soil_Dry_P Parameter: Post-Treatment Value: None
  misc_feature: MA Experiment 20001554 PARAMETER Experiment Name: At_Drought_Soil_Dry_P Parameter: Timepoint (day) Value: 7
  misc_feature: MA Experiment 20001554 PARAMETER Experiment Name: At_Drought_Soil_Dry_P Parameter: Treatment Value: Drought vs. No Drought
  misc_feature: MA Experiment ID: 20001555 Result: Down-regulated in Transcription
  misc_feature: MA Experiment 20001555 PARAMETER Experiment Name: At_Drought_Soil_Dry_P Parameter: Age (day) Value: 24
  misc_feature: MA Experiment 20001555 PARAMETER Experiment Name: At_Drought_Soil_Dry_P Parameter: Organism Value: A. thaliana
  misc_feature: MA Experiment 20001555 PARAMETER Experiment Name: At_Drought_Soil_Dry_P Parameter: Plant Line Value: WS
  misc_feature: MA Experiment 20001555 PARAMETER Experiment Name: At_Drought_Soil_Dry_P Parameter: Post Timepoint (hr) Value: None
  misc_feature: MA Experiment 20001555 PARAMETER Experiment Name: At_Drought_Soil_Dry_P Parameter: Post-Treatment Value: None
  misc_feature: MA Experiment 20001555 PARAMETER Experiment Name: At_Drought_Soil_Dry_P Parameter: Timepoint (day) Value: 10
  misc_feature: MA Experiment 20001555 PARAMETER Experiment Name: At_Drought_Soil_Dry_P Parameter: Treatment Value: Drought vs. No Drought
  misc_feature: MA Experiment ID: 20001556 Result: Down-regulated in Transcription
  misc_feature: MA Experiment 20001556 PARAMETER Experiment Name: At_Drought_Soil_Dry_P Parameter: Age (day) Value: 26
  misc_feature: MA Experiment 20001556 PARAMETER Experiment Name: At_Drought_Soil_Dry_P Parameter: Organism Value: A. thaliana
  misc_feature: MA Experiment 20001556 PARAMETER Experiment Name: At_Drought_Soil_Dry_P Parameter: Plant Line Value: WS
  misc_feature: MA Experiment 20001556 PARAMETER Experiment Name: At_Drought_Soil_Dry_P Parameter: Post Timepoint (hr) Value: None
  misc_feature: MA Experiment 20001556 PARAMETER Experiment Name: At_Drought_Soil_Dry_P Parameter: Post-Treatment Value: None
  misc_feature: MA Experiment 20001556 PARAMETER Experiment Name: At_Drought_Soil_Dry_P Parameter: Timepoint (day) Value: 12
  misc_feature: MA Experiment 20001556 PARAMETER Experiment Name: At_Drought_Soil_Dry_P Parameter: Treatment Value: Drought vs. No Drought
  misc_feature: MA Experiment ID: 20001557 Result: Up-regulated in Transcription
  misc_feature: MA Experiment 20001557 PARAMETER Experiment Name: At_Drought_Soil_Dry_P Parameter: Age (day) Value: 27
  misc_feature: MA Experiment 20001557 PARAMETER Experiment Name: At_Drought_Soil_Dry_P Parameter: Organism Value: A. thaliana
  misc_feature: MA Experiment 20001557 PARAMETER Experiment Name: At_Drought_Soil_Dry_P Parameter: Plant Line Value: WS
  misc_feature: MA Experiment 20001557 PARAMETER Experiment Name: At_Drought_Soil_Dry_P Parameter: Post Timepoint (hr) Value: 3
  misc_feature: MA Experiment 20001557 PARAMETER Experiment Name: At_Drought_Soil_Dry_P Parameter: Post-Treatment Value: Re-Water vs. No Drought
  misc_feature: MA Experiment 20001557 PARAMETER Experiment Name: At_Drought_Soil_Dry_P Parameter: Timepoint (day) Value: 13
  misc_feature: MA Experiment 20001557 PARAMETER Experiment Name: At_Drought_Soil_Dry_P Parameter: Treatment Value: Drought vs. No Drought
  misc_feature: MA Experiment ID: 20001558 Result: Up-regulated in Transcription
  misc_feature: MA Experiment 20001558 PARAMETER Experiment Name: At_Drought_Soil_Dry_P Parameter: Age (day) Value: 27
  misc_feature: MA Experiment 20001558 PARAMETER Experiment Name: At_Drought_Soil_Dry_P Parameter: Organism Value: A. thaliana
  misc_feature: MA Experiment 20001558 PARAMETER Experiment Name: At_Drought_Soil_Dry_P Parameter: Plant Line Value: WS
  misc_feature: MA Experiment 20001558 PARAMETER Experiment Name: At_Drought_Soil_Dry_P Parameter: Post Timepoint (hr) Value: 6
  misc_feature: MA Experiment 20001558 PARAMETER Experiment Name: At_Drought_Soil_Dry_P Parameter: Post-Treatment Value: Re-Water vs. No Drought
  misc_feature: MA Experiment 20001558 PARAMETER Experiment Name: At_Drought_Soil_Dry_P Parameter: Timepoint (day) Value: 13
  misc_feature: MA Experiment 20001558 PARAMETER Experiment Name: At_Drought_Soil_Dry_P Parameter: Treatment Value: Drought vs. No Drought
  misc_feature: MA Experiment ID: 20001560 Result: Up-regulated in Transcription
  misc_feature: MA Experiment 20001560 PARAMETER Experiment Name: At_Drought_Soil_Dry_P Parameter: Age (day) Value: 28
  misc_feature: MA Experiment 20001560 PARAMETER Experiment Name: At_Drought_Soil_Dry_P Parameter: Organism Value: A. thaliana
  misc_feature: MA Experiment 20001560 PARAMETER Experiment Name: At_Drought_Soil_Dry_P Parameter: Plant Line Value: WS
  misc_feature: MA Experiment 20001560 PARAMETER Experiment Name: At_Drought_Soil_Dry_P Parameter: Post Timepoint (hr) Value: None
  misc_feature: MA Experiment 20001560 PARAMETER Experiment Name: At_Drought_Soil_Dry_P Parameter: Post-Treatment Value: None
  misc_feature: MA Experiment 20001560 PARAMETER Experiment Name: At_Drought_Soil_Dry_P Parameter: Timepoint (day) Value: 14
  misc_feature: MA Experiment 20001560 PARAMETER Experiment Name: At_Drought_Soil_Dry_P Parameter: Treatment Value: Drought vs. No Drought

SEQ ID NO: 47512 - protein, 556 aa, Arabidopsis thaliana; identical to SEQ ID NO: 41272
  peptide (1)..(556): Ceres Seq. ID no. 13504760
  misc_feature (244)..(490): Pfam Name: Sugar (and other) transporter Pfam Description: Sugar (and other) transporter
  misc_feature (244)..(490): Pfam Name: Sugar (and other) transporter Pfam Description: Sugar (and other) transporter
  misc_feature (24)..(321): Homolog of NCBI NO: 15241312 NR Description: nodulin-related protein [Arabidopsis thaliana]
  misc_feature (298)..(548): Homolog of NCBI NO: 18395988 NR Description: expressed protein [Arabidopsis thaliana]
  misc_feature (24)..(294): Homolog of NCBI NO: 18395988 NR Description: expressed protein [Arabidopsis thaliana]
  misc_feature (304)..(544): Homolog of NCBI NO: 24461856 NR Description: nodulin-like protein [Poncirus trifoliata]
  misc_feature (16)..(269): Homolog of NCBI NO: 24461856 NR Description: nodulin-like protein [Poncirus trifoliata]
  misc_feature (24)..(321): Homolog of NCBI NO: 15241312 NR Description: nodulin-related protein [Arabidopsis thaliana]
  misc_feature (24)..(294): Homolog of NCBI NO: 18395988 NR Description: expressed protein [Arabidopsis thaliana]
  misc_feature (16)..(269): Homolog of NCBI NO: 24461856 NR Description: nodulin-like protein [Poncirus trifoliata]
  misc_feature (11)..(556): Homolog of NCBI NO: 15227274 NR Description: nodulin-related protein [Arabidopsis thaliana]
  misc_feature (11)..(339): Homolog of NCBI NO: 15236224 NR Description: expressed protein [Arabidopsis thaliana]
  misc_feature (286)..(555): Homolog of NCBI NO: 15236224 NR Description: expressed protein [Arabidopsis thaliana]
  misc_feature (276)..(545): Homolog of NCBI NO: 38345150 NR Description: OSJNBa0014K14.4 [Oryza sativa (japonica
  misc_feature (17)..(269): Homolog of NCBI NO: 38345150 NR Description: OSJNBa0014K14.4 [Oryza sativa (japonica
  misc_feature (304)..(544): Homolog of NCBI NO: 24461856 NR Description: nodulin-like protein [Poncirus trifoliata]
  misc_feature (298)..(548): Homolog of NCBI NO: 18395988 NR Description: expressed protein [Arabidopsis thaliana]
  misc_feature (17)..(269): Homolog of NCBI NO: 38345150 NR Description: OSJNBa0014K14.4 [Oryza sativa (japonica
  misc_feature (276)..(545): Homolog of NCBI NO: 38345150 NR Description: OSJNBa0014K14.4 [Oryza sativa (japonica
  misc_feature (286)..(555): Homolog of NCBI NO: 15236224 NR Description: expressed protein [Arabidopsis thaliana]
  misc_feature (11)..(339): Homolog of NCBI NO: 15236224 NR Description: expressed protein [Arabidopsis thaliana]
  misc_feature (11)..(556): Homolog of NCBI NO: 15227274 NR Description: nodulin-related protein [Arabidopsis thaliana]

SEQ ID NO: 47513 - protein, 546 aa, Arabidopsis thaliana; identical to SEQ ID NO: 41273
  peptide (1)..(546): Ceres Seq. ID no. 13504761
  misc_feature (234)..(480): Pfam Name: Sugar (and other) transporter Pfam Description: Sugar (and other) transporter
  misc_feature (234)..(480): Pfam Name: Sugar (and other) transporter Pfam Description: Sugar (and other) transporter
  misc_feature (14)..(311): Homolog of NCBI NO: 15241312 NR Description: nodulin-related protein [Arabidopsis thaliana]
  misc_feature (288)..(538): Homolog of NCBI NO: 18395988 NR Description: expressed protein [Arabidopsis thaliana]
  misc_feature (14)..(284): Homolog of NCBI NO: 18395988 NR Description: expressed protein [Arabidopsis thaliana]
  misc_feature (294)..(534): Homolog of NCBI NO: 24461856 NR Description: nodulin-like protein [Poncirus trifoliata]
  misc_feature (6)..(259): Homolog of NCBI NO: 24461856 NR Description: nodulin-like protein [Poncirus trifoliata]
  misc_feature (14)..(311): Homolog of NCBI NO: 15241312 NR Description: nodulin-related protein [Arabidopsis thaliana]
  misc_feature (14)..(284): Homolog of NCBI NO: 18395988 NR Description: expressed protein [Arabidopsis thaliana]
  misc_feature (6)..(259): Homolog of NCBI NO: 24461856 NR Description: nodulin-like protein [Poncirus trifoliata]
  misc_feature (1)..(546): Homolog of NCBI NO: 15227274 NR Description: nodulin-related protein [Arabidopsis thaliana]
  misc_feature (1)..(329): Homolog of NCBI NO: 15236224 NR Description: expressed protein [Arabidopsis thaliana]
  misc_feature (276)..(545): Homolog of NCBI NO: 15236224 NR Description: expressed protein [Arabidopsis thaliana]
  misc_feature (266)..(535): Homolog of NCBI NO: 38345150 NR Description: OSJNBa0014K14.4 [Oryza sativa (japonica
  misc_feature (7)..(259): Homolog of NCBI NO: 38345150 NR Description: OSJNBa0014K14.4 [Oryza sativa (japonica
  misc_feature (294)..(534): Homolog of NCBI NO: 24461856 NR Description: nodulin-like protein [Poncirus trifoliata]
  misc_feature (288)..(538): Homolog of NCBI NO: 18395988 NR Description: expressed protein [Arabidopsis thaliana]
  misc_feature (7)..(259): Homolog of NCBI NO: 38345150 NR Description: OSJNBa0014K14.4 [Oryza sativa (japonica
  misc_feature (266)..(535): Homolog of NCBI NO: 38345150 NR Description: OSJNBa0014K14.4 [Oryza sativa (japonica
  misc_feature (276)..(545): Homolog of NCBI NO: 15236224 NR Description: expressed protein [Arabidopsis thaliana]
  misc_feature (1)..(329): Homolog of NCBI NO: 15236224 NR Description: expressed protein [Arabidopsis thaliana]
  misc_feature (1)..(546): Homolog of NCBI NO: 15227274 NR Description: nodulin-related protein [Arabidopsis thaliana]

SEQ ID NO: 47514 - protein, 502 aa, Arabidopsis thaliana; identical to SEQ ID NO: 41274
  peptide (1)..(502): Ceres Seq. ID no. 13504762
  misc_feature (190)..(436): Pfam Name: Sugar (and other) transporter Pfam Description: Sugar (and other) transporter
  misc_feature (190)..(436): Pfam Name: Sugar (and other) transporter Pfam Description: Sugar (and other) transporter
  misc_feature (1)..(267): Homolog of NCBI NO: 15241312 NR Description: nodulin-related protein [Arabidopsis thaliana]
  misc_feature (244)..(494): Homolog of NCBI NO: 18395988 NR Description: expressed protein [Arabidopsis thaliana]
  misc_feature (1)..(240): Homolog of NCBI NO: 18395988 NR Description: expressed protein [Arabidopsis thaliana]
  misc_feature (250)..(490): Homolog of NCBI NO: 24461856 NR Description: nodulin-like protein [Poncirus trifoliata]
  misc_feature (1)..(215): Homolog of NCBI NO: 24461856 NR Description: nodulin-like protein [Poncirus trifoliata]
  misc_feature (1)..(267): Homolog of NCBI NO: 15241312 NR Description: nodulin-related protein [Arabidopsis thaliana]
  misc_feature (1)..(240): Homolog of NCBI NO: 18395988 NR Description: expressed protein [Arabidopsis thaliana]
  misc_feature (1)..(215): Homolog of NCBI NO: 24461856 NR Description: nodulin-like protein [Poncirus trifoliata]
  misc_feature (1)..(502): Homolog of NCBI NO: 15227274 NR Description: nodulin-related protein [Arabidopsis thaliana]
  misc_feature (1)..(285): Homolog of NCBI NO: 15236224 NR Description: expressed protein [Arabidopsis thaliana]
  misc_feature (232)..(501): Homolog of NCBI NO: 15236224 NR Description: expressed protein [Arabidopsis thaliana]
  misc_feature (222)..(491): Homolog of NCBI NO: 38345150 NR Description: OSJNBa0014K14.4 [Oryza sativa (japonica
  misc_feature (1)..(215): Homolog of NCBI NO: 38345150 NR Description: OSJNBa0014K14.4 [Oryza sativa (japonica
  misc_feature (250)..(490): Homolog of NCBI NO: 24461856 NR Description: nodulin-like protein [Poncirus trifoliata]
  misc_feature (244)..(494): Homolog of NCBI NO: 18395988 NR Description: expressed protein [Arabidopsis thaliana]
  misc_feature (1)..(215): Homolog of NCBI NO: 38345150 NR Description: OSJNBa0014K14.4 [Oryza sativa (japonica
  misc_feature (222)..(491): Homolog of NCBI NO: 38345150 NR Description: OSJNBa0014K14.4 [Oryza sativa (japonica
  misc_feature (232)..(501): Homolog of NCBI NO: 15236224 NR Description: expressed protein [Arabidopsis thaliana]
  misc_feature (1)..(285): Homolog of NCBI NO: 15236224 NR Description: expressed protein [Arabidopsis thaliana]
  misc_feature (1)..(502): Homolog of NCBI NO: 15227274 NR Description: nodulin-related protein [Arabidopsis thaliana]

SEQ ID NO: 47515 - DNA, 1779 bp, Arabidopsis thaliana
  misc_feature (1)..(1779): Ceres Seq. ID no. 12591709
  misc_feature: MA Experiment ID: 108462 Result: Down-regulated in Transcription
  misc_feature: MA Experiment 108462 PARAMETER Experiment Name: At_Germinating_Seeds_cDNA_P Parameter: Age (day) Value: 2 vs. 0
  misc_feature: MA Experiment 108462 PARAMETER Experiment Name: At_Germinating_Seeds_cDNA_P Parameter: Tissue Value: Germinating Seeds
  misc_feature: MA Experiment ID: 108463 Result: Down-regulated in Transcription
  misc_feature: MA Experiment 108463 PARAMETER Experiment Name: At_Germinating_Seeds_cDNA_P Parameter: Age (day) Value: 3 vs. 0
  misc_feature: MA Experiment 108463 PARAMETER Experiment Name: At_Germinating_Seeds_cDNA_P Parameter: Tissue Value: Germinating Seeds
  misc_feature: MA Experiment ID: 108464 Result: Down-regulated in Transcription
  misc_feature: MA Experiment 108464 PARAMETER Experiment Name: At_Germinating_Seeds_cDNA_P Parameter: Age (day) Value: 4 vs. 0
  misc_feature: MA Experiment 108464 PARAMETER Experiment Name: At_Germinating_Seeds_cDNA_P Parameter: Tissue Value: Germinating Seeds
  misc_feature: MA Experiment ID: 108501 Result: Up-regulated in Transcription
  misc_feature: MA Experiment 108501 PARAMETER Experiment Name: At_ap2_floral_buds_cDNA_P Parameter: Plant Line Value: ap2 (Ler.)
  misc_feature: MA Experiment 108501 PARAMETER Experiment Name: At_ap2_floral_buds_cDNA_P Parameter: Tissue Value: Closed Flower
  misc_feature: MA Experiment ID: 108576 Result: Down-regulated in Transcription
  misc_feature: MA Experiment 108576 PARAMETER Experiment Name: At_42deg_Heat_cDNA_P Parameter: Temperature (deg C) Value: 42 vs. 22
  misc_feature: MA Experiment 108576 PARAMETER Experiment Name: At_42deg_Heat_cDNA_P Parameter: Timepoint (hr) Value: 1
  misc_feature: MA Experiment 108576 PARAMETER Experiment Name: At_42deg_Heat_cDNA_P Parameter: Tissue Value: Aerial
  misc_feature: MA Experiment ID: 108577 Result: Down-regulated in Transcription
  misc_feature: MA Experiment 108577 PARAMETER Experiment Name: At_42deg_Heat_cDNA_P Parameter: Temperature (deg C) Value: 42 vs. 22
  misc_feature: MA Experiment 108577 PARAMETER Experiment Name: At_42deg_Heat_cDNA_P Parameter: Timepoint (hr) Value: 6
  misc_feature: MA Experiment 108577 PARAMETER Experiment Name: At_42deg_Heat_cDNA_P Parameter: Tissue Value: Aerial
  misc_feature: MA Experiment ID: 108579 Result: Up-regulated in Transcription
  misc_feature: MA Experiment 108579 PARAMETER Experiment Name: At_4deg_Cold_cDNA_P Parameter: Temperature (deg C) Value: 4 vs. 22
  misc_feature: MA Experiment 108579 PARAMETER Experiment Name: At_4deg_Cold_cDNA_P Parameter: Timepoint (hr) Value: 6
  misc_feature: MA Experiment 108579 PARAMETER Experiment Name: At_4deg_Cold_cDNA_P Parameter: Tissue Value: Aerial
  misc_feature: MA Experiment ID: 20000086 Result: Down-regulated in Transcription
  misc_feature: MA Experiment 20000086 PARAMETER Experiment Name: At_100uM_ABA_Mutants_cDNA_P Parameter: Plant Line Value: CS22
  misc_feature: MA Experiment 20000086 PARAMETER Experiment Name: At_100uM_ABA_Mutants_cDNA_P Parameter: Timepoint (hr) Value: 6
  misc_feature: MA Experiment 20000086 PARAMETER Experiment Name: At_100uM_ABA_Mutants_cDNA_P Parameter: Tissue Value: Aerial
  misc_feature: MA Experiment 20000086 PARAMETER Experiment Name: At_100uM_ABA_Mutants_cDNA_P Parameter: Treatment Value: 100uM ABA vs. No Treatment
  misc_feature: MA Experiment ID: 20000087 Result: Down-regulated in Transcription
  misc_feature: MA Experiment 20000087 PARAMETER Experiment Name: At_100uM_ABA_Mutants_cDNA_P Parameter: Plant Line Value: WS
  misc_feature: MA Experiment 20000087 PARAMETER Experiment Name: At_100uM_ABA_Mutants_cDNA_P Parameter: Timepoint (hr) Value: 6
  misc_feature: MA Experiment 20000087 PARAMETER Experiment Name: At_100uM_ABA_Mutants_cDNA_P Parameter: Tissue Value: Aerial
  misc_feature: MA Experiment 20000087 PARAMETER Experiment Name: At_100uM_ABA_Mutants_cDNA_P Parameter: Treatment Value: 100uM ABA vs. No Treatment
  misc_feature: MA Experiment ID: 20000093 Result: Down-regulated in Transcription
  misc_feature: MA Experiment 20000093 PARAMETER Experiment Name: At_42deg_Heat_cDNA_P Parameter: Temperature (deg C) Value: 42 vs. 22
  misc_feature: MA Experiment 20000093 PARAMETER Experiment Name: At_42deg_Heat_cDNA_P Parameter: Timepoint (hr) Value: 0.5
  misc_feature: MA Experiment 20000093 PARAMETER Experiment Name: At_42deg_Heat_cDNA_P Parameter: Tissue Value: Aerial
  misc_feature: MA Experiment ID: 20000113 Result: Down-regulated in Transcription
  misc_feature: MA Experiment 20000113 PARAMETER Experiment Name: At_42deg_Heat_cDNA_P Parameter: Temperature (deg C) Value: 42 vs. 22
  misc_feature: MA Experiment 20000113 PARAMETER Experiment Name: At_42deg_Heat_cDNA_P Parameter: Timepoint (hr) Value: 8
  misc_feature: MA Experiment 20000113 PARAMETER Experiment Name: At_42deg_Heat_cDNA_P Parameter: Tissue Value: Aerial
  misc_feature: MA Experiment ID: 20000171 Result: Down-regulated in Transcription
  misc_feature: MA Experiment 20000171 PARAMETER Experiment Name: At_42deg_Heat_P Parameter: Age (day) Value: 14
  misc_feature: MA Experiment 20000171 PARAMETER Experiment Name: At_42deg_Heat_P Parameter: Organism Value: A. thaliana
  misc_feature: MA Experiment 20000171 PARAMETER Experiment Name: At_42deg_Heat_P Parameter: Plant Line Value: WS
  misc_feature: MA Experiment 20000171 PARAMETER Experiment Name: At_42deg_Heat_P Parameter: Temperature (deg C) Value: 42 vs. 22
  misc_feature: MA Experiment 20000171 PARAMETER Experiment Name: At_42deg_Heat_P Parameter: Timepoint (hr) Value: 1
  misc_feature: MA Experiment 20000171 PARAMETER Experiment Name: At_42deg_Heat_P Parameter: Tissue Value: Aerial
  misc_feature: MA Experiment ID: 20000173 Result: Down-regulated in Transcription
  misc_feature: MA Experiment 20000173 PARAMETER Experiment Name: At_42deg_Heat_P Parameter: Age (day) Value: 14
  misc_feature: MA Experiment 20000173 PARAMETER Experiment Name: At_42deg_Heat_P Parameter: Organism Value: A. thaliana
  misc_feature: MA Experiment 20000173 PARAMETER Experiment Name: At_42deg_Heat_P Parameter: Plant Line Value: WS
  misc_feature: MA Experiment 20000173 PARAMETER Experiment Name: At_42deg_Heat_P Parameter: Temperature (deg C) Value: 42 vs. 22
  misc_feature: MA Experiment 20000173 PARAMETER Experiment Name: At_42deg_Heat_P Parameter: Timepoint (hr) Value: 6
  misc_feature: MA Experiment 20000173 PARAMETER Experiment Name: At_42deg_Heat_P Parameter: Tissue Value: Aerial
  misc_feature: MA Experiment ID: 20000179 Result: Down-regulated in Transcription
  misc_feature: MA Experiment 20000179 PARAMETER Experiment Name: At_Germinating_Seeds_P Parameter: Age (hr) Value: 6 vs. 0
  misc_feature: MA Experiment 20000179 PARAMETER Experiment Name: At_Germinating_Seeds_P Parameter: Tissue Value: Germinating Seeds
  misc_feature: MA Experiment ID: 20000184 Result: Up-regulated in Transcription
  misc_feature: MA Experiment 20000184 PARAMETER Experiment Name: At_Shoots__P Parameter: Age (day) Value: 7
  misc_feature: MA Experiment 20000184 PARAMETER Experiment Name: At_Shoots__P Parameter: Tissue Value: Shoots vs. Whole Plant
  misc_feature: MA Experiment ID: 20000234 Result: Up-regulated in Transcription
  misc_feature: MA Experiment 20000234 PARAMETER Experiment Name: At_Siliques_P Parameter: Age (day) Value: 21
  misc_feature: MA Experiment 20000234 PARAMETER Experiment Name: At_Siliques_P Parameter: Organism Value: A. thaliana
  misc_feature: MA Experiment 20000234 PARAMETER Experiment Name: At_Siliques_P Parameter: Plant Line Value: WS
  misc_feature: MA Experiment 20000234 PARAMETER Experiment Name: At_Siliques_P Parameter: Tissue Value: Less Than 5mm Siliques vs. Whole Plant
  misc_feature: MA Experiment ID: 20000235 Result: Up-regulated in Transcription
  misc_feature: MA Experiment 20000235 PARAMETER Experiment Name: At_Siliques_P Parameter: Age (day) Value: 21
  misc_feature: MA Experiment 20000235 PARAMETER Experiment Name: At_Siliques_P Parameter: Organism Value: A. thaliana
  misc_feature: MA Experiment 20000235 PARAMETER Experiment Name: At_Siliques_P Parameter: Plant Line Value: WS
  misc_feature: MA Experiment 20000235 PARAMETER Experiment Name: At_Siliques_P Parameter: Tissue Value: 5-10mm Siliques vs. Whole Plant
  misc_feature: MA Experiment ID: 20000264 Result: Up-regulated in Transcription
  misc_feature: MA Experiment 20000264 PARAMETER Experiment Name: At_Open_Flower_P Parameter: Age (day) Value: 21
  misc_feature: MA Experiment 20000264 PARAMETER Experiment Name: At_Open_Flower_P Parameter: Plant Line Value: WS
  misc_feature: MA Experiment 20000264 PARAMETER Experiment Name: At_Open_Flower_P Parameter: Tissue Value: Open Flower vs. Whole Plant
  misc_feature: MA Experiment ID: 20000265 Result: Up-regulated in Transcription
  misc_feature: MA Experiment 20000265 PARAMETER Experiment Name: At_Open_Flower_P Parameter: Age (day) Value: 21
  misc_feature: MA Experiment 20000265 PARAMETER Experiment Name: At_Open_Flower_P Parameter: Plant Line Value: WS
  misc_feature: MA Experiment 20000265 PARAMETER Experiment Name: At_Open_Flower_P Parameter: Tissue Value: Closed Flower vs. Whole Plant
  misc_feature: MA Experiment ID: 20000286 Result: Up-regulated in Transcription
  misc_feature: MA Experiment 20000286 PARAMETER Experiment Name: At_Open_Flower_P Parameter: Age (day) Value: 21
  misc_feature: MA Experiment 20000286 PARAMETER Experiment Name: At_Open_Flower_P Parameter: Plant Line Value: WS
  misc_feature: MA Experiment 20000286 PARAMETER Experiment Name: At_Open_Flower_P Parameter: Tissue Value: Half Open vs. Whole Plant
  misc_feature: MA Experiment ID: 20000437 Result: Down-regulated in Transcription
  misc_feature: MA Experiment 20000437 PARAMETER Experiment Name: At_Drought_P Parameter: Age (day) Value: 8
  misc_feature: MA Experiment 20000437 PARAMETER Experiment Name: At_Drought_P Parameter: Organism Value: A. thaliana
  misc_feature: MA Experiment 20000437 PARAMETER Experiment Name: At_Drought_P Parameter: Plant Line Value: WS
  misc_feature: MA Experiment 20000437 PARAMETER Experiment Name: At_Drought_P Parameter: Timepoint (hr) Value: 24
  misc_feature: MA Experiment 20000437 PARAMETER Experiment Name: At_Drought_P Parameter: Tissue Value: Whole Plant
  misc_feature: MA Experiment 20000437 PARAMETER Experiment Name: At_Drought_P Parameter: Treatment Value: Drought vs. No Drought
  misc_feature: MA Experiment ID: 20000438 Result: Up-regulated in Transcription
  misc_feature: MA Experiment 20000438 PARAMETER Experiment Name: At_Shoots__P Parameter: Age (day) Value: 14
  misc_feature: MA Experiment 20000438 PARAMETER Experiment Name: At_Shoots__P Parameter: Tissue Value: Shoots vs. Whole Plant
  misc_feature: MA Experiment ID: 20000439 Result: Up-regulated in Transcription
  misc_feature: MA Experiment 20000439 PARAMETER Experiment Name: At_Roots__P Parameter: Age (day) Value: 14 vs. 21
  misc_feature: MA Experiment 20000439 PARAMETER Experiment Name: At_Roots__P Parameter: Organism Value: A. thaliana
  misc_feature: MA Experiment 20000439 PARAMETER Experiment Name: At_Roots__P Parameter: Tissue Value: Roots vs. Whole Plant
  misc_feature: MA Experiment ID: 20000451 Result: Up-regulated in Transcription
  misc_feature: MA Experiment 20000451 PARAMETER Experiment Name: At_CS6879_Shoots-Roots_P Parameter: Age (day) Value: 14
  misc_feature: MA Experiment 20000451 PARAMETER Experiment Name: At_CS6879_Shoots-Roots_P Parameter: Organism Value: A. thaliana
  misc_feature: MA Experiment 20000451 PARAMETER Experiment Name: At_CS6879_Shoots-Roots_P Parameter: Plant Line Value: CS6879 vs. WS
  misc_feature: MA Experiment 20000451 PARAMETER Experiment Name: At_CS6879_Shoots-Roots_P Parameter: Tissue Value: Roots
  misc_feature: MA Experiment ID: 20000495 Result: Up-regulated in Transcription
  misc_feature: MA Experiment 20000495 PARAMETER Experiment Name: At_Guard_Cells_P Parameter: Harvest Date Value: 8/2/2002
  misc_feature: MA Experiment 20000495 PARAMETER Experiment Name: At_Guard_Cells_P Parameter: Organism Value: A. thaliana
  misc_feature: MA Experiment 20000495 PARAMETER Experiment Name: At_Guard_Cells_P Parameter: Tissue Value: Guard Cells vs. Leaves
  misc_feature: MA Experiment ID: 20000527 Result: Down-regulated in Transcription
  misc_feature: MA Experiment 20000527 PARAMETER Experiment Name: At_10percent_PEG_P Parameter: Age (day) Value: 20
  misc_feature: MA Experiment 20000527 PARAMETER Experiment Name: At_10percent_PEG_P Parameter: Organism Value: A. thaliana
  misc_feature: MA Experiment 20000527 PARAMETER Experiment Name: At_10percent_PEG_P Parameter: Plant Line Value: WS
  misc_feature: MA Experiment 20000527 PARAMETER Experiment Name: At_10percent_PEG_P Parameter: Timepoint (day) Value: 20
  misc_feature: MA Experiment 20000527 PARAMETER Experiment Name: At_10percent_PEG_P Parameter: Tissue Value: Whole Plant
  misc_feature: MA Experiment 20000527 PARAMETER Experiment Name: At_10percent_PEG_P Parameter: Treatment Value: 10percent PEG vs. No Treatment
  misc_feature: MA Experiment ID: 20000573 Result: Down-regulated in Transcription
  misc_feature: MA Experiment 20000573 PARAMETER Experiment Name: At_100uM_ABA_Mutants__P Parameter: Organism Value: A. thaliana
  misc_feature: MA Experiment 20000573 PARAMETER Experiment Name: At_100uM_ABA_Mutants__P Parameter: Plant Line Value: CS22 vs. Ler wt
  misc_feature: MA Experiment 20000573 PARAMETER Experiment Name: At_100uM_ABA_Mutants__P Parameter: Timepoint (hr) Value: N/A
  misc_feature: MA Experiment 20000573 PARAMETER Experiment Name: At_100uM_ABA_Mutants__P Parameter: Tissue Value: Whole Plant
  misc_feature: MA Experiment 20000573 PARAMETER Experiment Name: At_100uM_ABA_Mutants__P Parameter: Treatment Value: None
  misc_feature: MA Experiment ID: 20000794 Result: Down-regulated in Transcription
  misc_feature: MA Experiment 20000794 PARAMETER Experiment Name: At_Petals_P Parameter: Age (day) Value: 23-25 days
  misc_feature: MA Experiment 20000794 PARAMETER Experiment Name: At_Petals_P Parameter: Plant Line Value: WS
  misc_feature: MA Experiment 20000794 PARAMETER Experiment Name: At_Petals_P Parameter: Tissue Value: Petals vs. Whole plant
  misc_feature: MA Experiment ID: 20001248 Result: Down-regulated in Transcription
  misc_feature: MA Experiment 20001248 PARAMETER Experiment Name: At_Far-red-induction_P Parameter: Age (day) Value: 7
  misc_feature: MA Experiment 20001248 PARAMETER Experiment Name: At_Far-red-induction_P Parameter: Light Value: Far-red vs. White
  misc_feature: MA Experiment 20001248 PARAMETER Experiment Name: At_Far-red-induction_P Parameter: Organism Value: A. thaliana
  misc_feature: MA Experiment 20001248 PARAMETER Experiment Name: At_Far-red-induction_P Parameter: Plant Line Value: Columbia
  misc_feature: MA Experiment 20001248 PARAMETER Experiment Name: At_Far-red-induction_P Parameter: Timepoint (hr) Value: 4
  misc_feature: MA Experiment 20001248 PARAMETER Experiment Name: At_Far-red-induction_P Parameter: Tissue Value: Whole Plant
  misc_feature: MA Experiment ID: 20001450 Result: Down-regulated in Transcription
  misc_feature: MA Experiment 20001450 PARAMETER Experiment Name: At_Far-red-induction_P Parameter: Age (day) Value: 7
  misc_feature: MA Experiment 20001450 PARAMETER Experiment Name: At_Far-red-induction_P Parameter: Light Value: Far-red vs. White
  misc_feature: MA Experiment 20001450 PARAMETER Experiment Name: At_Far-red-induction_P Parameter: Organism Value: A. thaliana
  misc_feature: MA Experiment 20001450 PARAMETER Experiment Name: At_Far-red-induction_P Parameter: Plant Line Value: Columbia
  misc_feature: MA Experiment 20001450 PARAMETER Experiment Name: At_Far-red-induction_P Parameter: Timepoint (hr) Value: 8
  misc_feature: MA Experiment 20001450 PARAMETER Experiment Name: At_Far-red-induction_P Parameter: Tissue Value: Whole Plant
  misc_feature: MA Experiment ID: 20001451 Result: Down-regulated in Transcription
  misc_feature: MA Experiment 20001451 PARAMETER Experiment Name: At_Far-red-induction_P Parameter: Age (day) Value: 7
  misc_feature: MA Experiment 20001451 PARAMETER Experiment Name: At_Far-red-induction_P Parameter: Light Value: Far-red vs. White
  misc_feature: MA Experiment 20001451 PARAMETER Experiment Name: At_Far-red-induction_P Parameter: Organism Value: A. thaliana
  misc_feature: MA Experiment 20001451 PARAMETER Experiment Name: At_Far-red-induction_P Parameter: Plant Line Value: Columbia
  misc_feature: MA Experiment 20001451 PARAMETER Experiment Name: At_Far-red-induction_P Parameter: Timepoint (hr) Value: 24
  misc_feature: MA Experiment 20001451 PARAMETER Experiment Name: At_Far-red-induction_P Parameter: Tissue Value: Whole Plant
  misc_feature: MA Experiment ID: 20001558 Result: Up-regulated in Transcription
  misc_feature: MA Experiment 20001558 PARAMETER Experiment Name: At_Drought_Soil_Dry_P Parameter: Age (day) Value: 27
  misc_feature: MA Experiment 20001558 PARAMETER Experiment Name: At_Drought_Soil_Dry_P Parameter: Organism Value: A. thaliana
  misc_feature: MA Experiment 20001558 PARAMETER Experiment Name: At_Drought_Soil_Dry_P Parameter: Plant Line Value: WS
  misc_feature: MA Experiment 20001558 PARAMETER Experiment Name: At_Drought_Soil_Dry_P Parameter: Post Timepoint (hr) Value: 6
  misc_feature: MA Experiment 20001558 PARAMETER Experiment Name: At_Drought_Soil_Dry_P Parameter: Post-Treatment Value: Re-Water vs. No Drought
  misc_feature: MA Experiment 20001558 PARAMETER Experiment Name: At_Drought_Soil_Dry_P Parameter: Timepoint (day) Value: 13
  misc_feature: MA Experiment 20001558 PARAMETER Experiment Name: At_Drought_Soil_Dry_P Parameter: Treatment Value: Drought vs. No Drought
  misc_feature: MA Experiment ID: 20001906 Result: Down-regulated in Transcription
  misc_feature: MA Experiment 20001906 PARAMETER Experiment Name: At_Drought_Reproduction_P Parameter: Age (day) Value: 35
  misc_feature: MA Experiment 20001906 PARAMETER Experiment Name: At_Drought_Reproduction_P Parameter: Organism Value: A. thaliana
  misc_feature: MA Experiment 20001906 PARAMETER Experiment Name: At_Drought_Reproduction_P Parameter: Plant Line Value: WS
  misc_feature: MA Experiment 20001906 PARAMETER Experiment Name: At_Drought_Reproduction_P Parameter: Timepoint (day) Value: 5
  misc_feature: MA Experiment 20001906 PARAMETER Experiment Name: At_Drought_Reproduction_P Parameter: Tissue Value: Siliques
  misc_feature: MA Experiment 20001906 PARAMETER Experiment Name: At_Drought_Reproduction_P Parameter: Treatment Value: Drought vs. No Drought
gagcttcattttgcctttgtatacttttgagtagatagatagacagactatagtctatataagatccatgtgacaatagttaaaatcctcatattttcatttccaatggagcgcaaagtcttgaataccctcgccttctccgtctttgccgttctcttcttcacctcctctgcttcttcccaataccaaactcttgtcgtcaacactcttccttcttccgcaacactctcatggcccgagtccgaatctttaactgatgaatctttatccgagtccacaacttcactctctgtccatttatcacacgtggatgctctgtcttccttctccgacgcatctccggcggacctcttcaacctccgtctccaacgagactctctccgcgtcaaatctattaccagcctcgccgccgtatcaaccggacgaaatgctacgaaaagaactccacgtaccgccggtggatttagcggcgcagttatctctggcctctcacaaggaagcggagagtattttatgaggttaggtgttggaactccggcgactaacgtttacatggtgctcgacacaggaagcgacgtcgtttggctccaatgctctccttgcaaagcctgttacaaccagaccgacgccatttttgacccgaagaaatccaaaactttcgccaccgtaccatgtggatctcgcctttgccggagactagacgactcgtcggaatgtgtcactcgtcgaagcaagacttgtctctaccaagtatcgtacggtgacggatcattcaccgaaggagatttctcaactgaaacgctgacgtttcatggagcgcgtgttgatcacgtgccgttaggatgcggtcacgataacgaaggcttgttcgttggtgcggctgggcttttgggcttgggccgtggtgggttatctttcccgtcgcagacgaaaaaccgttataacggaaaattctcttactgtttggttgaccggacgagttccggttcttcttctaaaccaccgtcaacaatcgtgtttggaaacgccgccgttccgaaaacctctgttttcacgccgttactaacgaacccgaaactcgacacgttttattacttgcagcttcttggaatcagcgttggtggttcgcgcgttcccggcgtttcggagtcgcagttcaagcttgacgccaccggaaacggcggtgtcattatagattccggtacttcggttactcggctgacgcaacctgcttacgtagcgcttagagacgcttttagacttggtgctacgaagctgaaacgtgctccatcgtattctttgttcgacacgtgttttgatctctcgggaatgacgactgtgaaggttccgacggttgtgtttcatttcggaggcggagaggtttcgcttccggcgagtaattatctgatcccggttaacactgaaggacggttctgttttgcgtttgccggaactatggggagtttgtcaatcattggaaacatacagcaacaaggtttccgggtcgcttatgacttggtcgggtcacgggtcgggtttttgtctcgcgcgtgttagattttgagcttgagttgactgatttattcccaaagactttttgggagaaaattgacaaagcaaattatcaaacattgttatcatcatcgactatcatactactcattagtcatcattcatgaagatccctagattaaatattgtactagtacttctgtactgtcaaaagtcaaagagaagtgaatcttaaaggtgcttttgtcctttgaaatttcttaaacc

SEQ ID NO: 47516 - protein, 483 aa, Arabidopsis thaliana
  peptide (1)..(483): Ceres Seq. ID no. 12591710
  misc_feature (82)..(481): Pfam Name: Eukaryotic aspartyl protease Pfam Description: Eukaryotic aspartyl protease
  misc_feature (17)..(483): Homolog of NCBI NO: 28392860 NR Description: unknown protein [Arabidopsis thaliana]
  misc_feature (77)..(483): Homolog of NCBI NO: 34895664 NR Description: nucleoid DNA-binding protein cnd41-like protein
  misc_feature (24)..(483): Homolog of NCBI NO: 15229656 NR Description: putative chloroplast nucleoid DNA-binding protein
  misc_feature (24)..(483): Homolog of NCBI NO: 19424106 NR Description: putative chloroplast nucleoid DNA-binding protein
  misc_feature (12)..(483): Homolog of NCBI NO: 15222611 NR Description: hypothetical protein
  misc_feature (26)..(483): Homolog of NCBI NO: 15290061 NR Description: nucleoid DNA-binding protein cnd41-like protein
  misc_feature (3)..(483): Homolog of NCBI NO: 21594980 NR Description: chloroplast nucleoid DNA binding protein,
  misc_feature (3)..(483): Homolog of NCBI NO: 15223368 NR Description: chloroplast nucleoid DNA binding protein, putative
  misc_feature (1)..(334): Homolog of NCBI NO: 14532550 NR Description: AT3g61820/F15G16_210 [Arabidopsis thaliana]
  misc_feature (1)..(483): Homolog of NCBI NO: 15228618 NR Description: putative protein
MERKVLNTLAFSVFAVLFFTSSASSQYQTLVVNTLPSSATLSWPESESLTDESLSESTTSLSVHLSHVDALSSFSDASPADLFNLRLQRDSLRVKSITSLAAVSTGRNATKRTPRTAGGFSGAVISGLSQGSGEYFMRLGVGTPATNVYMVLDTGSDVVWLQCSPCKACYNQTDAIFDPKKSKTFATVPCGSRLCRRLDDSSECVTRRSKTCLYQVSYGDGSFTEGDFSTETLTFHGARVDHVPLGCGHDNEGLFVGAAGLLGLGRGGLSFPSQTKNRYNGKFSYCLVDRTSSGSSSKPPSTIVFGNAAVPKTSVFTPLLTNPKLDTFYYLQLLGISVGGSRVPGVSESQFKLDATGNGGVIIDSGTSVTRLTQPAYVALRDAFRLGATKLKRAPSYSLFDTCFDLSGMTTVKVPTVVFHFGGGEVSLPASNYLIPVNTEGRFCFAFAGTMGSLSIIGNIQQQGFRVAYDLVGSRVGFLSRAC

SEQ ID NO: 47517 - protein, 347 aa, Arabidopsis thaliana
  peptide (1)..(347): Ceres Seq. ID no. 12591711
  misc_feature (1)..(345): Pfam Name: Eukaryotic aspartyl protease Pfam Description: Eukaryotic aspartyl protease
  misc_feature (1)..(347): Homolog of NCBI NO: 28392860 NR Description: unknown protein [Arabidopsis thaliana]
  misc_feature (1)..(347): Homolog of NCBI NO: 34895664 NR Description: nucleoid DNA-binding protein cnd41-like protein
  misc_feature (1)..(347): Homolog of NCBI NO: 15229656 NR Description: putative chloroplast nucleoid DNA-binding protein
  misc_feature (1)..(347): Homolog of NCBI NO: 19424106 NR Description: putative chloroplast nucleoid DNA-binding protein
  misc_feature (1)..(347): Homolog of NCBI NO: 15222611 NR Description: hypothetical protein
  misc_feature (1)..(347): Homolog of NCBI NO: 15290061 NR Description: nucleoid DNA-binding protein cnd41-like protein
  misc_feature (1)..(347): Homolog of NCBI NO: 21594980 NR Description: chloroplast nucleoid DNA binding protein,
  misc_feature (1)..(347): Homolog of NCBI NO: 15223368 NR Description: chloroplast nucleoid DNA binding protein, putative
  misc_feature (1)..(198): Homolog of NCBI NO: 14532550 NR Description: AT3g61820/F15G16_210 [Arabidopsis thaliana]
  misc_feature (1)..(347): Homolog of NCBI NO: 15228618 NR Description: putative protein
MRLGVGTPATNVYMVLDTGSDVVWLQCSPCKACYNQTDAIFDPKKSKTFATVPCGSRLCRRLDDSSECVTRRSKTCLYQVSYGDGSFTEGDFSTETLTFHGARVDHVPLGCGHDNEGLFVGAAGLLGLGRGGLSFPSQTKNRYNGKFSYCLVDRTSSGSSSKPPSTIVFGNAAVPKTSVFTPLLTNPKLDTFYYLQLLGISVGGSRVPGVSESQFKLDATGNGGVIIDSGTSVTRLTQPAYVALRDAFRLGATKLKRAPSYSLFDTCFDLSGMTTVKVPTVVFHFGGGEVSLPASNYLIPVNTEGRFCFAFAGTMGSLSIIGNIQQQGFRVAYDLVGSRVGFLSRAC

SEQ ID NO: 47518 - protein, 334 aa, Arabidopsis thaliana
  peptide (1)..(334): Ceres Seq. ID no. 12591712
  misc_feature (1)..(332): Pfam Name: Eukaryotic aspartyl protease Pfam Description: Eukaryotic aspartyl protease
  misc_feature (1)..(334): Homolog of NCBI NO: 28392860 NR Description: unknown protein [Arabidopsis thaliana]
  misc_feature (1)..(334): Homolog of NCBI NO: 34895664 NR Description: nucleoid DNA-binding protein cnd41-like protein
  misc_feature (1)..(334): Homolog of NCBI NO: 15229656 NR Description: putative chloroplast nucleoid DNA-binding protein
  misc_feature (1)..(334): Homolog of NCBI NO: 19424106 NR Description: putative chloroplast nucleoid DNA-binding protein
  misc_feature (1)..(334): Homolog of NCBI NO: 15222611 NR Description: hypothetical protein
  misc_feature (1)..(334): Homolog of NCBI NO: 15290061 NR Description: nucleoid DNA-binding protein cnd41-like protein
  misc_feature (1)..(334): Homolog of NCBI NO: 21594980 NR Description: chloroplast nucleoid DNA binding protein,
  misc_feature (1)..(334): Homolog of NCBI NO: 15223368 NR Description: chloroplast nucleoid DNA binding protein, putative
  misc_feature (1)..(185): Homolog of NCBI NO: 14532550 NR Description: AT3g61820/F15G16_210 [Arabidopsis thaliana]
  misc_feature (1)..(334): Homolog of NCBI NO: 15228618 NR Description: putative protein
MVLDTGSDVVWLQCSPCKACYNQTDAIFDPKKSKTFATVPCGSRLCRRLDDSSECVTRRSKTCLYQVSYGDGSFTEGDFSTETLTFHGARVDHVPLGCGHDNEGLFVGAAGLLGLGRGGLSFPSQTKNRYNGKFSYCLVDRTSSGSSSKPPSTIVFGNAAVPKTSVFTPLLTNPKLDTFYYLQLLGISVGGSRVPGVSESQFKLDATGNGGVIIDSGTSVTRLTQPAYVALRDAFRLGATKLKRAPSYSLFDTCFDLSGMTTVKVPTVVFHFGGGEVSLPASNYLIPVNTEGRFCFAFAGTMGSLSIIGNIQQQGFRVAYDLVGSRVGFLSRAC

SEQ ID NO: 47519 - DNA, 1078 bp, Arabidopsis thaliana; identical to SEQ ID NO: 23066
  misc_feature (1)..(1078): Ceres Seq. ID no. 12639248
  misc_feature: MA Experiment ID: 108585 Result: Up-regulated in Transcription
  misc_feature: MA Experiment 108585 PARAMETER Experiment Name: At_5mM_NaNP_cDNA_P Parameter: Timepoint (hr) Value: 6
  misc_feature: MA Experiment 108585 PARAMETER Experiment Name: At_5mM_NaNP_cDNA_P Parameter: Tissue Value: Aerial
  misc_feature: MA Experiment 108585 PARAMETER Experiment Name: At_5mM_NaNP_cDNA_P Parameter: Treatment Value: null
  misc_feature: MA Experiment ID: 20000112 Result: Up-regulated in Transcription
  misc_feature: MA Experiment 20000112 PARAMETER Experiment Name: At_42deg_Heat_cDNA_P Parameter: Temperature (deg C) Value: 42 vs. 22
  misc_feature: MA Experiment 20000112 PARAMETER Experiment Name: At_42deg_Heat_cDNA_P Parameter: Timepoint (hr) Value: 2
  misc_feature: MA Experiment 20000112 PARAMETER Experiment Name: At_42deg_Heat_cDNA_P Parameter: Tissue Value: Aerial
  misc_feature: MA Experiment ID: 20000113 Result: Up-regulated in Transcription
  misc_feature: MA Experiment 20000113 PARAMETER Experiment Name: At_42deg_Heat_cDNA_P Parameter: Temperature (deg C) Value: 42 vs. 22
  misc_feature: MA Experiment 20000113 PARAMETER Experiment Name: At_42deg_Heat_cDNA_P Parameter: Timepoint (hr) Value: 8
  misc_feature: MA Experiment 20000113 PARAMETER Experiment Name: At_42deg_Heat_cDNA_P Parameter: Tissue Value: Aerial
  misc_feature: MA Experiment ID: 20000173 Result: Up-regulated in Transcription
  misc_feature: MA Experiment 20000173 PARAMETER Experiment Name: At_42deg_Heat_P Parameter: Age (day) Value: 14
  misc_feature: MA Experiment 20000173 PARAMETER Experiment Name: At_42deg_Heat_P Parameter: Organism Value: A. thaliana
  misc_feature: MA Experiment 20000173 PARAMETER Experiment Name: At_42deg_Heat_P Parameter: Plant Line Value: WS
  misc_feature: MA Experiment 20000173 PARAMETER Experiment Name: At_42deg_Heat_P Parameter: Temperature (deg C) Value: 42 vs. 22
  misc_feature: MA Experiment 20000173 PARAMETER Experiment Name: At_42deg_Heat_P Parameter: Timepoint (hr) Value: 6
  misc_feature: MA Experiment 20000173 PARAMETER Experiment Name: At_42deg_Heat_P Parameter: Tissue Value: Aerial
  misc_feature: MA Experiment ID: 20000182 Result: Up-regulated in Transcription
  misc_feature: MA Experiment 20000182 PARAMETER Experiment Name: At_2mM_SA_P Parameter: Age (day) Value: 14
  misc_feature: MA Experiment 20000182 PARAMETER Experiment Name: At_2mM_SA_P Parameter: Organism Value: A. thaliana
  misc_feature: MA Experiment 20000182 PARAMETER Experiment Name: At_2mM_SA_P Parameter: Plant Line Value: WS
  misc_feature: MA Experiment 20000182 PARAMETER Experiment Name: At_2mM_SA_P Parameter: Timepoint (hr) Value: 6
  misc_feature: MA Experiment 20000182 PARAMETER Experiment Name: At_2mM_SA_P Parameter: Tissue Value: Aerial
  misc_feature: MA Experiment 20000182 PARAMETER Experiment Name: At_2mM_SA_P Parameter: Treatment Value: 2mM SA vs. No Treatment
  misc_feature: MA Experiment ID: 20000439 Result: Down-regulated in Transcription
  misc_feature: MA Experiment 20000439 PARAMETER Experiment Name: At_Roots__P Parameter: Age (day) Value: 14 vs. 21
  misc_feature: MA Experiment 20000439 PARAMETER Experiment Name: At_Roots__P Parameter: Organism Value: A. thaliana
  misc_feature: MA Experiment 20000439 PARAMETER Experiment Name: At_Roots__P Parameter: Tissue Value: Roots vs. Whole Plant
  misc_feature: MA Experiment ID: 20001247 Result: Up-regulated in Transcription
  misc_feature: MA Experiment 20001247 PARAMETER Experiment Name: At_Far-red-induction_P Parameter: Age (day) Value: 7
  misc_feature: MA Experiment 20001247 PARAMETER Experiment Name: At_Far-red-induction_P Parameter: Light Value: Far-red vs. White
  misc_feature: MA Experiment 20001247 PARAMETER Experiment Name: At_Far-red-induction_P Parameter: Organism Value: A. thaliana
  misc_feature: MA Experiment 20001247 PARAMETER Experiment Name: At_Far-red-induction_P Parameter: Plant Line Value: Columbia
  misc_feature: MA Experiment 20001247 PARAMETER Experiment Name: At_Far-red-induction_P Parameter: Timepoint (hr) Value: 1
  misc_feature: MA Experiment 20001247 PARAMETER Experiment Name: At_Far-red-induction_P Parameter: Tissue Value: Whole Plant

SEQ ID NO: 47520 - protein, 217 aa, Arabidopsis thaliana; identical to SEQ ID NO: 23067
  peptide (1)..(217): Ceres Seq. ID no. 12639249
  misc_feature (11)..(212): Pfam Name: Drought induced 19 protein (Di19) Pfam Description: Drought induced 19 protein (Di19)
  misc_feature (11)..(212): Pfam Name: Drought induced 19 protein (Di19) Pfam Description: Drought induced 19 protein (Di19)
  misc_feature (16)..(217): Homolog of NCBI NO: 15235270 NR Description: drought-induced-19-like 1
  misc_feature (23)..(215): Homolog of NCBI NO: 15028023 NR Description: unknown protein [Arabidopsis thaliana]
  misc_feature (23)..(215): Homolog of NCBI NO: 30696095 NR Description: drought-induced protein -related [Arabidopsis
  misc_feature (16)..(215): Homolog of NCBI NO: 28393233 NR Description: unknown protein [Arabidopsis thaliana]
  misc_feature (16)..(215): Homolog of NCBI NO: 15240426 NR Description: drought-induced protein - like; protein id:
  misc_feature (16)..(217): Homolog of NCBI NO: 15235270 NR Description: drought-induced-19-like 1
  misc_feature (23)..(215): Homolog of NCBI NO: 30696095 NR Description: drought-induced protein -related [Arabidopsis
  misc_feature (16)..(215): Homolog of NCBI NO: 15240426 NR Description: drought-induced protein - like; protein id:
  misc_feature (1)..(217): Homolog of NCBI NO: 15230782 NR Description: unknown protein; protein id: At3g06760.1
  misc_feature (1)..(217): Homolog of NCBI NO: 18377875 NR Description: AT3g06760/F3E22_10 [Arabidopsis thaliana]
  misc_feature (1)..(217): Homolog of NCBI NO: 15239827 NR Description: drought-induced protein Di19-like protein
  misc_feature (1)..(217): Homolog of NCBI NO: 13937216 NR Description: AT5g49230/K21P3_11 [Arabidopsis thaliana]
  misc_feature (16)..(215): Homolog of NCBI NO: 25992529 NR Description: fiber protein Fb2 [Gossypium barbadense]
  misc_feature (16)..(215): Homolog of NCBI NO: 28393233 NR Description: unknown protein [Arabidopsis thaliana]
  misc_feature (23)..(215): Homolog of NCBI NO: 15028023 NR Description: unknown protein [Arabidopsis thaliana]
  misc_feature (16)..(215): Homolog of NCBI NO: 25992529 NR Description: fiber protein Fb2 [Gossypium barbadense]
  misc_feature (1)..(217): Homolog of NCBI NO: 13937216 NR Description: AT5g49230/K21P3_11 [Arabidopsis thaliana]
  misc_feature (1)..(217): Homolog of NCBI NO: 15239827 NR Description: drought-induced protein Di19-like protein
  misc_feature (1)..(217): Homolog of NCBI NO: 18377875 NR Description: AT3g06760/F3E22_10 [Arabidopsis thaliana]
  misc_feature (1)..(217): Homolog of NCBI NO: 15230782 NR Description: unknown protein; protein id: At3g06760.1

SEQ ID NO: 47521 - protein, 111 aa, Arabidopsis thaliana; identical to SEQ ID NO: 23068
  peptide (1)..(111): Ceres Seq. ID no. 12639250

SEQ ID NO: 47522 - DNA, 2009 bp, Arabidopsis thaliana; identical to SEQ ID NO: 46724
  misc_feature (1)..(2009): Ceres Seq. ID no. 13591952
  misc_feature: MA Experiment ID: 20000234 Result: Up-regulated in Transcription
  misc_feature: MA Experiment 20000234 PARAMETER Experiment Name: At_Siliques_P Parameter: Age (day) Value: 21
  misc_feature: MA Experiment 20000234 PARAMETER Experiment Name: At_Siliques_P Parameter: Organism Value: A. thaliana
  misc_feature: MA Experiment 20000234 PARAMETER Experiment Name: At_Siliques_P Parameter: Plant Line Value: WS
  misc_feature: MA Experiment 20000234 PARAMETER Experiment Name: At_Siliques_P Parameter: Tissue Value: Less Than 5mm Siliques vs. Whole Plant
  misc_feature: MA Experiment ID: 20000235 Result: Up-regulated in Transcription
  misc_feature: MA Experiment 20000235 PARAMETER Experiment Name: At_Siliques_P Parameter: Age (day) Value: 21
  misc_feature: MA Experiment 20000235 PARAMETER Experiment Name: At_Siliques_P Parameter: Organism Value: A. thaliana
  misc_feature: MA Experiment 20000235 PARAMETER Experiment Name: At_Siliques_P Parameter: Plant Line Value: WS
  misc_feature: MA Experiment 20000235 PARAMETER Experiment Name: At_Siliques_P Parameter: Tissue Value: 5-10mm Siliques vs. Whole Plant
  misc_feature: MA Experiment ID: 20000264 Result: Up-regulated in Transcription
  misc_feature: MA Experiment 20000264 PARAMETER Experiment Name: At_Open_Flower_P Parameter: Age (day) Value: 21
  misc_feature: MA Experiment 20000264 PARAMETER Experiment Name: At_Open_Flower_P Parameter: Plant Line Value: WS
  misc_feature: MA Experiment 20000264 PARAMETER Experiment Name: At_Open_Flower_P Parameter: Tissue Value: Open Flower vs. Whole Plant
  misc_feature: MA Experiment ID: 20000286 Result: Up-regulated in Transcription
  misc_feature: MA Experiment 20000286 PARAMETER Experiment Name: At_Open_Flower_P Parameter: Age (day) Value: 21
  misc_feature: MA Experiment 20000286 PARAMETER Experiment Name: At_Open_Flower_P Parameter: Plant Line Value: WS
  misc_feature: MA Experiment 20000286 PARAMETER Experiment Name: At_Open_Flower_P Parameter: Tissue Value: Half Open vs. Whole Plant
  misc_feature: MA Experiment ID: 20000437 Result: Down-regulated in Transcription
  misc_feature: MA Experiment 20000437 PARAMETER Experiment Name: At_Drought_P Parameter: Age (day) Value: 8
  misc_feature: MA Experiment 20000437 PARAMETER Experiment Name: At_Drought_P Parameter: Organism Value: A. thaliana
  misc_feature: MA Experiment 20000437 PARAMETER Experiment Name: At_Drought_P Parameter: Plant Line Value: WS
  misc_feature: MA Experiment 20000437 PARAMETER Experiment Name: At_Drought_P Parameter: Timepoint (hr) Value: 24
  misc_feature: MA Experiment 20000437 PARAMETER Experiment Name: At_Drought_P Parameter: Tissue Value: Whole Plant
  misc_feature: MA Experiment 20000437 PARAMETER Experiment Name: At_Drought_P Parameter: Treatment Value: Drought vs. No Drought
  misc_feature: MA Experiment ID: 20000439 Result: Up-regulated in Transcription
  misc_feature: MA Experiment 20000439 PARAMETER Experiment Name: At_Roots__P Parameter: Age (day) Value: 14 vs. 21
  misc_feature: MA Experiment 20000439 PARAMETER Experiment Name: At_Roots__P Parameter: Organism Value: A. thaliana
  misc_feature: MA Experiment 20000439 PARAMETER Experiment Name: At_Roots__P Parameter: Tissue Value: Roots vs. Whole Plant
  misc_feature: MA Experiment ID: 20000453 Result: Down-regulated in Transcription
  misc_feature: MA Experiment 20000453 PARAMETER Experiment Name: At_100uM_ABA_P Parameter: Age (day) Value: 15
  misc_feature: MA Experiment 20000453 PARAMETER Experiment Name: At_100uM_ABA_P Parameter: Organism Value: A. thaliana
  misc_feature: MA Experiment 20000453 PARAMETER Experiment Name: At_100uM_ABA_P Parameter: Plant Line Value: WS
  misc_feature: MA Experiment 20000453 PARAMETER Experiment Name: At_100uM_ABA_P Parameter: Timepoint (hr) Value: 24
  misc_feature: MA Experiment 20000453 PARAMETER Experiment Name: At_100uM_ABA_P Parameter: Tissue Value: Aerial
  misc_feature: MA Experiment 20000453 PARAMETER Experiment Name: At_100uM_ABA_P Parameter: Treatment Value: 100uM ABA vs. No Treatment
  misc_feature: MA Experiment ID: 20001450 Result: Down-regulated in Transcription
  misc_feature: MA Experiment 20001450 PARAMETER Experiment Name: At_Far-red-induction_P Parameter: Age (day) Value: 7
  misc_feature: MA Experiment 20001450 PARAMETER Experiment Name: At_Far-red-induction_P Parameter: Light Value: Far-red vs. White
  misc_feature: MA Experiment 20001450 PARAMETER Experiment Name: At_Far-red-induction_P Parameter: Organism Value: A. thaliana
  misc_feature: MA Experiment 20001450 PARAMETER Experiment Name: At_Far-red-induction_P Parameter: Plant Line Value: Columbia
  misc_feature: MA Experiment 20001450 PARAMETER Experiment Name: At_Far-red-induction_P Parameter: Timepoint (hr) Value: 8
  misc_feature: MA Experiment 20001450 PARAMETER Experiment Name: At_Far-red-induction_P Parameter: Tissue Value: Whole Plant
  misc_feature: MA Experiment ID: 20001451 Result: Down-regulated in Transcription
  misc_feature: MA Experiment 20001451 PARAMETER Experiment Name: At_Far-red-induction_P Parameter: Age (day) Value: 7
  misc_feature: MA Experiment 20001451 PARAMETER Experiment Name: At_Far-red-induction_P Parameter: Light Value: Far-red vs. White
  misc_feature: MA Experiment 20001451 PARAMETER Experiment Name: At_Far-red-induction_P Parameter: Organism Value: A. thaliana
  misc_feature: MA Experiment 20001451 PARAMETER Experiment Name: At_Far-red-induction_P Parameter: Plant Line Value: Columbia
  misc_feature: MA Experiment 20001451 PARAMETER Experiment Name: At_Far-red-induction_P Parameter: Timepoint (hr) Value: 24
  misc_feature: MA Experiment 20001451 PARAMETER Experiment Name: At_Far-red-induction_P Parameter: Tissue Value: Whole Plant
  misc_feature: MA Experiment ID: 20001557 Result: Up-regulated in Transcription
  misc_feature: MA Experiment 20001557 PARAMETER Experiment Name: At_Drought_Soil_Dry_P Parameter: Age (day) Value: 27
  misc_feature: MA Experiment 20001557 PARAMETER Experiment Name: At_Drought_Soil_Dry_P Parameter: Organism Value: A. thaliana
  misc_feature: MA Experiment 20001557 PARAMETER Experiment Name: At_Drought_Soil_Dry_P Parameter: Plant Line Value: WS
  misc_feature: MA Experiment 20001557 PARAMETER Experiment Name: At_Drought_Soil_Dry_P Parameter: Post Timepoint (hr) Value: 3
  misc_feature: MA Experiment 20001557 PARAMETER Experiment Name: At_Drought_Soil_Dry_P Parameter: Post-Treatment Value: Re-Water vs. No Drought
  misc_feature: MA Experiment 20001557 PARAMETER Experiment Name: At_Drought_Soil_Dry_P Parameter: Timepoint (day) Value: 13
  misc_feature: MA Experiment 20001557 PARAMETER Experiment Name: At_Drought_Soil_Dry_P Parameter: Treatment Value: Drought vs. No Drought
  misc_feature: MA Experiment ID: 20001558 Result: Up-regulated in Transcription
  misc_feature: MA Experiment 20001558 PARAMETER Experiment Name: At_Drought_Soil_Dry_P Parameter: Age (day) Value: 27
  misc_feature: MA Experiment 20001558 PARAMETER Experiment Name: At_Drought_Soil_Dry_P Parameter: Organism Value: A. thaliana
  misc_feature: MA Experiment 20001558 PARAMETER Experiment Name: At_Drought_Soil_Dry_P Parameter: Plant Line Value: WS
  misc_feature: MA Experiment 20001558 PARAMETER Experiment Name: At_Drought_Soil_Dry_P Parameter: Post Timepoint (hr) Value: 6
  misc_feature: MA Experiment 20001558 PARAMETER Experiment Name: At_Drought_Soil_Dry_P Parameter: Post-Treatment Value: Re-Water vs. No Drought
  misc_feature: MA Experiment 20001558 PARAMETER Experiment Name: At_Drought_Soil_Dry_P Parameter: Timepoint (day) Value: 13
  misc_feature: MA Experiment 20001558 PARAMETER Experiment Name: At_Drought_Soil_Dry_P Parameter: Treatment Value: Drought vs. No Drought

SEQ ID NO: 47523 - protein, 593 aa, Arabidopsis thaliana; identical to SEQ ID NO: 46725
  peptide (1)..(593): Ceres Seq. ID no. 13591953
  misc_feature (208)..(531): Pfam Name: Asparagine synthase Pfam Description: Asparagine synthase
  misc_feature (208)..(531): Pfam Name: Asparagine synthase Pfam Description: Asparagine synthase
  misc_feature (16)..(573): Homolog of NCBI NO: 39939080 NR Description: asparagine synthase [Onion yellows phytoplasma]
  misc_feature (16)..(569): Homolog of NCBI NO: 26246639 NR Description: Asparagine synthetase B
  misc_feature (16)..(572): Homolog of NCBI NO: 13925886 NR Description: glutamine-dependent asparagine synthetase 1
  misc_feature (16)..(585): Homolog of NCBI NO: 3821280 NR Description: asparagine synthetase type II [Phaseolus vulgaris]
  misc_feature (16)..(579): Homolog of NCBI NO: 22208544 NR Description: asparagine synthetase 2 [Striga hermonthica]
  misc_feature (16)..(573): Homolog of NCBI NO: 39939080 NR Description: asparagine synthase [Onion yellows phytoplasma]
  misc_feature (16)..(572): Homolog of NCBI NO: 13925886 NR Description: glutamine-dependent asparagine synthetase 1
  misc_feature (16)..(579): Homolog of NCBI NO: 22208544 NR Description: asparagine synthetase 2 [Striga hermonthica]
  misc_feature (16)..(573): Homolog of NCBI NO: 30698086 NR Description: asparagine synthetase (gb|AAC72837.1)
  misc_feature (16)..(573): Homolog of NCBI NO: 3859536 NR Description: asparagine synthetase [Arabidopsis thaliana]
  misc_feature (16)..(573): Homolog of NCBI NO: 30698088 NR Description: asparagine synthetase (gb|AAC72837.1)
  misc_feature (16)..(577): Homolog of NCBI NO: 3182921 NR Description: Asparagine synthetase
  misc_feature (16)..(573): Homolog of NCBI NO: 6049843 NR Description: asparagine synthetase [Helianthus annuus]
  misc_feature (16)..(585): Homolog of NCBI NO: 3821280 NR Description: asparagine synthetase type II [Phaseolus vulgaris]
  misc_feature (16)..(569): Homolog of NCBI NO: 26246639 NR Description: Asparagine synthetase B
  misc_feature (16)..(573): Homolog of NCBI NO: 6049843 NR Description: asparagine synthetase [Helianthus annuus]
  misc_feature (16)..(577): Homolog of NCBI NO: 3182921 NR Description: Asparagine synthetase
  misc_feature (16)..(573): Homolog of NCBI NO: 30698088 NR Description: asparagine synthetase (gb|AAC72837.1)
  misc_feature (16)..(573): Homolog of NCBI NO: 3859536 NR Description: asparagine synthetase [Arabidopsis thaliana]
  misc_feature (16)..(573): Homolog of NCBI NO: 30698086 NR Description: asparagine synthetase (gb|AAC72837.1)

SEQ ID NO: 47524 - protein, 578 aa, Arabidopsis thaliana; identical to SEQ ID NO: 46726
  peptide (1)..(578): Ceres Seq. ID no. 13591954
  misc_feature (193)..(516): Pfam Name: Asparagine synthase Pfam Description: Asparagine synthase
  misc_feature (193)..(516): Pfam Name: Asparagine synthase Pfam Description: Asparagine synthase
  misc_feature (1)..(558): Homolog of NCBI NO: 39939080 NR Description: asparagine synthase [Onion yellows phytoplasma]
  misc_feature (1)..(554): Homolog of NCBI NO: 26246639 NR Description: Asparagine synthetase B
  misc_feature (1)..(557): Homolog of NCBI NO: 13925886 NR Description: glutamine-dependent asparagine synthetase 1
  misc_feature (1)..(570): Homolog of NCBI NO: 3821280 NR Description: asparagine synthetase type II [Phaseolus vulgaris]
  misc_feature (1)..(564): Homolog of NCBI NO: 22208544 NR Description: asparagine synthetase 2 [Striga hermonthica]
  misc_feature (1)..(558): Homolog of NCBI NO: 39939080 NR Description: asparagine synthase [Onion yellows phytoplasma]
  misc_feature (1)..(557): Homolog of NCBI NO: 13925886 NR Description: glutamine-dependent asparagine synthetase 1
  misc_feature (1)..(564): Homolog of NCBI NO: 22208544 NR Description: asparagine synthetase 2 [Striga hermonthica]
  misc_feature (1)..(558): Homolog of NCBI NO: 30698086 NR Description: asparagine synthetase (gb|AAC72837.1)
  misc_feature (1)..(558): Homolog of NCBI NO: 3859536 NR Description: asparagine synthetase [Arabidopsis thaliana]
  misc_feature (1)..(558): Homolog of NCBI NO: 30698088 NR Description: asparagine synthetase (gb|AAC72837.1)
  misc_feature (1)..(562): Homolog of NCBI NO: 3182921 NR Description: Asparagine synthetase
  misc_feature (1)..(558): Homolog of NCBI NO: 6049843 NR Description: asparagine synthetase [Helianthus annuus]
  misc_feature (1)..(570): Homolog of NCBI NO: 3821280 NR Description: asparagine synthetase type II [Phaseolus vulgaris]
  misc_feature (1)..(554): Homolog of NCBI NO: 26246639 NR Description: Asparagine synthetase B
  misc_feature (1)..(558): Homolog of NCBI NO: 6049843 NR Description: asparagine synthetase [Helianthus annuus]
  misc_feature (1)..(562): Homolog of NCBI NO: 3182921 NR Description: Asparagine synthetase
  misc_feature (1)..(558): Homolog of NCBI NO: 30698088 NR Description: asparagine synthetase (gb|AAC72837.1)
  misc_feature (1)..(558): Homolog of NCBI NO: 3859536 NR Description: asparagine synthetase [Arabidopsis thaliana]
  misc_feature (1)..(558): Homolog of NCBI NO: 30698086 NR Description: asparagine synthetase (gb|AAC72837.1)

SEQ ID NO: 47525 - protein, 463 aa, Arabidopsis thaliana; identical to SEQ ID NO: 46727
  peptide (1)..(463): Ceres Seq. ID no. 13591955
  misc_feature (78)..(401): Pfam Name: Asparagine synthase Pfam Description: Asparagine synthase
  misc_feature (78)..(401): Pfam Name: Asparagine synthase Pfam Description: Asparagine synthase
  misc_feature (1)..(443): Homolog of NCBI NO: 39939080 NR Description: asparagine synthase [Onion yellows phytoplasma]
  misc_feature (1)..(439): Homolog of NCBI NO: 26246639 NR Description: Asparagine synthetase B
  misc_feature (1)..(442): Homolog of NCBI NO: 13925886 NR Description: glutamine-dependent asparagine synthetase 1
  misc_feature (1)..(455): Homolog of NCBI NO: 3821280 NR Description: asparagine synthetase type II [Phaseolus vulgaris]
  misc_feature (1)..(449): Homolog of NCBI NO: 22208544 NR Description: asparagine synthetase 2 [Striga hermonthica]
  misc_feature (1)..(443): Homolog of NCBI NO: 39939080 NR Description: asparagine synthase [Onion yellows phytoplasma]
  misc_feature (1)..(442): Homolog of NCBI NO: 13925886 NR Description: glutamine-dependent asparagine synthetase 1
  misc_feature (1)..(449): Homolog of NCBI NO: 22208544 NR Description: asparagine synthetase 2 [Striga hermonthica]
  misc_feature (1)..(443): Homolog of NCBI NO: 30698086 NR Description: asparagine synthetase (gb|AAC72837.1)
  misc_feature (1)..(443): Homolog of NCBI NO: 3859536 NR Description: asparagine synthetase [Arabidopsis thaliana]
  misc_feature (1)..(443): Homolog of NCBI NO: 30698088 NR Description: asparagine synthetase (gb|AAC72837.1)
  misc_feature (1)..(447): Homolog of NCBI NO: 3182921 NR Description: Asparagine synthetase
  misc_feature (1)..(443): Homolog of NCBI NO: 6049843 NR Description: asparagine synthetase [Helianthus annuus]
  misc_feature (1)..(455): Homolog of NCBI NO: 3821280 NR Description: asparagine synthetase type II [Phaseolus vulgaris]
  misc_feature (1)..(439): Homolog of NCBI NO: 26246639 NR Description: Asparagine synthetase B
  misc_feature (1)..(443): Homolog of NCBI NO: 6049843 NR Description: asparagine synthetase [Helianthus annuus]
  misc_feature (1)..(447): Homolog of NCBI NO: 3182921 NR Description: Asparagine synthetase
  misc_feature (1)..(443): Homolog of NCBI NO: 30698088 NR Description: asparagine synthetase (gb|AAC72837.1)
  misc_feature (1)..(443): Homolog of NCBI NO: 3859536 NR Description: asparagine synthetase [Arabidopsis thaliana]
  misc_feature (1)..(443): Homolog of NCBI NO: 30698086 NR Description: asparagine synthetase (gb|AAC72837.1)

SEQ ID NO: 47526 - DNA, 2003 bp, Arabidopsis thaliana; identical to SEQ ID NO: 46166
  misc_feature (1)..(2003): Ceres Seq. ID no. 13592058
  misc_feature: MA Experiment ID: 20000173 Result: Down-regulated in Transcription
  misc_feature: MA Experiment 20000173 PARAMETER Experiment Name: At_42deg_Heat_P Parameter: Age (day) Value: 14
  misc_feature: MA Experiment 20000173 PARAMETER Experiment Name: At_42deg_Heat_P Parameter: Organism Value: A. thaliana
  misc_feature: MA Experiment 20000173 PARAMETER Experiment Name: At_42deg_Heat_P Parameter: Plant Line Value: WS
  misc_feature: MA Experiment 20000173 PARAMETER Experiment Name: At_42deg_Heat_P Parameter: Temperature (deg C) Value: 42 vs. 22
  misc_feature: MA Experiment 20000173 PARAMETER Experiment Name: At_42deg_Heat_P Parameter: Timepoint (hr) Value: 6
  misc_feature: MA Experiment 20000173 PARAMETER Experiment Name: At_42deg_Heat_P Parameter: Tissue Value: Aerial
  misc_feature: MA Experiment ID: 20000182 Result: Up-regulated in Transcription
  misc_feature: MA Experiment 20000182 PARAMETER Experiment Name: At_2mM_SA_P Parameter: Age (day) Value: 14
  misc_feature: MA Experiment 20000182 PARAMETER Experiment Name: At_2mM_SA_P Parameter: Organism Value: A. thaliana
  misc_feature: MA Experiment 20000182 PARAMETER Experiment Name: At_2mM_SA_P Parameter: Plant Line Value: WS
  misc_feature: MA Experiment 20000182 PARAMETER Experiment Name: At_2mM_SA_P Parameter: Timepoint (hr) Value: 6
  misc_feature: MA Experiment 20000182 PARAMETER Experiment Name: At_2mM_SA_P Parameter: Tissue Value: Aerial
  misc_feature: MA Experiment 20000182 PARAMETER Experiment Name: At_2mM_SA_P Parameter: Treatment Value: 2mM SA vs. No Treatment
  misc_feature: MA Experiment ID: 20000184 Result: Down-regulated in Transcription
  misc_feature: MA Experiment 20000184 PARAMETER Experiment Name: At_Shoots__P Parameter: Age (day) Value: 7
  misc_feature: MA Experiment 20000184 PARAMETER Experiment Name: At_Shoots__P Parameter: Tissue Value: Shoots vs. Whole Plant
  misc_feature: MA Experiment ID: 20001904 Result: Down-regulated in Transcription
  misc_feature: MA Experiment 20001904 PARAMETER Experiment Name: At_Drought_Reproduction_P Parameter: Age (day) Value: 37
  misc_feature: MA Experiment 20001904 PARAMETER Experiment Name: At_Drought_Reproduction_P Parameter: Organism Value: A. thaliana
  misc_feature: MA Experiment 20001904 PARAMETER Experiment Name: At_Drought_Reproduction_P Parameter: Plant Line Value: WS
  misc_feature: MA Experiment 20001904 PARAMETER Experiment Name: At_Drought_Reproduction_P Parameter: Timepoint (day) Value: 7
  misc_feature: MA Experiment 20001904 PARAMETER Experiment Name: At_Drought_Reproduction_P Parameter: Tissue Value: Rosettes
  misc_feature: MA Experiment 20001904 PARAMETER Experiment Name: At_Drought_Reproduction_P Parameter: Treatment Value: Drought vs. No Drought
  misc_feature: MA Experiment ID: 20001905 Result: Down-regulated in Transcription
  misc_feature: MA Experiment 20001905 PARAMETER Experiment Name: At_Drought_Reproduction_P Parameter: Age (day) Value: 40
  misc_feature: MA Experiment 20001905 PARAMETER Experiment Name: At_Drought_Reproduction_P Parameter: Organism Value: A. thaliana
  misc_feature: MA Experiment 20001905 PARAMETER Experiment Name: At_Drought_Reproduction_P Parameter: Plant Line Value: WS
  misc_feature: MA Experiment 20001905 PARAMETER Experiment Name: At_Drought_Reproduction_P Parameter: Timepoint (day) Value: 10
  misc_feature: MA Experiment 20001905 PARAMETER Experiment Name: At_Drought_Reproduction_P Parameter: Tissue Value: Rosettes
  misc_feature: MA Experiment 20001905 PARAMETER Experiment Name: At_Drought_Reproduction_P Parameter: Treatment Value: Drought vs. No Drought
  misc_feature: MA Experiment ID: 20001911 Result: Down-regulated in Transcription
  misc_feature: MA Experiment 20001911 PARAMETER Experiment Name: At_Drought_Reproduction_P Parameter: Age (day) Value: 40
  misc_feature: MA Experiment 20001911 PARAMETER Experiment Name: At_Drought_Reproduction_P Parameter: Organism Value: A. thaliana
  misc_feature: MA Experiment 20001911 PARAMETER Experiment Name: At_Drought_Reproduction_P Parameter: Plant Line Value: WS
  misc_feature: MA Experiment 20001911 PARAMETER Experiment Name: At_Drought_Reproduction_P Parameter: Timepoint (day) Value: 10
  misc_feature: MA Experiment 20001911 PARAMETER Experiment Name: At_Drought_Reproduction_P Parameter: Tissue Value: Flowers
  misc_feature: MA Experiment 20001911 PARAMETER Experiment Name: At_Drought_Reproduction_P Parameter: Treatment Value: Drought vs. No Drought

SEQ ID NO: 47527 - protein, 556 aa, Arabidopsis thaliana; identical to SEQ ID NO: 46167
  peptide (1)..(556): Ceres Seq. ID no. 13592059
  misc_feature (97)..(355): Pfam Name: Protein kinase domain Pfam Description: Protein kinase domain
  misc_feature (97)..(355): Pfam Name: Protein kinase domain Pfam Description: Protein kinase domain
  misc_feature (1)..(555): Homolog of NCBI NO: 30679935 NR Description: calcium-dependent protein kinase (CDPK)(CPK6)
  misc_feature (1)..(555): Homolog of NCBI NO: 30679935 NR Description: calcium-dependent protein kinase (CDPK)(CPK6)
  misc_feature (1)..(556): Homolog of NCBI NO: 15236966 NR Description: calcium-dependent protein kinase, putative (CDPK)
  misc_feature (1)..(556): Homolog of NCBI NO: 15236966 NR Description: calcium-dependent protein kinase, putative (CDPK)

SEQ ID NO: 47528 - protein, 483 aa, Arabidopsis thaliana; identical to SEQ ID NO: 46168
  peptide (1)..(483): Ceres Seq. ID no. 13592060
  misc_feature (24)..(282): Pfam Name: Protein kinase domain Pfam Description: Protein kinase domain
  misc_feature (24)..(282): Pfam Name: Protein kinase domain Pfam Description: Protein kinase domain
  misc_feature (1)..(482): Homolog of NCBI NO: 30679935 NR Description: calcium-dependent protein kinase (CDPK)(CPK6)
  misc_feature (1)..(482): Homolog of NCBI NO: 30679935 NR Description: calcium-dependent protein kinase (CDPK)(CPK6)
  misc_feature (1)..(483): Homolog of NCBI NO: 15236966 NR Description: calcium-dependent protein kinase, putative (CDPK)
  misc_feature (1)..(483): Homolog of NCBI NO: 15236966 NR Description: calcium-dependent protein kinase, putative (CDPK)

SEQ ID NO: 47529 - protein, 408 aa, Arabidopsis thaliana; identical to SEQ ID NO: 46169
  peptide (1)..(408): Ceres Seq. ID no. 13592061
  misc_feature (1)..(207): Pfam Name: Protein kinase domain Pfam Description: Protein kinase domain
  misc_feature (1)..(207): Pfam Name: Protein kinase domain Pfam Description: Protein kinase domain
  misc_feature (1)..(407): Homolog of NCBI NO: 30679935 NR Description: calcium-dependent protein kinase (CDPK)(CPK6)
  misc_feature (1)..(407): Homolog of NCBI NO: 30679935 NR Description: calcium-dependent protein kinase (CDPK)(CPK6)
  misc_feature (1)..(408): Homolog of NCBI NO: 15236966 NR Description: calcium-dependent protein kinase, putative (CDPK)
  misc_feature (1)..(408): Homolog of NCBI NO: 15236966 NR Description: calcium-dependent protein kinase, putative (CDPK)

SEQ ID NO: 47530 - DNA, 1173 bp, Arabidopsis thaliana
  misc_feature (1)..(1173): Ceres Seq. ID no. 12602042
  misc_feature: MA Experiment ID: 108569 Result: Down-regulated in Transcription
  misc_feature: MA Experiment 108569 PARAMETER Experiment Name: At_0.001%_MeJA__cDNA_P Parameter: Timepoint (hr) Value: 6
  misc_feature: MA Experiment 108569 PARAMETER Experiment Name: At_0.001%_MeJA__cDNA_P Parameter: Tissue Value: Aerial
  misc_feature: MA Experiment 108569 PARAMETER Experiment Name: At_0.001%_MeJA__cDNA_P Parameter: Treatment Value: 0.001% MeJA vs. No Treatment
cttcagaacagaaaggcaaatttctcaaaggaagcgaagccctagcgtcctctctctgtcttctcgtttctgcgccgattcgtagtctgttgtgcgcttgcctctcctcttttggattagcatacctctcactcgcatcagatgcacttttggttatcctcataccaaaatgcagattttcagttgctttttctatccaaatggactgcaagaagttcatccagatggtcgaggagaagaaacgaagagttcttgagaagcaagaagctcctttgaaatgggagcagaagctagaggcggctgcgaatgccaaagcagacacagaaactaaagtgaagagatcaaagggccctaagagaaaacaaagggctgcgtctgaatctagctcagaaagtgatagtagctctgaggtgagaagaaagtctagaagatctcacaataagcaccgaagacatgcacactctgattcagatgacagtgataggaggaaagagaagaaatccaggaggcagaaaagaaggtccttgagtccaagcgatgatagcactggtgattatgaaagtgggtcagaggatgagctgaggatgaagataaagcaccatcggaggcacaagtggcatagctcaagaaagacttgcgatgatgacagtaccgaagatgtgagaagaaaacatttaaagcatcacaggcgcagtgaggtggtcacttcaagtgatagtgaggaagagagtggaagaagaaggcgaggcaaatatcacaggcacaacagaggttcagcctcctcgagtggctcggaagaagatagtgggaaaagtatgaagagaaggcaacataaaaggcatcgtttggctgagtcttcaagtgaggaagatggggcaatgagaaggactaggcatcataaacatggcagagattcagcatctgagtctgatggaagaaggtaatcagatgagaaaagagagcactacttcgacaaatgaaaatggaaaatgtctttgtttaattcacatcataagaactgaatcttgtggtaaaccatcagcacatgattactacccagatgttgggacccaaatacgatgaatattgtgttgaattactatggtggcactctgttcttagattttcatttttacatttgtagcaagaatggtacacaaccaattgaactct

SEQ ID NO: 47531 - protein, 313 aa, Arabidopsis thaliana
  peptide (1)..(313): Ceres Seq. ID no. 12602043
  misc_feature (74)..(313): Pfam Name: Granin (chromogranin or secretogranin) Pfam Description: Granin (chromogranin or secretogranin)
  misc_feature (84)..(313): Homolog of NCBI NO: 39589507 NR Description: Hypothetical protein CBG22293 [Caenorhabditis
  misc_feature (77)..(313): Homolog of NCBI NO: 24580684 NR Description: CG2839-PA [Drosophila melanogaster]
  misc_feature (78)..(313): Homolog of NCBI NO: 17509687 NR Description: Human XNP gene related XNP-1 (156.2 kD) (xnp-1)
  misc_feature (78)..(313): Homolog of NCBI NO: 17367114 NR Description: Transcriptional regulator ATRX homolog (X-linked
  misc_feature (73)..(281): Homolog of NCBI NO: 21618036 NR Description: unknown [Arabidopsis thaliana]
  misc_feature (73)..(281): Homolog of NCBI NO: 27651999 NR Description: CAX-interacting protein 4 [Arabidopsis thaliana]
  misc_feature (73)..(281): Homolog of NCBI NO: 18401896 NR Description: expressed protein
  misc_feature (85)..(313): Homolog of NCBI NO: 34895374 NR Description: P0698A04.25 [Oryza sativa (japonica
  misc_feature (67)..(313): Homolog of NCBI NO: 34895374 NR Description: P0698A04.25 [Oryza sativa (japonica
  misc_feature (67)..(313): Homolog of NCBI NO: 18379151 NR Description: expressed protein
SEQKGKFLKGSEALASSLCLLVSAPIRSLLCACLSSFGLAYLSLASDALLVILIPKCRFSVAFSIQMDCKKFIQMVEEKKRRVLEKQEAPLKWEQKLEAAANAKADTETKVKRSKGPKRKQRAASESSSESDSSSEVRRKSRRSHNKHRRHAHSDSDDSDRRKEKKSRRQKRRSLSPSDDSTGDYESGSEDELRMKIKHHRRHKWHSSRKTCDDDSTEDVRRKHLKHHRRSEVVTSSDSEEESGRRRRGKYHRHNRGSASSSGSEEDSGKSMKRRQHKRHRLAESSSEEDGAMRRTRHHKHGRDSASESDGRR

SEQ ID NO: 47532 - protein, 247 aa, Arabidopsis thaliana; identical to SEQ ID NO: 25056
  peptide (1)..(247): Ceres Seq. ID no. 12602044
  misc_feature (8)..(247): Pfam Name: Granin (chromogranin or secretogranin) Pfam Description: Granin (chromogranin or secretogranin)
  misc_feature (18)..(247): Homolog of NCBI NO: 39589507 NR Description: Hypothetical protein CBG22293 [Caenorhabditis
  misc_feature (11)..(247): Homolog of NCBI NO: 24580684 NR Description: CG2839-PA [Drosophila melanogaster]
  misc_feature (12)..(247): Homolog of NCBI NO: 17509687 NR Description: Human XNP gene related XNP-1 (156.2 kD) (xnp-1)
  misc_feature (12)..(247): Homolog of NCBI NO: 17367114 NR Description: Transcriptional regulator ATRX homolog (X-linked
  misc_feature (7)..(215): Homolog of NCBI NO: 21618036 NR Description: unknown [Arabidopsis thaliana]
  misc_feature (7)..(215): Homolog of NCBI NO: 27651999 NR Description: CAX-interacting protein 4 [Arabidopsis thaliana]
  misc_feature (7)..(215): Homolog of NCBI NO: 18401896 NR Description: expressed protein
  misc_feature (19)..(247): Homolog of NCBI NO: 34895374 NR Description: P0698A04.25 [Oryza sativa (japonica
  misc_feature (1)..(247): Homolog of NCBI NO: 34895374 NR Description: P0698A04.25 [Oryza sativa (japonica
  misc_feature (1)..(247): Homolog of NCBI NO: 18379151 NR Description: expressed protein

SEQ ID NO: 47533 - protein, 239 aa, Arabidopsis thaliana; identical to SEQ ID NO: 25057
  peptide (1)..(239): Ceres Seq. ID no. 12602045
  misc_feature (1)..(239): Pfam Name: Granin (chromogranin or secretogranin) Pfam Description: Granin (chromogranin or secretogranin)
  misc_feature (10)..(239): Homolog of NCBI NO: 39589507 NR Description: Hypothetical protein CBG22293 [Caenorhabditis
  misc_feature (3)..(239): Homolog of NCBI NO: 24580684 NR Description: CG2839-PA [Drosophila melanogaster]
  misc_feature (4)..(239): Homolog of NCBI NO: 17509687 NR Description: Human XNP gene related XNP-1 (156.2 kD) (xnp-1)
  misc_feature (4)..(239): Homolog of NCBI NO: 17367114 NR Description: Transcriptional regulator ATRX homolog (X-linked
  misc_feature (1)..(207): Homolog of NCBI NO: 21618036 NR Description: unknown [Arabidopsis thaliana]
  misc_feature (1)..(207): Homolog of NCBI NO: 27651999 NR Description: CAX-interacting protein 4 [Arabidopsis thaliana]
  misc_feature (1)..(207): Homolog of NCBI NO: 18401896 NR Description: expressed protein
  misc_feature (11)..(239): Homolog of NCBI NO: 34895374 NR Description: P0698A04.25 [Oryza sativa (japonica
  misc_feature (1)..(239): Homolog of NCBI NO: 34895374 NR Description: P0698A04.25 [Oryza sativa (japonica
  misc_feature (1)..(239): Homolog of NCBI NO: 18379151 NR Description: expressed protein

SEQ ID NO: 47534 - DNA, 1192 bp, Arabidopsis thaliana
  misc_feature (1)..(1192): Ceres Seq. ID no. 13588886
  misc_feature: MA Experiment ID: 20000495 Result: Down-regulated in Transcription
  misc_feature: MA Experiment 20000495 PARAMETER Experiment Name: At_Guard_Cells_P Parameter: Harvest Date Value: 8/2/2002
  misc_feature: MA Experiment 20000495 PARAMETER Experiment Name: At_Guard_Cells_P Parameter: Organism Value: A. thaliana
  misc_feature: MA Experiment 20000495 PARAMETER Experiment Name: At_Guard_Cells_P Parameter: Tissue Value: Guard Cells vs. Leaves
  misc_feature: MA Experiment ID: 20000496 Result: Down-regulated in Transcription
  misc_feature: MA Experiment 20000496 PARAMETER Experiment Name: At_Guard_Cells_P Parameter: Harvest Date Value: 7/19/2002
  misc_feature: MA Experiment 20000496 PARAMETER Experiment Name: At_Guard_Cells_P Parameter: Organism Value: Canola
  misc_feature: MA Experiment 20000496 PARAMETER Experiment Name: At_Guard_Cells_P Parameter: Tissue Value: Guard Cells vs. Leaves
  misc_feature: MA Experiment ID: 20001451 Result: Down-regulated in Transcription
  misc_feature: MA Experiment 20001451 PARAMETER Experiment Name: At_Far-red-induction_P Parameter: Age (day) Value: 7
  misc_feature: MA Experiment 20001451 PARAMETER Experiment Name: At_Far-red-induction_P Parameter: Light Value: Far-red vs. White
  misc_feature: MA Experiment 20001451 PARAMETER Experiment Name: At_Far-red-induction_P Parameter: Organism Value: A. thaliana
  misc_feature: MA Experiment 20001451 PARAMETER Experiment Name: At_Far-red-induction_P Parameter: Plant Line Value: Columbia
  misc_feature: MA Experiment 20001451 PARAMETER Experiment Name: At_Far-red-induction_P Parameter: Timepoint (hr) Value: 24
  misc_feature: MA Experiment 20001451 PARAMETER Experiment Name: At_Far-red-induction_P Parameter: Tissue Value: Whole Plant
gacagaagtgaagagcaagcagacgaaaaaaatggcgactctgtcttcctatctgttatcttctcctcctctatgcaaatcccgattctcggcaacaagtctcgtctcaggaattgatttcatctctttctctcctcgaacaactctctcctcgtcatccactgtcttgccggcgattctttctctttccgttaaacataatcgccggagaaactcgcttcaagtgaaatcagtagctagcccaacggagacgatttcagaattcgatgagatggtctccggcacgaaacgaaagtattacatgctcggtgggaaaggaggagtgggcaaaactagttgtgctgcttctttagctgtgagattcgccaacaatggacacccaactctggttgtatctacagatccagcacattccttgagcgattcttttgctcaggacttgactggaggaatgcttgtccctgtagaaggacccgaagctcctttatttgctttagaaataaaccctgagaaggctagggaagagtttcgtagtgcctcgcagatgaatggaggaactggggtgaaagattttatggatggtatgggacttggaatgcttgtagaacaggtcattcaattcttggaatcaccagagtataacatgttcaccagaatcgtatttgatactgcaccaacgggtcatacgctaaggctactctctttacctgatttcttggatgcatccattggtaaaatcttgaagcttagacagaaaataacctcggctacttcagcgatcaaatcagtttttgggaaagaagaaaaggggcctgatgctgccgacaaattggaaaaactaagagaaaggatggttaaagttcgcgagcttttccgtgacacagagtcaacagaattcgtcattgtcactatcccaacggtaatggctgtcagcgagtcttctaggttaagtgcttccttgaagaaggaaagtgttcccgtcaaaagactcattgttaatcagcttctcccgccatcctcctcagattgcaaattttgctctattaagagaaaggaccaaatgcgggctcttgatatgatccgggaggattcagaactctctgctttgacactgatggaggctccgctggttgatatggagatcagaggtgtccctgctctgcgcttcttgggcgatatcatttggaaataa

SEQ ID NO: 47535 - protein, 396 aa, Arabidopsis thaliana
  peptide (1)..(396): Ceres Seq. ID no. 13588887
  misc_feature (97)..(396): Pfam Name: Anion-transporting ATPase Pfam Description: Anion-transporting ATPase
  misc_feature (89)..(396): Homolog of NCBI NO: 19717679 NR Description: arsenite transport subunit A [Dictyostelium
  misc_feature (90)..(395): Homolog of NCBI NO: 15669329 NR Description: arsenical pump-driving ATPase (arsA)
  misc_feature (96)..(395): Homolog of NCBI NO: 15679508 NR Description: arsenical pump-driving ATPase
  misc_feature (184)..(396): Homolog of NCBI NO: 30697424 NR Description: ATPase - like protein [Arabidopsis thaliana]
  misc_feature (184)..(396): Homolog of NCBI NO: 9759337 NR Description: arsenite translocating ATPase-like protein
  misc_feature (40)..(204): Homolog of NCBI NO: 5824321 NR Description: ATPase [Solanum tuberosum]
  misc_feature (194)..(369): Homolog of NCBI NO: 5824321 NR Description: ATPase [Solanum tuberosum]
  misc_feature (11)..(204): Homolog of NCBI NO: 30681260 NR Description: ATPase -related [Arabidopsis thaliana]
  misc_feature (194)..(396): Homolog of NCBI NO: 30681260 NR Description: ATPase -related [Arabidopsis thaliana]
  misc_feature (11)..(396): Homolog of NCBI NO: 6056208 NR Description: putative ATPase [Arabidopsis thaliana]
TEVKSKQTKKMATLSSYLLSSPPLCKSRFSATSLVSGIDFISFSPRTTLSSSSTVLPAILSLSVKHNRRRNSLQVKSVASPTETISEFDEMVSGTKRKYYMLGGKGGVGKTSCAASLAVRFANNGHPTLVVSTDPAHSLSDSFAQDLTGGMLVPVEGPEAPLFALEINPEKAREEFRSASQMNGGTGVKDFMDGMGLGMLVEQVIQFLESPEYNMFTRIVFDTAPTGHTLRLLSLPDFLDASIGKILKLRQKITSATSAIKSVFGKEEKGPDAADKLEKLRERMVKVRELFRDTESTEFVIVTIPTVMAVSESSRLSASLKKESVPVKRLIVNQLLPPSSSDCKFCSIKRKDQMRALDMIREDSELSALTLMEAPLVDMEIRGVPALRFLGDIIWK

SEQ ID NO: 47536 - protein, 386 aa, Arabidopsis thaliana
  peptide (1)..(386): Ceres Seq. ID no. 13588888
  misc_feature (87)..(386): Pfam Name: Anion-transporting ATPase Pfam Description: Anion-transporting ATPase
  misc_feature (79)..(386): Homolog of NCBI NO: 19717679 NR Description: arsenite transport subunit A [Dictyostelium
  misc_feature (80)..(385): Homolog of NCBI NO: 15669329 NR Description: arsenical pump-driving ATPase (arsA)
  misc_feature (86)..(385): Homolog of NCBI NO: 15679508 NR Description: arsenical pump-driving ATPase
  misc_feature (174)..(386): Homolog of NCBI NO: 30697424 NR Description: ATPase - like protein [Arabidopsis thaliana]
  misc_feature (174)..(386): Homolog of NCBI NO: 9759337 NR Description: arsenite translocating ATPase-like protein
  misc_feature (30)..(194): Homolog of NCBI NO: 5824321 NR Description: ATPase [Solanum tuberosum]
  misc_feature (184)..(359): Homolog of NCBI NO: 5824321 NR Description: ATPase [Solanum tuberosum]
  misc_feature (1)..(194): Homolog of NCBI NO: 30681260 NR Description: ATPase -related [Arabidopsis thaliana]
  misc_feature (184)..(386): Homolog of NCBI NO: 30681260 NR Description: ATPase -related [Arabidopsis thaliana]
  misc_feature (1)..(386): Homolog of NCBI NO: 6056208 NR Description: putative ATPase [Arabidopsis thaliana]
MATLSSYLLSSPPLCKSRFSATSLVSGIDFISFSPRTTLSSSSTVLPAILSLSVKHNRRRNSLQVKSVASPTETISEFDEMVSGTKRKYYMLGGKGGVGKTSCAASLAVRFANNGHPTLVVSTDPAHSLSDSFAQDLTGGMLVPVEGPEAPLFALEINPEKAREEFRSASQMNGGTGVKDFMDGMGLGMLVEQVIQFLESPEYNMFTRIVFDTAPTGHTLRLLSLPDFLDASIGKILKLRQKITSATSAIKSVFGKEEKGPDAADKLEKLRERMVKVRELFRDTESTEFVIVTIPTVMAVSESSRLSASLKKESVPVKRLIVNQLLPPSSSDCKFCSIKRKDQMRALDMIREDSELSALTLMEAPLVDMEIRGVPALRFLGDIIWK

SEQ ID NO: 47537 - protein, 306 aa, Arabidopsis thaliana
  peptide (1)..(306): Ceres Seq. ID no. 13588889
  misc_feature (7)..(306): Pfam Name: Anion-transporting ATPase Pfam Description: Anion-transporting ATPase
  misc_feature (1)..(306): Homolog of NCBI NO: 19717679 NR Description: arsenite transport subunit A [Dictyostelium
  misc_feature (1)..(305): Homolog of NCBI NO: 15669329 NR Description: arsenical pump-driving ATPase (arsA)
  misc_feature (6)..(305): Homolog of NCBI NO: 15679508 NR Description: arsenical pump-driving ATPase
  misc_feature (94)..(306): Homolog of NCBI NO: 30697424 NR Description: ATPase - like protein [Arabidopsis thaliana]
  misc_feature (94)..(306): Homolog of NCBI NO: 9759337 NR Description: arsenite translocating ATPase-like protein
  misc_feature (1)..(114): Homolog of NCBI NO: 5824321 NR Description: ATPase [Solanum tuberosum]
  misc_feature (104)..(279): Homolog of NCBI NO: 5824321 NR Description: ATPase [Solanum tuberosum]
  misc_feature (1)..(114): Homolog of NCBI NO: 30681260 NR Description: ATPase -related [Arabidopsis thaliana]
  misc_feature (104)..(306): Homolog of NCBI NO: 30681260 NR Description: ATPase -related [Arabidopsis thaliana]
  misc_feature (1)..(306): Homolog of NCBI NO: 6056208 NR Description: putative ATPase [Arabidopsis thaliana]
MVSGTKRKYYMLGGKGGVGKTSCAASLAVRFANNGHPTLVVSTDPAHSLSDSFAQDLTGGMLVPVEGPEAPLFALEINPEKAREEFRSASQMNGGTGVKDFMDGMGLGMLVEQVIQFLESPEYNMFTRIVFDTAPTGHTLRLLSLPDFLDASIGKILKLRQKITSATSAIKSVFGKEEKGPDAADKLEKLRERMVKVRELFRDTESTEFVIVTIPTVMAVSESSRLSASLKKESVPVKRLIVNQLLPPSSSDCKFCSIKRKDQMRALDMIREDSELSALTLMEAPLVDMEIRGVPALRFLGDIIWK

SEQ ID NO: 47538 - DNA, 1225 bp, Arabidopsis thaliana
  misc_feature (1)..(1225): Ceres Seq. ID no. 13588890
  misc_feature: MA Experiment ID: 20000307 Result: Up-regulated in Transcription
  misc_feature: MA Experiment 20000307 PARAMETER Experiment Name: At_Germinating_Seeds_Sub_P Parameter: Age (hr) Value: 24 vs. 0
  misc_feature: MA Experiment 20000307 PARAMETER Experiment Name: At_Germinating_Seeds_Sub_P Parameter: Organism Value: A. thaliana
  misc_feature: MA Experiment 20000307 PARAMETER Experiment Name: At_Germinating_Seeds_Sub_P Parameter: Plant Line Value: WS
  misc_feature: MA Experiment 20000307 PARAMETER Experiment Name: At_Germinating_Seeds_Sub_P Parameter: Tissue Value: Germinating Seeds
  misc_feature: MA Experiment ID: 20000355 Result: Up-regulated in Transcription
  misc_feature: MA Experiment 20000355 PARAMETER Experiment Name: At_Siliques_Sub_P Parameter: Age (day) Value: 21
  misc_feature: MA Experiment 20000355 PARAMETER Experiment Name: At_Siliques_Sub_P Parameter: Organism Value: A. thaliana
  misc_feature: MA Experiment 20000355 PARAMETER Experiment Name: At_Siliques_Sub_P Parameter: Plant Line Value: WS
  misc_feature: MA Experiment 20000355 PARAMETER Experiment Name: At_Siliques_Sub_P Parameter: Tissue Value: Less Than 5mm Siliques vs. Whole Plant
atcaagtgacaaaagaaaaacaaacgtactcaaatggctctttcttcaccttcaagaatcctctgttttgctcttgccttatccgctgcttctctctccctctctttcgcttcttcccacgattactccatcgttggatactcccccgaggatttggaatctcatgacaaactcatagaactcttcgaaaactggatctcaaattttgagaaagcttatgaaaccgttgaagagaagtttcttaggttcgaagttttcaaggataatctaaagcacatcgatgagactaacaagaaagggaaaagctactggctcgggctcaacgagtttgcggatttgagccatgaggagttcaagaaaatgtatttagggctcaagactgatatagtgagacgcgatgaagaaagatcttacgcagagttcgcttacagggacgtcgaagctgttcctaagtctgttgactggagaaagaaaggagctgtggcggaagttaagaaccagggctcttgtggaagttgttgggcgttttcgacagtagcagctgtcgaaggtataaacaagattgtgacaggaaacttgacaacattgtcagaacaagaactcatagactgtgacacgacctacaacaatggctgcaacggtggtctcatggactatgcctttgagtacattgttaagaacggaggtctacgcaaggaagaagattatccttactctatggaagaaggaacttgcgagatgcaaaaggatgaatctgaaacagtaaccattaatggacaccaagacgtacctactaatgatgagaagagtctcttgaaggcattggctcatcagcctctcagtgtcgccattgatgcatctggtagagagttccagttctatagcggcggcgtgtttgatgggcggtgcggggttgatcttgaccacggtgtggctgcggttgggtatggatcaagcaagggttcagattacatcattgtgaagaattcttggggaccaaaatggggagaaaaaggttacatcaggctgaagaggaacactgggaaaccagagggtctctgtggaatcaacaagatggcttctttccccaccaaaactaagtgatcatcagatcattctctcttatctgcatttgatcagcatcttacagtgtcttcgttttttctcttttgatttatcaacggaagtcttgtaacaactatgtgcaataatacctatatataag

SEQ ID NO: 47539 - protein, 356 aa, Arabidopsis thaliana
  peptide (1)..(356): Ceres Seq. ID no. 13588891
  misc_feature (138)..(353): Pfam Name: Papain family cysteine protease Pfam Description: Papain family cysteine protease
  misc_feature (1)..(354): Homolog of NCBI NO: 34905996 NR Description: putative cysteine proteinase
  misc_feature (25)..(341): Homolog of NCBI NO: 7435773 NR Description: cysteine proteinase (EC 3.4.22.-) precursor -
  misc_feature (9)..(354): Homolog of NCBI NO: 14719319 NR Description: putative cysteine proteinase [Oryza sativa]
  misc_feature (14)..(356): Homolog of NCBI NO: 22759715 NR Description: cysteine proteinase [Zinnia elegans]
  misc_feature (13)..(356): Homolog of NCBI NO: 30141025 NR Description: cysteine protease-4 [Helianthus annuus]
  misc_feature (1)..(356): Homolog of NCBI NO: 18418684 NR Description: cysteine protease XCP1 [Arabidopsis thaliana]
  misc_feature (21)..(356): Homolog of NCBI NO: 37780039 NR Description: cysteine protease 14 [Trifolium repens]
  misc_feature (21)..(356): Homolog of NCBI NO: 37780041 NR Description: cysteine protease 14 [Trifolium repens]
  misc_feature (1)..(315): Homolog of NCBI NO: 8886940 NR Description: F2D10.37 [Arabidopsis thaliana]
  misc_feature (1)..(356): Homolog of NCBI NO: 18394919 NR Description: cysteine proteinase XCP2 [Arabidopsis thaliana]
MALSSPSRILCFALALSAASLSLSFASSHDYSIVGYSPEDLESHDKLIELFENWISNFEKAYETVEEKFLRFEVFKDNLKHIDETNKKGKSYWLGLNEFADLSHEEFKKMYLGLKTDIVRRDEERSYAEFAYRDVEAVPKSVDWRKKGAVAEVKNQGSCGSCWAFSTVAAVEGINKIVTGNLTTLSEQELIDCDTTYNNGCNGGLMDYAFEYIVKNGGLRKEEDYPYSMEEGTCEMQKDESETVTINGHQDVPTNDEKSLLKALAHQPLSVAIDASGREFQFYSGGVFDGRCGVDLDHGVAAVGYGSSKGSDYIIVKNSWGPKWGEKGYIRLKRNTGKPEGLCGINKMASFPTKTK

SEQ ID NO: 47540 - protein, 247 aa, Arabidopsis thaliana
  peptide (1)..(247): Ceres Seq. ID no. 13588892
  misc_feature (29)..(244): Pfam Name: Papain family cysteine protease Pfam Description: Papain family cysteine protease
  misc_feature (1)..(245): Homolog of NCBI NO: 34905996 NR Description: putative cysteine proteinase
  misc_feature (1)..(232): Homolog of NCBI NO: 7435773 NR Description: cysteine proteinase (EC 3.4.22.-) precursor -
  misc_feature (1)..(245): Homolog of NCBI NO: 14719319 NR Description: putative cysteine proteinase [Oryza sativa]
  misc_feature (1)..(247): Homolog of NCBI NO: 22759715 NR Description: cysteine proteinase [Zinnia elegans]
  misc_feature (1)..(247): Homolog of NCBI NO: 30141025 NR Description: cysteine protease-4 [Helianthus annuus]
  misc_feature (1)..(247): Homolog of NCBI NO: 18418684 NR Description: cysteine protease XCP1 [Arabidopsis thaliana]
  misc_feature (1)..(247): Homolog of NCBI NO: 37780039 NR Description: cysteine protease 14 [Trifolium repens]
  misc_feature (1)..(247): Homolog of NCBI NO: 37780041 NR Description: cysteine protease 14 [Trifolium repens]
  misc_feature (1)..(206): Homolog of NCBI NO: 8886940 NR Description: F2D10.37 [Arabidopsis thaliana]
  misc_feature (1)..(247): Homolog of NCBI NO: 18394919 NR Description: cysteine proteinase XCP2 [Arabidopsis thaliana]
MYLGLKTDIVRRDEERSYAEFAYRDVEAVPKSVDWRKKGAVAEVKNQGSCGSCWAFSTVAAVEGINKIVTGNLTTLSEQELIDCDTTYNNGCNGGLMDYAFEYIVKNGGLRKEEDYPYSMEEGTCEMQKDESETVTINGHQDVPTNDEKSLLKALAHQPLSVAIDASGREFQFYSGGVFDGRCGVDLDHGVAAVGYGSSKGSDYIIVKNSWGPKWGEKGYIRLKRNTGKPEGLCGINKMASFPTKTK

SEQ ID NO: 47541 - DNA, 4931 bp, Arabidopsis thaliana
  misc_feature (1)..(4931): Ceres Seq. ID no. 12602182
  misc_feature: MA Experiment ID: 20000166 Result: Down-regulated in Transcription
  misc_feature: MA Experiment 20000166 PARAMETER Experiment Name: At_100uM_ABA_P Parameter: Age (day) Value: 14
  misc_feature: MA Experiment 20000166 PARAMETER Experiment Name: At_100uM_ABA_P Parameter: Organism Value: A. thaliana
  misc_feature: MA Experiment 20000166 PARAMETER Experiment Name: At_100uM_ABA_P Parameter: Plant Line Value: WS
  misc_feature: MA Experiment 20000166 PARAMETER Experiment Name: At_100uM_ABA_P Parameter: Timepoint (hr) Value: 1
  misc_feature: MA Experiment 20000166 PARAMETER Experiment Name: At_100uM_ABA_P Parameter: Tissue Value: Aerial
  misc_feature: MA Experiment 20000166 PARAMETER Experiment Name: At_100uM_ABA_P Parameter: Treatment Value: 100uM ABA vs. No Treatment
  misc_feature: MA Experiment ID: 20000173 Result: Down-regulated in Transcription
  misc_feature: MA Experiment 20000173 PARAMETER Experiment Name: At_42deg_Heat_P Parameter: Age (day) Value: 14
  misc_feature: MA Experiment 20000173 PARAMETER Experiment Name: At_42deg_Heat_P Parameter: Organism Value: A. thaliana
  misc_feature: MA Experiment 20000173 PARAMETER Experiment Name: At_42deg_Heat_P Parameter: Plant Line Value: WS
  misc_feature: MA Experiment 20000173 PARAMETER Experiment Name: At_42deg_Heat_P Parameter: Temperature (deg C) Value: 42 vs. 22
  misc_feature: MA Experiment 20000173 PARAMETER Experiment Name: At_42deg_Heat_P Parameter: Timepoint (hr) Value: 6
  misc_feature: MA Experiment 20000173 PARAMETER Experiment Name: At_42deg_Heat_P Parameter: Tissue Value: Aerial
  misc_feature: MA Experiment ID: 20000184 Result: Down-regulated in Transcription
  misc_feature: MA Experiment 20000184 PARAMETER Experiment Name: At_Shoots__P Parameter: Age (day) Value: 7
  misc_feature: MA Experiment 20000184 PARAMETER Experiment Name: At_Shoots__P Parameter: Tissue Value: Shoots vs. Whole Plant
  misc_feature: MA Experiment ID: 20000185 Result: Down-regulated in Transcription
  misc_feature: MA Experiment 20000185 PARAMETER Experiment Name: At_Roots__P Parameter: Age (day) Value: 7 vs. 21
  misc_feature: MA Experiment 20000185 PARAMETER Experiment Name: At_Roots__P Parameter: Organism Value: A. thaliana
  misc_feature: MA Experiment 20000185 PARAMETER Experiment Name: At_Roots__P Parameter: Tissue Value: Roots vs. Whole Plant
  misc_feature: MA Experiment ID: 20000234 Result: Down-regulated in Transcription
  misc_feature: MA Experiment 20000234 PARAMETER Experiment Name: At_Siliques_P Parameter: Age (day) Value: 21
  misc_feature: MA Experiment 20000234 PARAMETER Experiment Name: At_Siliques_P Parameter: Organism Value: A. thaliana
  misc_feature: MA Experiment 20000234 PARAMETER Experiment Name: At_Siliques_P Parameter: Plant Line Value: WS
  misc_feature: MA Experiment 20000234 PARAMETER Experiment Name: At_Siliques_P Parameter: Tissue Value: Less Than 5mm Siliques vs. Whole Plant
  misc_feature: MA Experiment ID: 20000264 Result: Down-regulated in Transcription
  misc_feature: MA Experiment 20000264 PARAMETER Experiment Name: At_Open_Flower_P Parameter: Age (day) Value: 21
  misc_feature: MA Experiment 20000264 PARAMETER Experiment Name: At_Open_Flower_P Parameter: Plant Line Value: WS
  misc_feature: MA Experiment 20000264 PARAMETER Experiment Name: At_Open_Flower_P Parameter: Tissue Value: Open Flower vs. Whole Plant
  misc_feature: MA Experiment ID: 20000265 Result: Down-regulated in Transcription
  misc_feature: MA Experiment 20000265 PARAMETER Experiment Name: At_Open_Flower_P Parameter: Age (day) Value: 21
  misc_feature: MA Experiment 20000265 PARAMETER Experiment Name: At_Open_Flower_P Parameter: Plant Line Value: WS
  misc_feature: MA Experiment 20000265 PARAMETER Experiment Name: At_Open_Flower_P Parameter: Tissue Value: Closed Flower vs. Whole Plant
  misc_feature: MA Experiment ID: 20000286 Result: Down-regulated in Transcription
  misc_feature: MA Experiment 20000286 PARAMETER Experiment Name: At_Open_Flower_P Parameter: Age (day) Value: 21
  misc_feature: MA Experiment 20000286 PARAMETER Experiment Name: At_Open_Flower_P Parameter: Plant Line Value: WS
  misc_feature: MA Experiment 20000286 PARAMETER Experiment Name: At_Open_Flower_P Parameter: Tissue Value: Half Open vs. Whole Plant
  misc_feature: MA Experiment ID: 20000439 Result: Down-regulated in Transcription
  misc_feature: MA Experiment 20000439 PARAMETER Experiment Name: At_Roots__P Parameter: Age (day) Value: 14 vs. 21
  misc_feature: MA Experiment 20000439 PARAMETER Experiment Name: At_Roots__P Parameter: Organism Value: A. thaliana
  misc_feature: MA Experiment 20000439 PARAMETER Experiment Name: At_Roots__P Parameter: Tissue Value: Roots vs. Whole Plant
  misc_feature: MA Experiment ID: 20000794 Result: Down-regulated in Transcription
  misc_feature: MA Experiment 20000794 PARAMETER Experiment Name: At_Petals_P Parameter: Age (day) Value: 23-25 days
  misc_feature: MA Experiment 20000794 PARAMETER Experiment Name: At_Petals_P Parameter: Plant Line Value: WS
  misc_feature: MA Experiment 20000794 PARAMETER Experiment Name: At_Petals_P Parameter: Tissue Value: Petals vs. Whole plant
  misc_feature: MA Experiment ID: 20001555 Result: Down-regulated in Transcription
  misc_feature: MA Experiment 20001555 PARAMETER Experiment Name: At_Drought_Soil_Dry_P Parameter: Age (day) Value: 24
  misc_feature: MA Experiment 20001555 PARAMETER Experiment Name: At_Drought_Soil_Dry_P Parameter: Organism Value: A. thaliana
  misc_feature: MA Experiment 20001555 PARAMETER Experiment Name: At_Drought_Soil_Dry_P Parameter: Plant Line Value: WS
  misc_feature: MA Experiment 20001555 PARAMETER Experiment Name: At_Drought_Soil_Dry_P Parameter: Post Timepoint (hr) Value: None
  misc_feature: MA Experiment 20001555 PARAMETER Experiment Name: At_Drought_Soil_Dry_P Parameter: Post-Treatment Value: None
  misc_feature: MA Experiment 20001555 PARAMETER Experiment Name: At_Drought_Soil_Dry_P Parameter: Timepoint (day) Value: 10
  misc_feature: MA Experiment 20001555 PARAMETER Experiment Name: At_Drought_Soil_Dry_P Parameter: Treatment Value: Drought vs. No Drought
  misc_feature: MA Experiment ID: 20001904 Result: Down-regulated in Transcription
  misc_feature: MA Experiment 20001904 PARAMETER Experiment Name: At_Drought_Reproduction_P Parameter: Age (day) Value: 37
  misc_feature: MA Experiment 20001904 PARAMETER Experiment Name: At_Drought_Reproduction_P Parameter: Organism Value: A. thaliana
  misc_feature: MA Experiment 20001904 PARAMETER Experiment Name: At_Drought_Reproduction_P Parameter: Plant Line Value: WS
  misc_feature: MA Experiment 20001904 PARAMETER Experiment Name: At_Drought_Reproduction_P Parameter: Timepoint (day) Value: 7
  misc_feature: MA Experiment 20001904 PARAMETER Experiment Name: At_Drought_Reproduction_P Parameter: Tissue Value: Rosettes
  misc_feature: MA Experiment 20001904 PARAMETER Experiment Name: At_Drought_Reproduction_P Parameter: Treatment Value: Drought vs. No Drought
gaccgtaccgtacagagtcaattgaagaaaccgagagagagagtgagcggaatcatgacttctccgggaaaatctccgagatccgaccggaaatcaccgacggttgtcaccgtccagccgtcttctcccagattcccgatcagcacacctactgctggagctcaacgtaagatcgggatcgctgtcgatctaagcgacgagagtgcgtacgcagttcaatgggctgttcagaactatctccgatcaggtgacgccgttgttctccttcatgttcaaccgacgagtgtactttacggcgccgattggggcgctatggatttgtcgccgcagtgggatccaaataacgaagagtctcagaggaagcttgaggacgatttcgacattgtcactaataagaaagcgagcgacgttgctcagcctttggttgaggcggatattccgtttaagatccatatcgtcaaggatcacgatatgaaggagaggctttgtttggaggtggagaggttagggctaagtactttgattatgggtagtagaggatttggtgctacgaagaggagtagtaaagggagattagggagtgtcagtgattactcagttcaccattgtgcttgtccggtggttgttgttagatttcctgatgataaggatggagaagatgagaaatccggcgacagtggtggggagaatctgatggacagtgataaacttcatacagtgcctgaggtggctgaagaagagggagataaggatgagtaccatgatgcttcggataagcagtagcagcaaggttgactttgaatgcatgtcagtttcaatttacttaggaatattatatacaatcagtaatactctgctcggatcaagctttgacctttagaatgattggatattaggaagatccactaagatgctattttattcctgatgcttgaggtgtgtatgtttgaacatttgcgcatatcattgctttagttgtattcagtaatctcttgatgttaatgaccaataacttacatatgcatctattgatatgctagagatttgctgtttgtgagtacttttttttgtctcagtgatgtctggatatgtcaagttatttcttcaaaagttggatcaatcaatgatgtcttatctgtgatcactgatcttgtgcaggctttcatgttgcagaaggagacctccctaaggagacttagaaagaaaagaaagcgttcctttgcccttggtttgtgttcttgagtgtgcttaattgtgttgtttttggggtttggggtattctagatctcttttgtaagtattctcttgtttcttggttttgttttaaactctatggaatttgggatgagtggattcgatgtcttttgtttgtctttgaaaaagcagtgaaaagaatttcagtggtcttgtatatctctgcagttgaatagttggtacaaaataacatctttgacggttccaaataatatatcttgtcagtaatgaccattaaataaactttaccatgaaatggctatgcttgcatctttcagaaccattacatttgtcttgtcctgtttctgacttttctcttgactgtgtggaagttcataagatcaatggtaccgatgtgtctttgtttgtatctttgggaaaaagactgataatggttccgaagtttcactgtttgtacagtctcaaataagttctattttgtctctctgcagtttagttttccccatagaaagcatctctgatggtttcaaatgtaggcatcattaacattttcaccacattgtccctattctcaagcagcgaactctcttcctatgatcaacgtccactatctattcccaactttgaagagttaagagacatttacctaaggaatcggtaaatccttgtttgcatttgtcgatttcatgagctcctgttgcctgttgttgcgcgacctggtttcaaaacggcttccaagttcgatttcaagtttgcaaaatgtgaagttgtctctgatagtgactccttgcatgcccctatctcacacatgctcgtaaggccccatcacactttccaattatttctgagcggaaaagtcaagtgtggtgcctctgccagtggcaattaaatgtaaccaccaaacattagatgacataaagttatttcaagtcttaggattaaatcaacccttaaagctctacgtttctctcaaagttgctgagaagatgggttgtttgctaattcttcttcttacattgatttgcttttccttgaggctttgtttggctactgatgtaatcacgttttctagcgagttcagggactctgagactgtcgtctccaaccacagcaccttcaggtttggtttcttcagcccggttaactccacaggacgttatgcagggatatggttcaataatattcctgttcaaaccgtggtttgggtagcaaacagtaacagcccgatcaatgactcttccggaatggtttccatatccaaggaagggaatcttgttgttatggatggtcgcggacaggttcactggtccaccaatgtcttggtgccggtggctgctaacaccttctatgcccggttgctgaatacagggaacctcgtgctgctaggaactactaatactggggatgagattctttgggagagctttgagcatcctcaaaacatatatttgccaacaatgagtcttgctactgacacgaaaacaggcaggagccttaagctaagatcttggaaaagcccgtttgatccatcgcctggacgatactctgcaggtttgattcctctgccatttccagaacttgttgtctggaaagatgatcttctgatgtggcgtagcggtccatggaatggtcaatacttcattgggttaccaaatatggattaccgtatcaatcttttcgagttaacccttagtagtgacaatcgaggatctgtctccatgtcctatgctggaaatactttgttgtatcattttctcttggactccgaaggaagcgtgtttcagagagattggaacgtggctatccaagaatggaagacctggttaaaggtcccatcgaccaagtgtgatacatacgccacatgtggccaattcgctagttgcagattcaatcccgggtcgactccgccttgcatgtgcattagagggtttaagccacagagttacgcggagtggaacaacggaaactggactcagggatgcgtaagaaaggcaccattgcagtgcgaaagtcgagacaacaacgatggaagtagaaaaagtgatggatttgtgagagtgcaaaagatgaaagtgccccacaatccacaacgatctggagccaatgaacaagactgtcctgagagctgtctgaagaactgttcttgtacggcttactcattcgacagagggattggttgtcttctttggagcggaaacttgatggatatgcaggagttttctggcactggcgtggttttttacattcgtcttgcagattcagagtttagtaagtgtagtatcaacctcatttttccatccaacttagtttactagatcataacagatttgcaccaaatcttttgtagaaaagcggaccaatcggtcaattgtgatcacagtaactttgctagtaggcgcttttttgtttgcagggactgttgtcttagcactgtggaagatcgctaagcatagagagaagaacagaaacacaaggctacttaatgagagaatggaagctttaagtagtaatgacgttggtgcaatccttgtgaatcaatacaagcttaaagagctaccactgttcgagttccaagtgttagcagtggcgaccaacaatttttctatcacaaacaagctcggacaaggaggatttggtgctgtttacaaggggaggttacaagaagggctcgatatcgctgtgaagaggctttcgcgaacatcgggacaaggagtcgaggagtttgtgaatgaagtggtcgtgatctcaaagctgcaacaccggaatctcgtgagattgcttggtttctgcattgaaggagaagagaggatgttggtctatgagttcatgccagagaattgtttagacgcatatctatttgacccggtgaagcaaagacttcttgactggaagacgcggtttaacataatcgatgggatttgcagaggtcttatgtaccttcacagagattcaaggctgaagatcatacacagagatctaaaagcaagcaatattttgttagatgagaatctaaacccgaagatatccgactttgggctggctaggattttccaggggaatgaggatgaagtaagcaccgtaagagtggttggaacatacggttatatggcacccgaatatgcaatgggagggttgttctcagagaaatctgacgttttcagcttaggagtcatactcttagagattgtgagtggaagaagaaactcaagcttttacaatgatgggcagaatccaaatctttcagcttatgcatggaaactctggaacaccggggaagatattgctcttgtggatccggtcatctttgaagagtgttttgaaaatgaaatacgcagatgtgtgcacgtaggactattgtgtgtacaagatcacgcaaatgataggccgagcgttgcaacggtgatttggatgctaagtagcgagaactcaaaccttccagagccaaagcaacctgcatttatacctagaaggggcacttcagaagttgaatcctcgggacaaagcgacccaagagcatcgatcaacaatgtgagcctcacaaaaataacaggacgttagctctgtaagtgagataaacctactgctaaagaattttgatgaaaaaatgtttaagttgtatatctgtatgtaagagtaatctataggttacgaactaaaattcagaatctggtcatgttcttgtatgaagtcacataaatatagaacatgttttattg

SEQ ID NO: 47542 - protein, 442 aa, Arabidopsis thaliana
  peptide (1)..(442): Ceres Seq. ID no. 12602183
  misc_feature (68)..(182): Pfam Name: D-mannose binding lectin Pfam Description: D-mannose binding lectin
  misc_feature (68)..(182): Pfam Name: D-mannose binding lectin Pfam Description: D-mannose binding lectin
  misc_feature (5)..(428): Homolog of NCBI NO: 30682149 NR Description: S-locus protein kinase, putative [Arabidopsis
  misc_feature (6)..(426): Homolog of NCBI NO: 15220351 NR Description: receptor kinase, putative; protein id:
  misc_feature (5)..(426): Homolog of NCBI NO: 15234429 NR Description: serine/threonine kinase - like protein; protein
  misc_feature (9)..(442): Homolog of NCBI NO: 7434416 NR Description: serine/threonine kinase (EC 2.7.1.-) BRLK - wild
  misc_feature (5)..(427): Homolog of NCBI NO: 25287697 NR Description: hypothetical protein [imported] - Arabidopsis
  misc_feature (5)..(428): Homolog of NCBI NO: 30682149 NR Description: S-locus protein kinase, putative [Arabidopsis
  misc_feature (5)..(426): Homolog of NCBI NO: 15234429 NR Description: serine/threonine kinase - like protein; protein
  misc_feature (5)..(427): Homolog of NCBI NO: 25287697 NR Description: hypothetical protein [imported] - Arabidopsis
  misc_feature (5)..(434): Homolog of NCBI NO: 15220348 NR Description: receptor-like protein kinase, putative; protein
  misc_feature (5)..(434): Homolog of NCBI NO: 25287698 NR Description: hypothetical protein [imported] - Arabidopsis
  misc_feature (6)..(426): Homolog of NCBI NO: 25287696 NR Description: hypothetical protein [imported] - Arabidopsis
  misc_feature (6)..(428): Homolog of NCBI NO: 15220338 NR Description: serine/threonine kinase, putative; protein id:
  misc_feature (1)..(427): Homolog of NCBI NO: 15220338 NR Description: serine/threonine kinase, putative; protein id:
  misc_feature (9)..(442): Homolog of NCBI NO: 7434416 NR Description: serine/threonine kinase (EC 2.7.1.-) BRLK - wild
  misc_feature (6)..(426): Homolog of NCBI NO: 15220351 NR Description: receptor kinase, putative; protein id:
  misc_feature (1)..(427): Homolog of NCBI NO: 15220338 NR Description: serine/threonine kinase, putative; protein id:
  misc_feature (6)..(428): Homolog of NCBI NO: 15220338 NR Description: serine/threonine kinase, putative; protein id:
  misc_feature (6)..(426): Homolog of NCBI NO: 25287696 NR Description: hypothetical protein [imported] - Arabidopsis
  misc_feature (5)..(434): Homolog of NCBI NO: 25287698 NR Description: hypothetical protein [imported] - Arabidopsis
  misc_feature (5)..(434): Homolog of NCBI NO: 15220348 NR Description: receptor-like protein kinase, putative; protein
MGCLLILLLTLICFSLRLCLATDVITFSSEFRDSETVVSNHSTFRFGFFSPVNSTGRYAGIWFNNIPVQTVVWVANSNSPINDSSGMVSISKEGNLVVMDGRGQVHWSTNVLVPVAANTFYARLLNTGNLVLLGTTNTGDEILWESFEHPQNIYLPTMSLATDTKTGRSLKLRSWKSPFDPSPGRYSAGLIPLPFPELVVWKDDLLMWRSGPWNGQYFIGLPNMDYRINLFELTLSSDNRGSVSMSYAGNTLLYHFLLDSEGSVFQRDWNVAIQEWKTWLKVPSTKCDTYATCGQFASCRFNPGSTPPCMCIRGFKPQSYAEWNNGNWTQGCVRKAPLQCESRDNNDGSRKSDGFVRVQKMKVPHNPQRSGANEQDCPESCLKNCSCTAYSFDRGIGCLLWSGNLMDMQEFSGTGVVFYIRLADSEFSKCSINLIFPSNLVY

SEQ ID NO: 47543 - protein, 356 aa, Arabidopsis thaliana
  peptide (1)..(356): Ceres Seq. ID no. 12602184
  misc_feature (1)..(96): Pfam Name: D-mannose binding lectin Pfam Description: D-mannose binding lectin
  misc_feature (1)..(96): Pfam Name: D-mannose binding lectin Pfam Description: D-mannose binding lectin
  misc_feature (1)..(342): Homolog of NCBI NO: 30682149 NR Description: S-locus protein kinase, putative [Arabidopsis
  misc_feature (1)..(340): Homolog of NCBI NO: 15220351 NR Description: receptor kinase, putative; protein id:
  misc_feature (1)..(340): Homolog of NCBI NO: 15234429 NR Description: serine/threonine kinase - like protein; protein
  misc_feature (1)..(356): Homolog of NCBI NO: 7434416 NR Description: serine/threonine kinase (EC 2.7.1.-) BRLK - wild
  misc_feature (1)..(341): Homolog of NCBI NO: 25287697 NR Description: hypothetical protein [imported] - Arabidopsis
  misc_feature (1)..(342): Homolog of NCBI NO: 30682149 NR Description: S-locus protein kinase, putative [Arabidopsis
  misc_feature (1)..(340): Homolog of NCBI NO: 15234429 NR Description: serine/threonine kinase - like protein; protein
  misc_feature (1)..(341): Homolog of NCBI NO: 25287697 NR Description: hypothetical protein [imported] - Arabidopsis
  misc_feature (1)..(348): Homolog of NCBI NO: 15220348 NR Description: receptor-like protein kinase, putative; protein
  misc_feature (1)..(348): Homolog of NCBI NO: 25287698 NR Description: hypothetical protein [imported] - Arabidopsis
  misc_feature (1)..(340): Homolog of NCBI NO: 25287696 NR Description: hypothetical protein [imported] - Arabidopsis
  misc_feature (1)..(342): Homolog of NCBI NO: 15220338 NR Description: serine/threonine kinase, putative; protein id:
  misc_feature (1)..(341): Homolog of NCBI NO: 15220338 NR Description: serine/threonine kinase, putative; protein id:
  misc_feature (1)..(356): Homolog of NCBI NO: 7434416 NR Description: serine/threonine kinase (EC 2.7.1.-) BRLK - wild
  misc_feature (1)..(340): Homolog of NCBI NO: 15220351 NR Description: receptor kinase, putative; protein id:
  misc_feature (1)..(341): Homolog of NCBI NO: 15220338 NR Description: serine/threonine kinase, putative; protein id:
  misc_feature (1)..(342): Homolog of NCBI NO: 15220338 NR Description: serine/threonine kinase, putative; protein id:
  misc_feature (1)..(340): Homolog of NCBI NO: 25287696 NR Description: hypothetical protein [imported] - Arabidopsis
  misc_feature (1)..(348): Homolog of NCBI NO: 25287698 NR Description: hypothetical protein [imported] - Arabidopsis
  misc_feature (1)..(348): Homolog of NCBI NO: 15220348 NR Description: receptor-like protein kinase, putative; protein
MVSISKEGNLVVMDGRGQVHWSTNVLVPVAANTFYARLLNTGNLVLLGTTNTGDEILWESFEHPQNIYLPTMSLATDTKTGRSLKLRSWKSPFDPSPGRYSAGLIPLPFPELVVWKDDLLMWRSGPWNGQYFIGLPNMDYRINLFELTLSSDNRGSVSMSYAGNTLLYHFLLDSEGSVFQRDWNVAIQEWKTWLKVPSTKCDTYATCGQFASCRFNPGSTPPCMCIRGFKPQSYAEWNNGNWTQGCVRKAPLQCESRDNNDGSRKSDGFVRVQKMKVPHNPQRSGANEQDCPESCLKNCSCTAYSFDRGIGCLLWSGNLMDMQEFSGTGVVFYIRLADSEFSKCSINLIFPSNLVY

SEQ ID NO: 47544 - protein, 355 aa, Arabidopsis thaliana
  peptide (1)..(355): Ceres Seq. ID no. 12602185
  misc_feature (20)..(355): Homolog of NCBI NO: 15220351 NR Description: receptor kinase, putative; protein id:
  misc_feature (1)..(355): Homolog of NCBI NO: 15234429 NR Description: serine/threonine kinase - like protein; protein
  misc_feature (1)..(355): Homolog of NCBI NO: 7434416 NR Description: serine/threonine kinase (EC 2.7.1.-) BRLK - wild
  misc_feature (1)..(355): Homolog of NCBI NO: 25287697 NR Description: hypothetical protein [imported] - Arabidopsis
  misc_feature (1)..(355): Homolog of NCBI NO: 15220338 NR Description: serine/threonine kinase, putative; protein id:
  misc_feature (1)..(354): Homolog of NCBI NO: 15220338 NR Description: serine/threonine kinase, putative; protein id:
  misc_feature (1)..(355): Homolog of NCBI NO: 25287696 NR Description: hypothetical protein [imported] - Arabidopsis
  misc_feature (1)..(107): Homolog of NCBI NO: 25287698 NR Description: hypothetical protein [imported] - Arabidopsis
  misc_feature (153)..(355): Homolog of NCBI NO: 25287698 NR Description: hypothetical protein [imported] - Arabidopsis
  misc_feature (1)..(355): Homolog of NCBI NO: 15220348 NR Description: receptor-like protein kinase, putative; protein
  misc_feature (20)..(355): Homolog of NCBI NO: 15220351 NR Description: receptor kinase, putative; protein id:
  misc_feature (1)..(355): Homolog of NCBI NO: 15234429 NR Description: serine/threonine kinase - like protein; protein
  misc_feature (1)..(355): Homolog of NCBI NO: 7434416 NR Description: serine/threonine kinase (EC 2.7.1.-) BRLK - wild
  misc_feature (1)..(355): Homolog of NCBI NO: 25287697 NR Description: hypothetical protein [imported] - Arabidopsis
  misc_feature (1)..(355): Homolog of NCBI NO: 15220338 NR Description: serine/threonine kinase, putative; protein id:
  misc_feature (1)..(354): Homolog of NCBI NO: 15220338 NR Description: serine/threonine kinase, putative; protein id:
  misc_feature (1)..(355): Homolog of NCBI NO: 25287696 NR Description: hypothetical protein [imported] - Arabidopsis
  misc_feature (1)..(107): Homolog of NCBI NO: 25287698 NR Description: hypothetical protein [imported] - Arabidopsis
  misc_feature (153)..(355): Homolog of NCBI NO: 25287698 NR Description: hypothetical protein [imported] - Arabidopsis
  misc_feature (1)..(355): Homolog of NCBI NO: 15220348 NR Description: receptor-like protein kinase, putative; protein
MEALSSNDVGAILVNQYKLKELPLFEFQVLAVATNNFSITNKLGQGGFGAVYKGRLQEGLDIAVKRLSRTSGQGVEEFVNEVVVISKLQHRNLVRLLGFCIEGEERMLVYEFMPENCLDAYLFDPVKQRLLDWKTRFNIIDGICRGLMYLHRDSRLKIIHRDLKASNILLDENLNPKISDFGLARIFQGNEDEVSTVRVVGTYGYMAPEYAMGGLFSEKSDVFSLGVILLEIVSGRRNSSFYNDGQNPNLSAYAWKLWNTGEDIALVDPVIFEECFENEIRRCVHVGLLCVQDHANDRPSVATVIWMLSSENSNLPEPKQPAFIPRRGTSEVESSGQSDPRASINNVSLTKITGR

SEQ ID NO: 47545 - DNA, 1138 bp, Arabidopsis thaliana
  misc_feature (1)..(1138): Ceres Seq. ID no. 13588057
  misc_feature: MA Experiment ID: 20000184 Result: Up-regulated in Transcription
  misc_feature: MA Experiment 20000184 PARAMETER Experiment Name: At_Shoots__P Parameter: Age (day) Value: 7
  misc_feature: MA Experiment 20000184 PARAMETER Experiment Name: At_Shoots__P Parameter: Tissue Value: Shoots vs. Whole Plant
  misc_feature: MA Experiment ID: 20000437 Result: Down-regulated in Transcription
  misc_feature: MA Experiment 20000437 PARAMETER Experiment Name: At_Drought_P Parameter: Age (day) Value: 8
  misc_feature: MA Experiment 20000437 PARAMETER Experiment Name: At_Drought_P Parameter: Organism Value: A. thaliana
  misc_feature: MA Experiment 20000437 PARAMETER Experiment Name: At_Drought_P Parameter: Plant Line Value: WS
  misc_feature: MA Experiment 20000437 PARAMETER Experiment Name: At_Drought_P Parameter: Timepoint (hr) Value: 24
  misc_feature: MA Experiment 20000437 PARAMETER Experiment Name: At_Drought_P Parameter: Tissue Value: Whole Plant
  misc_feature: MA Experiment 20000437 PARAMETER Experiment Name: At_Drought_P Parameter: Treatment Value: Drought vs. No Drought
  misc_feature: MA Experiment ID: 20000438 Result: Up-regulated in Transcription
  misc_feature: MA Experiment 20000438 PARAMETER Experiment Name: At_Shoots__P Parameter: Age (day) Value: 14
  misc_feature: MA Experiment 20000438 PARAMETER Experiment Name: At_Shoots__P Parameter: Tissue Value: Shoots vs. Whole Plant
  misc_feature: MA Experiment ID: 20000794 Result: Down-regulated in Transcription
  misc_feature: MA Experiment 20000794 PARAMETER Experiment Name: At_Petals_P Parameter: Age (day) Value: 23-25 days
  misc_feature: MA Experiment 20000794 PARAMETER Experiment Name: At_Petals_P Parameter: Plant Line Value: WS
  misc_feature: MA Experiment 20000794 PARAMETER Experiment Name: At_Petals_P Parameter: Tissue Value: Petals vs. Whole plant
  misc_feature: MA Experiment ID: 20001247 Result: Up-regulated in Transcription
  misc_feature: MA Experiment 20001247 PARAMETER Experiment Name: At_Far-red-induction_P Parameter: Age (day) Value: 7
  misc_feature: MA Experiment 20001247 PARAMETER Experiment Name: At_Far-red-induction_P Parameter: Light Value: Far-red vs. White
  misc_feature: MA Experiment 20001247 PARAMETER Experiment Name: At_Far-red-induction_P Parameter: Organism Value: A. thaliana
  misc_feature: MA Experiment 20001247 PARAMETER Experiment Name: At_Far-red-induction_P Parameter: Plant Line Value: Columbia
  misc_feature: MA Experiment 20001247 PARAMETER Experiment Name: At_Far-red-induction_P Parameter: Timepoint (hr) Value: 1
  misc_feature: MA Experiment 20001247 PARAMETER Experiment Name: At_Far-red-induction_P Parameter: Tissue Value: Whole Plant
  misc_feature: MA Experiment ID: 20001248 Result: Down-regulated in Transcription
  misc_feature: MA Experiment 20001248 PARAMETER Experiment Name: At_Far-red-induction_P Parameter: Age (day) Value: 7
  misc_feature: MA Experiment 20001248 PARAMETER Experiment Name: At_Far-red-induction_P Parameter: Light Value: Far-red vs. White
  misc_feature: MA Experiment 20001248 PARAMETER Experiment Name: At_Far-red-induction_P Parameter: Organism Value: A. thaliana
  misc_feature: MA Experiment 20001248 PARAMETER Experiment Name: At_Far-red-induction_P Parameter: Plant Line Value: Columbia
  misc_feature: MA Experiment 20001248 PARAMETER Experiment Name: At_Far-red-induction_P Parameter: Timepoint (hr) Value: 4
  misc_feature: MA Experiment 20001248 PARAMETER Experiment Name: At_Far-red-induction_P Parameter: Tissue Value: Whole Plant
  misc_feature: MA Experiment ID: 20001554 Result: Down-regulated in Transcription
  misc_feature: MA Experiment 20001554 PARAMETER Experiment Name: At_Drought_Soil_Dry_P Parameter: Age (day) Value: 21
  misc_feature: MA Experiment 20001554 PARAMETER Experiment Name: At_Drought_Soil_Dry_P Parameter: Organism Value: A. thaliana
  misc_feature: MA Experiment 20001554 PARAMETER Experiment Name: At_Drought_Soil_Dry_P Parameter: Plant Line Value: WS
  misc_feature: MA Experiment 20001554 PARAMETER Experiment Name: At_Drought_Soil_Dry_P Parameter: Post Timepoint (hr) Value: None
  misc_feature: MA Experiment 20001554 PARAMETER Experiment Name: At_Drought_Soil_Dry_P Parameter: Post-Treatment Value: None
  misc_feature: MA Experiment 20001554 PARAMETER Experiment Name: At_Drought_Soil_Dry_P Parameter: Timepoint (day) Value: 7
  misc_feature: MA Experiment 20001554 PARAMETER Experiment Name: At_Drought_Soil_Dry_P Parameter: Treatment Value: Drought vs. No Drought
  misc_feature: MA Experiment ID: 20001555 Result: Down-regulated in Transcription
  misc_feature: MA Experiment 20001555 PARAMETER Experiment Name: At_Drought_Soil_Dry_P Parameter: Age (day) Value: 24
  misc_feature: MA Experiment 20001555 PARAMETER Experiment Name: At_Drought_Soil_Dry_P Parameter: Organism Value: A. thaliana
  misc_feature: MA Experiment 20001555 PARAMETER Experiment Name: At_Drought_Soil_Dry_P Parameter: Plant Line Value: WS
  misc_feature: MA Experiment 20001555 PARAMETER Experiment Name: At_Drought_Soil_Dry_P Parameter: Post Timepoint (hr) Value: None
  misc_feature: MA Experiment 20001555 PARAMETER Experiment Name: At_Drought_Soil_Dry_P Parameter: Post-Treatment Value: None
  misc_feature: MA Experiment 20001555 PARAMETER Experiment Name: At_Drought_Soil_Dry_P Parameter: Timepoint (day) Value: 10
  misc_feature: MA Experiment 20001555 PARAMETER Experiment Name: At_Drought_Soil_Dry_P Parameter: Treatment Value: Drought vs. No Drought
  misc_feature: MA Experiment ID: 20001556 Result: Down-regulated in Transcription
  misc_feature: MA Experiment 20001556 PARAMETER Experiment Name: At_Drought_Soil_Dry_P Parameter: Age (day) Value: 26
  misc_feature: MA Experiment 20001556 PARAMETER Experiment Name: At_Drought_Soil_Dry_P Parameter: Organism Value: A. thaliana
  misc_feature: MA Experiment 20001556 PARAMETER Experiment Name: At_Drought_Soil_Dry_P Parameter: Plant Line Value: WS
  misc_feature: MA Experiment 20001556 PARAMETER Experiment Name: At_Drought_Soil_Dry_P Parameter: Post Timepoint (hr) Value: None
  misc_feature: MA Experiment 20001556 PARAMETER Experiment Name: At_Drought_Soil_Dry_P Parameter: Post-Treatment Value: None
  misc_feature: MA Experiment 20001556 PARAMETER Experiment Name: At_Drought_Soil_Dry_P Parameter: Timepoint (day) Value: 12
  misc_feature: MA Experiment 20001556 PARAMETER Experiment Name: At_Drought_Soil_Dry_P Parameter: Treatment Value: Drought vs. No Drought
  misc_feature: MA Experiment ID: 20001557 Result: Down-regulated in Transcription
  misc_feature: MA Experiment 20001557 PARAMETER Experiment Name: At_Drought_Soil_Dry_P Parameter: Age (day) Value: 27
  misc_feature: MA Experiment 20001557 PARAMETER Experiment Name: At_Drought_Soil_Dry_P Parameter: Organism Value: A. thaliana
  misc_feature: MA Experiment 20001557 PARAMETER Experiment Name: At_Drought_Soil_Dry_P Parameter: Plant Line Value: WS
  misc_feature: MA Experiment 20001557 PARAMETER Experiment Name: At_Drought_Soil_Dry_P Parameter: Post Timepoint (hr) Value: 3
  misc_feature: MA Experiment 20001557 PARAMETER Experiment Name: At_Drought_Soil_Dry_P Parameter: Post-Treatment Value: Re-Water vs. No Drought
  misc_feature: MA Experiment 20001557 PARAMETER Experiment Name: At_Drought_Soil_Dry_P Parameter: Timepoint (day) Value: 13
  misc_feature: MA Experiment 20001557 PARAMETER Experiment Name: At_Drought_Soil_Dry_P Parameter: Treatment Value: Drought vs. No Drought
  misc_feature: MA Experiment ID: 20001904 Result: Down-regulated in Transcription
  misc_feature: MA Experiment 20001904 PARAMETER Experiment Name: At_Drought_Reproduction_P Parameter: Age (day) Value: 37
  misc_feature: MA Experiment 20001904 PARAMETER Experiment Name: At_Drought_Reproduction_P Parameter: Organism Value: A. thaliana
  misc_feature: MA Experiment 20001904 PARAMETER Experiment Name: At_Drought_Reproduction_P Parameter: Plant Line Value: WS
  misc_feature: MA Experiment 20001904 PARAMETER Experiment Name: At_Drought_Reproduction_P Parameter: Timepoint (day) Value: 7
  misc_feature: MA Experiment 20001904 PARAMETER Experiment Name: At_Drought_Reproduction_P Parameter: Tissue Value: Rosettes
  misc_feature: MA Experiment 20001904 PARAMETER Experiment Name: At_Drought_Reproduction_P Parameter: Treatment Value: Drought vs. No Drought
  misc_feature: MA Experiment ID: 20001906 Result: Down-regulated in Transcription
  misc_feature: MA Experiment 20001906 PARAMETER Experiment Name: At_Drought_Reproduction_P Parameter: Age (day) Value: 35
  misc_feature: MA Experiment 20001906 PARAMETER Experiment Name: At_Drought_Reproduction_P Parameter: Organism Value: A. thaliana
  misc_feature: MA Experiment 20001906 PARAMETER Experiment Name: At_Drought_Reproduction_P Parameter: Plant Line Value: WS
  misc_feature: MA Experiment 20001906 PARAMETER Experiment Name: At_Drought_Reproduction_P Parameter: Timepoint (day) Value: 5
  misc_feature: MA Experiment 20001906 PARAMETER Experiment Name: At_Drought_Reproduction_P Parameter: Tissue Value: Siliques
  misc_feature: MA Experiment 20001906 PARAMETER Experiment Name: At_Drought_Reproduction_P Parameter: Treatment Value: Drought vs. No Drought
  misc_feature: MA Experiment ID: 20001911 Result: Down-regulated in Transcription
  misc_feature: MA Experiment 20001911 PARAMETER Experiment Name: At_Drought_Reproduction_P Parameter: Age (day) Value: 40
  misc_feature: MA Experiment 20001911 PARAMETER Experiment Name: At_Drought_Reproduction_P Parameter: Organism Value: A. thaliana
  misc_feature: MA Experiment 20001911 PARAMETER Experiment Name: At_Drought_Reproduction_P Parameter: Plant Line Value: WS
  misc_feature: MA Experiment 20001911 PARAMETER Experiment Name: At_Drought_Reproduction_P Parameter: Timepoint (day) Value: 10
  misc_feature: MA Experiment 20001911 PARAMETER Experiment Name: At_Drought_Reproduction_P Parameter: Tissue Value: Flowers
  misc_feature: MA Experiment 20001911 PARAMETER Experiment Name: At_Drought_Reproduction_P Parameter: Treatment Value: Drought vs. No Drought
gaccaaagtttctccaatggctactctctttctctactctaacacattttccttcttctttattacactcgtgtcgttagctcttctaattctccggcaaccctctagggcggcgagttgtacagctcggccggtgatttttaactttggagattctaattcagatacaggaggacttgttgctggacttggttaccccattggcttcccaaatggacgcttatttttccggcgatctaccggtcgtttgtccgacggacgtcttctcatcgatttcctatgtcagagtttgaatacaagtcttttgaggccatacttagattcattgggtagaacaaggtttcaaaatggtgcaaattttgcaattgctggatcctcaactcttcccaaaaacgtccctttctcgcttaacattcaggtcaagcagttcagccatttcaaatcccgatcactcgagctcgcttctagttcaaattcattaaagggcatgttcataagcaacaatggattcaaaaacgcgttgtacatgatcgatattggacagaacgacattgcgcgttcattcgctagaggcaactcgtattctcagacggttaagttgattccacaaattattacggaaataaaaagcagcataaagagattgtatgatgaaggaggaaggagattctggattcacaacactggtccattgggttgtctacctcaaaaactttctatggttaagagcaaagatctcgaccagcacggttgcttagtcagttacaactcggcagcaactctgtttaaccaaggattggatcatatgtgtgaggagctgaggaccgaactacgagatgccaccataatctatattgacatatacgctatcaaatacagtcttattgcaaactccaaccaatacggttttaagagtccgttgatggcgtgttgtggatacggagggactccatacaactacaatgtgaagataacatgtgggcacaaaggctctaatgtatgtgaggaagggtcgcgtttcataagctgggatgggattcattacaccgagacagctaatgccattgtagccatgaaagttctttcaatgcattactctaagccaccaactccgttccatttcttctgccgtcgctaa

SEQ ID NO: 47546 - protein, 378 aa, Arabidopsis thaliana
  peptide (1)..(378): Ceres Seq. ID no. 13588058
  misc_feature (46)..(360): Pfam Name: GDSL-like Lipase/Acylhydrolase Pfam Description: GDSL-like Lipase/Acylhydrolase
  misc_feature (95)..(377): Homolog of NCBI NO: 34894844 NR Description: putative lipase homolog [Oryza sativa (japonica
  misc_feature (44)..(369): Homolog of NCBI NO: 21537184 NR Description: early nodule-specific protein, putative
  misc_feature (44)..(369): Homolog of NCBI NO: 18405064 NR Description: GDSL-motif lipase/hydrolase protein [Arabidopsis
  misc_feature (245)..(368): Homolog of NCBI NO: 15228721 NR Description: GDSL-motif lipase/hydrolase protein [Arabidopsis
  misc_feature (19)..(233): Homolog of NCBI NO: 15228721 NR Description: GDSL-motif lipase/hydrolase protein [Arabidopsis
  misc_feature (42)..(372): Homolog of NCBI NO: 34894838 NR Description: putative lipase homolog [Oryza sativa (japonica
  misc_feature (34)..(376): Homolog of NCBI NO: 34894866 NR Description: putative lipase homolog [Oryza sativa (japonica
  misc_feature (6)..(376): Homolog of NCBI NO: 15217506 NR Description: GDSL-motif lipase/hydrolase protein [Arabidopsis
  misc_feature (50)..(349): Homolog of NCBI NO: 25336281 NR Description: lipase-like protein Lip-4
  misc_feature (6)..(378): Homolog of NCBI NO: 15223585 NR Description: GDSL-motif lipase/hydrolase protein [Arabidopsis
TKVSPMATLFLYSNTFSFFFITLVSLALLILRQPSRAASCTARPVIFNFGDSNSDTGGLVAGLGYPIGFPNGRLFFRRSTGRLSDGRLLIDFLCQSLNTSLLRPYLDSLGRTRFQNGANFAIAGSSTLPKNVPFSLNIQVKQFSHFKSRSLELASSSNSLKGMFISNNGFKNALYMIDIGQNDIARSFARGNSYSQTVKLIPQIITEIKSSIKRLYDEGGRRFWIHNTGPLGCLPQKLSMVKSKDLDQHGCLVSYNSAATLFNQGLDHMCEELRTELRDATIIYIDIYAIKYSLIANSNQYGFKSPLMACCGYGGTPYNYNVKITCGHKGSNVCEEGSRFISWDGIHYTETANAIVAMKVLSMHYSKPPTPFHFFCRR

SEQ ID NO: 47547 - protein, 373 aa, Arabidopsis thaliana
  peptide (1)..(373): Ceres Seq. ID no. 13588059
  misc_feature (41)..(355): Pfam Name: GDSL-like Lipase/Acylhydrolase Pfam Description: GDSL-like Lipase/Acylhydrolase
  misc_feature (90)..(372): Homolog of NCBI NO: 34894844 NR Description: putative lipase homolog [Oryza sativa (japonica
  misc_feature (39)..(364): Homolog of NCBI NO: 21537184 NR Description: early nodule-specific protein, putative
  misc_feature (39)..(364): Homolog of NCBI NO: 18405064 NR Description: GDSL-motif lipase/hydrolase protein [Arabidopsis
  misc_feature (240)..(363): Homolog of NCBI NO: 15228721 NR Description: GDSL-motif lipase/hydrolase protein [Arabidopsis
  misc_feature (14)..(228): Homolog of NCBI NO: 15228721 NR Description: GDSL-motif lipase/hydrolase protein [Arabidopsis
  misc_feature (37)..(367): Homolog of NCBI NO: 34894838 NR Description: putative lipase homolog [Oryza sativa (japonica
  misc_feature (29)..(371): Homolog of NCBI NO: 34894866 NR Description: putative lipase homolog [Oryza sativa (japonica
  misc_feature (1)..(371): Homolog of NCBI NO: 15217506 NR Description: GDSL-motif lipase/hydrolase protein [Arabidopsis
  misc_feature (45)..(344): Homolog of NCBI NO: 25336281 NR Description: lipase-like protein Lip-4
  misc_feature (1)..(373): Homolog of NCBI NO: 15223585 NR Description: GDSL-motif lipase/hydrolase protein [Arabidopsis
MATLFLYSNTFSFFFITLVSLALLILRQPSRAASCTARPVIFNFGDSNSDTGGLVAGLGYPIGFPNGRLFFRRSTGRLSDGRLLIDFLCQSLNTSLLRPYLDSLGRTRFQNGANFAIAGSSTLPKNVPFSLNIQVKQFSHFKSRSLELASSSNSLKGMFISNNGFKNALYMIDIGQNDIARSFARGNSYSQTVKLIPQIITEIKSSIKRLYDEGGRRFWIHNTGPLGCLPQKLSMVKSKDLDQHGCLVSYNSAATLFNQGLDHMCEELRTELRDATIIYIDIYAIKYSLIANSNQYGFKSPLMACCGYGGTPYNYNVKITCGHKGSNVCEEGSRFISWDGIHYTETANAIVAMKVLSMHYSKPPTPFHFFCRR

SEQ ID NO: 47548 - protein, 216 aa, Arabidopsis thaliana
  peptide (1)..(216): Ceres Seq. ID no. 13588060
  misc_feature (1)..(198): Pfam Name: GDSL-like Lipase/Acylhydrolase Pfam Description: GDSL-like Lipase/Acylhydrolase
  misc_feature (1)..(215): Homolog of NCBI NO: 34894844 NR Description: putative lipase homolog [Oryza sativa (japonica
  misc_feature (1)..(207): Homolog of NCBI NO: 21537184 NR Description: early nodule-specific protein, putative
  misc_feature (1)..(207): Homolog of NCBI NO: 18405064 NR Description: GDSL-motif lipase/hydrolase protein [Arabidopsis
  misc_feature (83)..(206): Homolog of NCBI NO: 15228721 NR Description: GDSL-motif lipase/hydrolase protein [Arabidopsis
  misc_feature (1)..(71): Homolog of NCBI NO: 15228721 NR Description: GDSL-motif lipase/hydrolase protein [Arabidopsis
  misc_feature (1)..(210): Homolog of NCBI NO: 34894838 NR Description: putative lipase homolog [Oryza sativa (japonica
  misc_feature (1)..(214): Homolog of NCBI NO: 34894866 NR Description: putative lipase homolog [Oryza sativa (japonica
  misc_feature (1)..(214): Homolog of NCBI NO: 15217506 NR Description: GDSL-motif lipase/hydrolase protein [Arabidopsis
  misc_feature (1)..(187): Homolog of NCBI NO: 25336281 NR Description: lipase-like protein Lip-4
  misc_feature (1)..(216): Homolog of NCBI NO: 15223585 NR Description: GDSL-motif lipase/hydrolase protein [Arabidopsis
MFISNNGFKNALYMIDIGQNDIARSFARGNSYSQTVKLIPQIITEIKSSIKRLYDEGGRRFWIHNTGPLGCLPQKLSMVKSKDLDQHGCLVSYNSAATLFNQGLDHMCEELRTELRDATIIYIDIYAIKYSLIANSNQYGFKSPLMACCGYGGTPYNYNVKITCGHKGSNVCEEGSRFISWDGIHYTETANAIVAMKVLSMHYSKPPTPFHFFCRR

SEQ ID NO: 47549 - DNA, 1613 bp, Arabidopsis thaliana
  misc_feature (1)..(1613): Ceres Seq. ID no. 13647830
  misc_feature: MA Experiment ID: 20000173 Result: Down-regulated in Transcription
  misc_feature: MA Experiment 20000173 PARAMETER Experiment Name: At_42deg_Heat_P Parameter: Age (day) Value: 14
  misc_feature: MA Experiment 20000173 PARAMETER Experiment Name: At_42deg_Heat_P Parameter: Organism Value: A. thaliana
  misc_feature: MA Experiment 20000173 PARAMETER Experiment Name: At_42deg_Heat_P Parameter: Plant Line Value: WS
  misc_feature: MA Experiment 20000173 PARAMETER Experiment Name: At_42deg_Heat_P Parameter: Temperature (deg C) Value: 42 vs. 22
  misc_feature: MA Experiment 20000173 PARAMETER Experiment Name: At_42deg_Heat_P Parameter: Timepoint (hr) Value: 6
  misc_feature: MA Experiment 20000173 PARAMETER Experiment Name: At_42deg_Heat_P Parameter: Tissue Value: Aerial
ggaaattaagattcattcctccatggaagaagctctgtttttattctctttagcttagcttagcttctactgatctgtttttgctacaaaatcccatctttttctttaaaactctttatctctgaatcttgagtttcttgtagaagaagaagcaattttgaatctttcgtaatcataaagattcgtggaggatctctactgatttgtcggaatctctcactacagaatcacttgatcttatgtccggatggaggagagagaaggaaccaacatcaacaacaacatcactagcagtttcggcttgaagcagcaacatgaagctgctgcttctgatggtggttactcaatggacccaccaccaagacccgaaaaccctaacccgtttttagtcccacccactactgtccccgcggccgccaccgtagcagcagctgttactgagaatgcggctactccgtttagcttaacaatgccgacggagaacacttcagctgagcagctgwaaaagaagagaggtaggccgagaaagtataatcccgatgggactcttgccgtgactttatcgccgatgccaatctcgtcctctgttccgttgacgtcggagtttcctccaaggaaacgaggaagaggacgtggcaagtctaatcgatggctcaagaagtctcaaatgttccaattcgatagaagtcctgttgataccaatttggcaggtgtaggaactgctgattttgttggtgccaactttacacctcatgtactgatcgtcaacgccggagaggatgtgacgatgaagataatgacattctctcaacaaggatctcgtgctatctgcatcctttcagctaatggtcccatctccaatgttacgcttcgtcaatctatgacatccggtggtactctaacttatgagggtcgttttgagattctctctttgacgggttcgtttatgcaaaatgactctggaggaactcgaagtagagctggtggtatgagtgtttgccttgcaggaccagatggtcgtgtctttggtggaggactcgctggtctctttcttactgctggtcctgtccaggtaatggtagggacttttatagctggtcaagagcagtcacagctggagctagcaaaagaaagacggctaagatttggggctcaaccatcttctatctcctttaacatatccgcagaagaacggaaggcgagattcgagaggcttaacaagtctgttgctattcctgcaccaaccacttcatacacgcatgtaaacacaacaaatgcggttcacagttactatacaaactcggttaaccatgtcaaggatcccttctcgtctatcccagtaggaggaggaggaggtggagaggtaggagaagaagagggtgaagaagatgacgatgaattagaaggtgaagacgaagaattcggaggcgatagccaatctgacaacgagattccgagctgatgatgatcatycggtttaaacacawtaaagttggmacgggakkkgkkaaaggtttgatggatttcagattttggttgattgtttttattaacacagaatgtttagaagctgctatctttaggttcccatcctcttatgattgttgtagtat

SEQ ID NO: 47550 - protein, 404 aa, Arabidopsis thaliana
  peptide (1)..(404): Ceres Seq. ID no. 15220516
  misc_feature (83)..(294): Homolog of NCBI NO: 37537056 NR Description: putative AT-Hook DNA-binding protein
  misc_feature (3)..(336): Homolog of NCBI NO: 15235790 NR Description: DNA binding protein -related [Arabidopsis
  misc_feature (7)..(316): Homolog of NCBI NO: 7485570 NR Description: hypothetical protein F16J13.150 - Arabidopsis
  misc_feature (7)..(316): Homolog of NCBI NO: 22328578 NR Description: DNA-binding protein -related [Arabidopsis
  misc_feature (38)..(148): Homolog of NCBI NO: 15241763 NR Description: expressed protein [Arabidopsis thaliana]
  misc_feature (157)..(400): Homolog of NCBI NO: 15241763 NR Description: expressed protein [Arabidopsis thaliana]
  misc_feature (38)..(400): Homolog of NCBI NO: 8809639 NR Description: contains similarity to DNA-binding
  misc_feature (1)..(152): Homolog of NCBI NO: 15242131 NR Description: expressed protein [Arabidopsis thaliana]
  misc_feature (123)..(404): Homolog of NCBI NO: 15242131 NR Description: expressed protein [Arabidopsis thaliana]
  misc_feature (1)..(404): Homolog of NCBI NO: 15235023 NR Description: expressed protein [Arabidopsis thaliana]
  misc_feature (86)..(86): Xaa is any aa, unknown or other
MEEREGTNINNNITSSFGLKQQHEAAASDGGYSMDPPPRPENPNPFLVPPTTVPAAATVAAAVTENAATPFSLTMPTENTSAEQLXKKRGRPRKYNPDGTLAVTLSPMPISSSVPLTSEFPPRKRGRGRGKSNRWLKKSQMFQFDRSPVDTNLAGVGTADFVGANFTPHVLIVNAGEDVTMKIMTFSQQGSRAICILSANGPISNVTLRQSMTSGGTLTYEGRFEILSLTGSFMQNDSGGTRSRAGGMSVCLAGPDGRVFGGGLAGLFLTAGPVQVMVGTFIAGQEQSQLELAKERRLRFGAQPSSISFNISAEERKARFERLNKSVAIPAPTTSYTHVNTTNAVHSYYTNSVNHVKDPFSSIPVGGGGGGEVGEEEGEEDDDELEGEDEEFGGDSQSDNEIPS

SEQ ID NO: 47551 - protein, 371 aa, Arabidopsis thaliana
  peptide (1)..(371): Ceres Seq. ID no. 15220517
  misc_feature (50)..(261): Homolog of NCBI NO: 37537056 NR Description: putative AT-Hook DNA-binding protein
  misc_feature (1)..(303): Homolog of NCBI NO: 15235790 NR Description: DNA binding protein -related [Arabidopsis
  misc_feature (1)..(283): Homolog of NCBI NO: 7485570 NR Description: hypothetical protein F16J13.150 - Arabidopsis
  misc_feature (1)..(283): Homolog of NCBI NO: 22328578 NR Description: DNA-binding protein -related [Arabidopsis
  misc_feature (5)..(115): Homolog of NCBI NO: 15241763 NR Description: expressed protein [Arabidopsis thaliana]
  misc_feature (124)..(367): Homolog of NCBI NO: 15241763 NR Description: expressed protein [Arabidopsis thaliana]
  misc_feature (5)..(367): Homolog of NCBI NO: 8809639 NR Description: contains similarity to DNA-binding
  misc_feature (1)..(119): Homolog of NCBI NO: 15242131 NR Description: expressed protein [Arabidopsis thaliana]
  misc_feature (90)..(371): Homolog of NCBI NO: 15242131 NR Description: expressed protein [Arabidopsis thaliana]
  misc_feature (1)..(371): Homolog of NCBI NO: 15235023 NR Description: expressed protein [Arabidopsis thaliana]
  misc_feature (53)..(53): Xaa is any aa, unknown or other
MDPPPRPENPNPFLVPPTTVPAAATVAAAVTENAATPFSLTMPTENTSAEQLXKKRGRPRKYNPDGTLAVTLSPMPISSSVPLTSEFPPRKRGRGRGKSNRWLKKSQMFQFDRSPVDTNLAGVGTADFVGANFTPHVLIVNAGEDVTMKIMTFSQQGSRAICILSANGPISNVTLRQSMTSGGTLTYEGRFEILSLTGSFMQNDSGGTRSRAGGMSVCLAGPDGRVFGGGLAGLFLTAGPVQVMVGTFIAGQEQSQLELAKERRLRFGAQPSSISFNISAEERKARFERLNKSVAIPAPTTSYTHVNTTNAVHSYYTNSVNHVKDPFSSIPVGGGGGGEVGEEEGEEDDDELEGEDEEFGGDSQSDNEIPS

SEQ ID NO: 47552 - protein, 330 aa, Arabidopsis thaliana
  peptide (1)..(330): Ceres Seq. ID no. 15220518
  misc_feature (9)..(220): Homolog of NCBI NO: 37537056 NR Description: putative AT-Hook DNA-binding protein
  misc_feature (1)..(262): Homolog of NCBI NO: 15235790 NR Description: DNA binding protein -related [Arabidopsis
  misc_feature (1)..(242): Homolog of NCBI NO: 7485570 NR Description: hypothetical protein F16J13.150 - Arabidopsis
  misc_feature (1)..(242): Homolog of NCBI NO: 22328578 NR Description: DNA-binding protein -related [Arabidopsis
  misc_feature (1)..(74): Homolog of NCBI NO: 15241763 NR Description: expressed protein [Arabidopsis thaliana]
  misc_feature (83)..(326): Homolog of NCBI NO: 15241763 NR Description: expressed protein [Arabidopsis thaliana]
  misc_feature (1)..(326): Homolog of NCBI NO: 8809639 NR Description: contains similarity to DNA-binding
  misc_feature (1)..(78): Homolog of NCBI NO: 15242131 NR Description: expressed protein [Arabidopsis thaliana]
  misc_feature (49)..(330): Homolog of NCBI NO: 15242131 NR Description: expressed protein [Arabidopsis thaliana]
  misc_feature (1)..(330): Homolog of NCBI NO: 15235023 NR Description: expressed protein [Arabidopsis thaliana]
  misc_feature (12)..(12): Xaa is any aa, unknown or other
MPTENTSAEQLXKKRGRPRKYNPDGTLAVTLSPMPISSSVPLTSEFPPRKRGRGRGKSNRWLKKSQMFQFDRSPVDTNLAGVGTADFVGANFTPHVLIVNAGEDVTMKIMTFSQQGSRAICILSANGPISNVTLRQSMTSGGTLTYEGRFEILSLTGSFMQNDSGGTRSRAGGMSVCLAGPDGRVFGGGLAGLFLTAGPVQVMVGTFIAGQEQSQLELAKERRLRFGAQPSSISFNISAEERKARFERLNKSVAIPAPTTSYTHVNTTNAVHSYYTNSVNHVKDPFSSIPVGGGGGGEVGEEEGEEDDDELEGEDEEFGGDSQSDNEIPS

SEQ ID NO: 47553 - DNA, 2082 bp, Arabidopsis thaliana
  misc_feature (1)..(2082): Ceres Seq. ID no. 13588352
  misc_feature: MA Experiment ID: 20000184 Result: Down-regulated in Transcription
  misc_feature: MA Experiment 20000184 PARAMETER Experiment Name: At_Shoots__P Parameter: Age (day) Value: 7
  misc_feature: MA Experiment 20000184 PARAMETER Experiment Name: At_Shoots__P Parameter: Tissue Value: Shoots vs. Whole Plant
  misc_feature: MA Experiment ID: 20000495 Result: Down-regulated in Transcription
  misc_feature: MA Experiment 20000495 PARAMETER Experiment Name: At_Guard_Cells_P Parameter: Harvest Date Value: 8/2/2002
  misc_feature: MA Experiment 20000495 PARAMETER Experiment Name: At_Guard_Cells_P Parameter: Organism Value: A. thaliana
  misc_feature: MA Experiment 20000495 PARAMETER Experiment Name: At_Guard_Cells_P Parameter: Tissue Value: Guard Cells vs. Leaves
atggcgagtactagtagtggtggtggtggtggtggtgataagaagaagaagaaaggtttctctgtaaaccctaaagattataaacttatggaagaagttggatatggtgctagtgctgttgttcatcgtgctatttatcttcctactaatgaagttgttgctatcaagtctttggatctcgatcgctgcaatagtaatctggatgatataaggagggaggctcagactatgactttgatagaccatccgaatgttataaagtcgttttgttcgtttgctgttgatcatcatctatgggtcgttatgccatttatggctcagggttcgtgtttgcatctaatgaaagcagcgtatccagatggatttgaagaggcggctatatgttctatgctgaaagaaacacttaaagctcttgattatcttcatagacaagggcatatccatcgagatgttaaggctggaaacatacttcttgatgacactggcgagattaagttaggtgattttggtgtctctgcatgtttgtttgacaatggcgataggcaacgtgcaagaaatacatttgttggtactccatgctggatggcaccggaagtcttgcagccagggagtggatacaattcaaaggctgatatatggtcttttggaataacggcgctggagttggctcacggtcatgcacctttctcaaaatatccccctatgaaggtactcttaatgactatccaaaatgcaccacctggccttgattatgaccgtgataagaagttttcaaagaagatgtccagctgcgctcagtcctttaaagaattggtagcattgtgtctggtgaaagatcaaacaaaaaggccaactgctgaaaaattgttgaaacactcatttttcaagaatgtgaagcctccagagatctgtgtaaaaaaattatttgtcgatttaccacctctttggactcgcgtaaaagctcttcagagtgaataccaaagaggagtaagtgcttggaacttcaatatcgaagatttgaaagaacaagcatctttgctagatgatgatgacattctaacagagagtagggaagaagaagaatcttttggcgaacagttgcataataaggtgaatgacagagggcaagtatctggtagtcaattgctatctgaaaacatgaatggaaaggaaaaagcttcagatactgaggtggtagaacctatctgtgaagagaaatccactctcaattcaaccacttcttctgtggaacaaccggcatcaagttcagaacaagacgttccacaggccaagggtaagccagtgagactccagactcatagtggaccactttcatccggtgtcgtgttaatcaattcagactcagagaaggttcatggttatgaaaggtctgagagtgaacggcaactgaaatcatcagtccggagggcacccagctttagtggtcctttgaatcttccaaatcgtgcttcagcaaacagtctttcagctcctatcaaatcttctggaggatttcgtgattctatagatgacaagtcgaaggctaatgtggttcaaatcaaaggaagattttcagtaacatcagaaaacttggatcttgcaagggcatcccctttgagaaaatctgccagtgttgggaattggatacttgattctaaaatgccaacgggccaggccatcaaggagtcaagtagtcatctctcattcattatacctcagcttcaaaatctgttccagcaaaattcaatgcagcaggatcttattatgaatctagtgaataccttacaacaagctgctgaaacaacagatggttctcaaaatggaaagttgccgcctttgcctcgaggatctgacagcaatggaaccgttgtagaacttacagcagctgagcgagagaggttactacttaccaagataaccgagcttcgagctaggttgttcctcttcttcaatcaatcacacctttcttataggagatcaatgtggatgaaagagttgacggaagaacttgaagtagaaaaatcaaaacagacccaactgcagcagaaattgaaatcagtcaccggtcgcgagcaattgtaa

SEQ ID NO: 47554 - protein, 693 aa, Arabidopsis thaliana
  peptide (1)..(693): Ceres Seq. ID no. 13588353
  misc_feature (27)..(295): Pfam Name: Protein kinase domain Pfam Description: Protein kinase domain
  misc_feature (323)..(605): Homolog of NCBI NO: 17529280 NR Description: putative protein kinase [Arabidopsis thaliana]
  misc_feature (13)..(366): Homolog of NCBI NO: 17529280 NR Description: putative protein kinase [Arabidopsis thaliana]
  misc_feature (342)..(503): Homolog of NCBI NO: 17998578 NR Description: putative Ste-20 related kinase, 3'-partial [Oryza
  misc_feature (20)..(362): Homolog of NCBI NO: 17998578 NR Description: putative Ste-20 related kinase, 3'-partial [Oryza
  misc_feature (535)..(678): Homolog of NCBI NO: 37536118 NR Description: putative Ste20-related protein kinase
  misc_feature (77)..(565): Homolog of NCBI NO: 37536118 NR Description: putative Ste20-related protein kinase
  misc_feature (1)..(597): Homolog of NCBI NO: 7486904 NR Description: hypothetical protein T12H20.4 - Arabidopsis
  misc_feature (2)..(611): Homolog of NCBI NO: 7487178 NR Description: hypothetical protein T19F6.90 - Arabidopsis
  misc_feature (2)..(577): Homolog of NCBI NO: 2262107 NR Description: Ser/Thr protein kinase isolog [Arabidopsis
  misc_feature (2)..(691): Homolog of NCBI NO: 22328895 NR Description: protein kinase family [Arabidopsis thaliana]
MASTSSGGGGGGDKKKKKGFSVNPKDYKLMEEVGYGASAVVHRAIYLPTNEVVAIKSLDLDRCNSNLDDIRREAQTMTLIDHPNVIKSFCSFAVDHHLWVVMPFMAQGSCLHLMKAAYPDGFEEAAICSMLKETLKALDYLHRQGHIHRDVKAGNILLDDTGEIKLGDFGVSACLFDNGDRQRARNTFVGTPCWMAPEVLQPGSGYNSKADIWSFGITALELAHGHAPFSKYPPMKVLLMTIQNAPPGLDYDRDKKFSKKMSSCAQSFKELVALCLVKDQTKRPTAEKLLKHSFFKNVKPPEICVKKLFVDLPPLWTRVKALQSEYQRGVSAWNFNIEDLKEQASLLDDDDILTESREEEESFGEQLHNKVNDRGQVSGSQLLSENMNGKEKASDTEVVEPICEEKSTLNSTTSSVEQPASSSEQDVPQAKGKPVRLQTHSGPLSSGVVLINSDSEKVHGYERSESERQLKSSVRRAPSFSGPLNLPNRASANSLSAPIKSSGGFRDSIDDKSKANVVQIKGRFSVTSENLDLARASPLRKSASVGNWILDSKMPTGQAIKESSSHLSFIIPQLQNLFQQNSMQQDLIMNLVNTLQQAAETTDGSQNGKLPPLPRGSDSNGTVVELTAAERERLLLTKITELRARLFLFFNQSHLSYRRSMWMKELTEELEVEKSKQTQLQQKLKSVTGREQL

SEQ ID NO: 47555 - protein, 664 aa, Arabidopsis thaliana
  peptide (1)..(664): Ceres Seq. ID no. 13588354
  misc_feature (1)..(266): Pfam Name: Protein kinase domain Pfam Description: Protein kinase domain
  misc_feature (294)..(576): Homolog of NCBI NO: 17529280 NR Description: putative protein kinase [Arabidopsis thaliana]
  misc_feature (1)..(337): Homolog of NCBI NO: 17529280 NR Description: putative protein kinase [Arabidopsis thaliana]
  misc_feature (313)..(474): Homolog of NCBI NO: 17998578 NR Description: putative Ste-20 related kinase, 3'-partial [Oryza
  misc_feature (1)..(333): Homolog of NCBI NO: 17998578 NR Description: putative Ste-20 related kinase, 3'-partial [Oryza
  misc_feature (506)..(649): Homolog of NCBI NO: 37536118 NR Description: putative Ste20-related protein kinase
  misc_feature (48)..(536): Homolog of NCBI NO: 37536118 NR Description: putative Ste20-related protein kinase
  misc_feature (1)..(568): Homolog of NCBI NO: 7486904 NR Description: hypothetical protein T12H20.4 - Arabidopsis
  misc_feature (1)..(582): Homolog of NCBI NO: 7487178 NR Description: hypothetical protein T19F6.90 - Arabidopsis
  misc_feature (1)..(548): Homolog of NCBI NO: 2262107 NR Description: Ser/Thr protein kinase isolog [Arabidopsis
  misc_feature (1)..(662): Homolog of NCBI NO: 22328895 NR Description: protein kinase family [Arabidopsis thaliana]
MEEVGYGASAVVHRAIYLPTNEVVAIKSLDLDRCNSNLDDIRREAQTMTLIDHPNVIKSFCSFAVDHHLWVVMPFMAQGSCLHLMKAAYPDGFEEAAICSMLKETLKALDYLHRQGHIHRDVKAGNILLDDTGEIKLGDFGVSACLFDNGDRQRARNTFVGTPCWMAPEVLQPGSGYNSKADIWSFGITALELAHGHAPFSKYPPMKVLLMTIQNAPPGLDYDRDKKFSKKMSSCAQSFKELVALCLVKDQTKRPTAEKLLKHSFFKNVKPPEICVKKLFVDLPPLWTRVKALQSEYQRGVSAWNFNIEDLKEQASLLDDDDILTESREEEESFGEQLHNKVNDRGQVSGSQLLSENMNGKEKASDTEVVEPICEEKSTLNSTTSSVEQPASSSEQDVPQAKGKPVRLQTHSGPLSSGVVLINSDSEKVHGYERSESERQLKSSVRRAPSFSGPLNLPNRASANSLSAPIKSSGGFRDSIDDKSKANVVQIKGRFSVTSENLDLARASPLRKSASVGNWILDSKMPTGQAIKESSSHLSFIIPQLQNLFQQNSMQQDLIMNLVNTLQQAAETTDGSQNGKLPPLPRGSDSNGTVVELTAAERERLLLTKITELRARLFLFFNQSHLSYRRSMWMKELTEELEVEKSKQTQLQQKLKSVTGREQL

SEQ ID NO: 47556 - protein, 617 aa, Arabidopsis thaliana
  peptide (1)..(617): Ceres Seq. ID no. 13588355
  misc_feature (1)..(219): Pfam Name: Protein kinase domain Pfam Description: Protein kinase domain
  misc_feature (247)..(529): Homolog of NCBI NO: 17529280 NR Description: putative protein kinase [Arabidopsis thaliana]
  misc_feature (1)..(290): Homolog of NCBI NO: 17529280 NR Description: putative protein kinase [Arabidopsis thaliana]
  misc_feature (266)..(427): Homolog of NCBI NO: 17998578 NR Description: putative Ste-20 related kinase, 3'-partial [Oryza
  misc_feature (1)..(286): Homolog of NCBI NO: 17998578 NR Description: putative Ste-20 related kinase, 3'-partial [Oryza
  misc_feature (459)..(602): Homolog of NCBI NO: 37536118 NR Description: putative Ste20-related protein kinase
  misc_feature (1)..(489): Homolog of NCBI NO: 37536118 NR Description: putative Ste20-related protein kinase
  misc_feature (1)..(521): Homolog of NCBI NO: 7486904 NR Description: hypothetical protein T12H20.4 - Arabidopsis
  misc_feature (1)..(535): Homolog of NCBI NO: 7487178 NR Description: hypothetical protein T19F6.90 - Arabidopsis
  misc_feature (1)..(501): Homolog of NCBI NO: 2262107 NR Description: Ser/Thr protein kinase isolog [Arabidopsis
  misc_feature (1)..(615): Homolog of NCBI NO: 22328895 NR Description: protein kinase family [Arabidopsis thaliana]
MTLIDHPNVIKSFCSFAVDHHLWVVMPFMAQGSCLHLMKAAYPDGFEEAAICSMLKETLKALDYLHRQGHIHRDVKAGNILLDDTGEIKLGDFGVSACLFDNGDRQRARNTFVGTPCWMAPEVLQPGSGYNSKADIWSFGITALELAHGHAPFSKYPPMKVLLMTIQNAPPGLDYDRDKKFSKKMSSCAQSFKELVALCLVKDQTKRPTAEKLLKHSFFKNVKPPEICVKKLFVDLPPLWTRVKALQSEYQRGVSAWNFNIEDLKEQASLLDDDDILTESREEEESFGEQLHNKVNDRGQVSGSQLLSENMNGKEKASDTEVVEPICEEKSTLNSTTSSVEQPASSSEQDVPQAKGKPVRLQTHSGPLSSGVVLINSDSEKVHGYERSESERQLKSSVRRAPSFSGPLNLPNRASANSLSAPIKSSGGFRDSIDDKSKANVVQIKGRFSVTSENLDLARASPLRKSASVGNWILDSKMPTGQAIKESSSHLSFIIPQLQNLFQQNSMQQDLIMNLVNTLQQAAETTDGSQNGKLPPLPRGSDSNGTVVELTAAERERLLLTKITELRARLFLFFNQSHLSYRRSMWMKELTEELEVEKSKQTQLQQKLKSVTGREQL

SEQ ID NO: 47557 - DNA, 1176 bp, Arabidopsis thaliana
  misc_feature (1)..(1176): Ceres Seq. ID no. 13588445
  misc_feature: MA Experiment ID: 20000227 Result: Down-regulated in Transcription
  misc_feature: MA Experiment 20000227 PARAMETER Experiment Name: At_Root-Tips-vs-Tops_P Parameter: Tissue Value: Root Tips vs. Root Tops
  misc_feature: MA Experiment ID: 20000438 Result: Up-regulated in Transcription
  misc_feature: MA Experiment 20000438 PARAMETER Experiment Name: At_Shoots__P Parameter: Age (day) Value: 14
  misc_feature: MA Experiment 20000438 PARAMETER Experiment Name: At_Shoots__P Parameter: Tissue Value: Shoots vs. Whole Plant
attagcatgagaaatggcatccattgattctctccaattccattctctctgcaatctccagtcgtcgattggaagagccaagctccagaatccttcaagtttggttattttcagacggagacccgtaaatctgaattgggttcaattcgaaactaaaggaagtttcgtgtgtaaagcgattggtgattcctcgactccagatgaagatattcagaacactcaaagtgatgataatgttgttgttgttactgctacgactcagagtgacattccccatgattccgagtattcaatttcgaggtttcgaagtatggttaccacactccctcctgttgtcttcctgatgaagaagtgctcagtgaacagcatttggattggggtctgcatcacggctactgttttggtcgctgcgattagggcttatgtagtcagaaagtcaagagataatcagcgtgctggctctgttgctgatcttgtgagacgtggccagctgaggtctggtgatagaagaggcatctccaaatctcttaactacgaggacccattcaacaacccttttgtgaaacttgataaaggaagctcaacggtagagatgtgcgggaaagtttatcggctagctccagtcacacttacagagaaagaacaaactattcatcagaaaagaaggtcaagagcttaccaatggaagcgaccaacgatttttctcaaagaaggggactcgataccacctgatgttgatcccgatacagtcagatggatcccggccaatcatccgtttgccaccacagttagcgatatcgatcaagaccttgcccagaataatgtctaccagaagcaaggtgttcctttccggattcgagctgagcatgaagctatgcagaaaaagcttgaagctttacaaaatgaggagaaattgaacaatctgagtattgacagtcaaaatgccagagatttccagaggccatacaagttctcagcgaagctcgaaggcgagaatatccagaagaattctcaggagaatcatacaggcaattcatcctctgaggaaacgcacaagtcctgagacgtactaatctaattgtaaatacagttttccctcgagagtcatacttgcgttccaagaaactggagattttctttgtagtagatcacacttacctaaatctatgtttttct

SEQ ID NO: 47558 - protein, 349 aa, Arabidopsis thaliana
  peptide (1)..(349): Ceres Seq. ID no. 13588446
  misc_feature (1)..(349): Homolog of NCBI NO: 25373024 NR Description: protein F2D10.35 [imported] - Arabidopsis
  misc_feature (1)..(349): Homolog of NCBI NO: 15218043 NR Description: expressed protein [Arabidopsis thaliana]
MASIDSLQFHSLCNLQSSIGRAKLQNPSSLVIFRRRPVNLNWVQFETKGSFVCKAIGDSSTPDEDIQNTQSDDNVVVVTATTQSDIPHDSEYSISRFRSMVTTLPPVVFLMKKCSVNSIWIGVCITATVLVAAIRAYVVRKSRDNQRAGSVADLVRRGQLRSGDRRGISKSLNYEDPFNNPFVKLDKGSSTVEMCGKVYRLAPVTLTEKEQTIHQKRRSRAYQWKRPTIFLKEGDSIPPDVDPDTVRWIPANHPFATTVSDIDQDLAQNNVYQKQGVPFRIRAEHEAMQKKLEALQNEEKLNNLSIDSQNARDFQRPYKFSAKLEGENIQKNSQENHTGNSSSEETHKS

SEQ ID NO: 47559 - protein, 250 aa, Arabidopsis thaliana
  peptide (1)..(250): Ceres Seq. ID no. 13588447
  misc_feature (1)..(250): Homolog of NCBI NO: 25373024 NR Description: protein F2D10.35 [imported] - Arabidopsis
  misc_feature (1)..(250): Homolog of NCBI NO: 15218043 NR Description: expressed protein [Arabidopsis thaliana]
MVTTLPPVVFLMKKCSVNSIWIGVCITATVLVAAIRAYVVRKSRDNQRAGSVADLVRRGQLRSGDRRGISKSLNYEDPFNNPFVKLDKGSSTVEMCGKVYRLAPVTLTEKEQTIHQKRRSRAYQWKRPTIFLKEGDSIPPDVDPDTVRWIPANHPFATTVSDIDQDLAQNNVYQKQGVPFRIRAEHEAMQKKLEALQNEEKLNNLSIDSQNARDFQRPYKFSAKLEGENIQKNSQENHTGNSSSEETHKS

SEQ ID NO: 47560 - protein, 239 aa, Arabidopsis thaliana
  peptide (1)..(239): Ceres Seq. ID no. 13588448
  misc_feature (1)..(239): Homolog of NCBI NO: 25373024 NR Description: protein F2D10.35 [imported] - Arabidopsis
  misc_feature (1)..(239): Homolog of NCBI NO: 15218043 NR Description: expressed protein [Arabidopsis thaliana]
MKKCSVNSIWIGVCITATVLVAAIRAYVVRKSRDNQRAGSVADLVRRGQLRSGDRRGISKSLNYEDPFNNPFVKLDKGSSTVEMCGKVYRLAPVTLTEKEQTIHQKRRSRAYQWKRPTIFLKEGDSIPPDVDPDTVRWIPANHPFATTVSDIDQDLAQNNVYQKQGVPFRIRAEHEAMQKKLEALQNEEKLNNLSIDSQNARDFQRPYKFSAKLEGENIQKNSQENHTGNSSSEETHKS

SEQ ID NO: 47561 - DNA, 1005 bp, Arabidopsis thaliana; identical to SEQ ID NO: 27241
  misc_feature (1)..(1005): Ceres Seq. ID no. 13592440
  misc_feature: MA Experiment ID: 108461 Result: Up-regulated in Transcription
  misc_feature: MA Experiment 108461 PARAMETER Experiment Name: At_Germinating_Seeds_cDNA_P Parameter: Age (day) Value: 1 vs. 0
  misc_feature: MA Experiment 108461 PARAMETER Experiment Name: At_Germinating_Seeds_cDNA_P Parameter: Tissue Value: Germinating Seeds
  misc_feature: MA Experiment ID: 108462 Result: Up-regulated in Transcription
  misc_feature: MA Experiment 108462 PARAMETER Experiment Name: At_Germinating_Seeds_cDNA_P Parameter: Age (day) Value: 2 vs. 0
  misc_feature: MA Experiment 108462 PARAMETER Experiment Name: At_Germinating_Seeds_cDNA_P Parameter: Tissue Value: Germinating Seeds
  misc_feature: MA Experiment ID: 108463 Result: Up-regulated in Transcription
  misc_feature: MA Experiment 108463 PARAMETER Experiment Name: At_Germinating_Seeds_cDNA_P Parameter: Age (day) Value: 3 vs. 0
  misc_feature: MA Experiment 108463 PARAMETER Experiment Name: At_Germinating_Seeds_cDNA_P Parameter: Tissue Value: Germinating Seeds
  misc_feature: MA Experiment ID: 108464 Result: Up-regulated in Transcription
  misc_feature: MA Experiment 108464 PARAMETER Experiment Name: At_Germinating_Seeds_cDNA_P Parameter: Age (day) Value: 4 vs. 0
  misc_feature: MA Experiment 108464 PARAMETER Experiment Name: At_Germinating_Seeds_cDNA_P Parameter: Tissue Value: Germinating Seeds
  misc_feature: MA Experiment ID: 20000070 Result: Down-regulated in Transcription
  misc_feature: MA Experiment 20000070 PARAMETER Experiment Name: At_100uM_ABA_Mutants_cDNA_P Parameter: Plant Line Value: CS24
  misc_feature: MA Experiment 20000070 PARAMETER Experiment Name: At_100uM_ABA_Mutants_cDNA_P Parameter: Timepoint (hr) Value: 6
  misc_feature: MA Experiment 20000070 PARAMETER Experiment Name: At_100uM_ABA_Mutants_cDNA_P Parameter: Tissue Value: Aerial
  misc_feature: MA Experiment 20000070 PARAMETER Experiment Name: At_100uM_ABA_Mutants_cDNA_P Parameter: Treatment Value: 100uM ABA vs. No Treatment
  misc_feature: MA Experiment ID: 20000071 Result: Down-regulated in Transcription
  misc_feature: MA Experiment 20000071 PARAMETER Experiment Name: At_100uM_ABA_Mutants_cDNA_P Parameter: Plant Line Value: CS8104
  misc_feature: MA Experiment 20000071 PARAMETER Experiment Name: At_100uM_ABA_Mutants_cDNA_P Parameter: Timepoint (hr) Value: 6
  misc_feature: MA Experiment 20000071 PARAMETER Experiment Name: At_100uM_ABA_Mutants_cDNA_P Parameter: Tissue Value: Aerial
  misc_feature: MA Experiment 20000071 PARAMETER Experiment Name: At_100uM_ABA_Mutants_cDNA_P Parameter: Treatment Value: 100uM ABA vs. No Treatment
  misc_feature: MA Experiment ID: 20000072 Result: Down-regulated in Transcription
  misc_feature: MA Experiment 20000072 PARAMETER Experiment Name: At_100uM_ABA_Mutants_cDNA_P Parameter: Plant Line Value: CS8105
  misc_feature: MA Experiment 20000072 PARAMETER Experiment Name: At_100uM_ABA_Mutants_cDNA_P Parameter: Timepoint (hr) Value: 6
  misc_feature: MA Experiment 20000072 PARAMETER Experiment Name: At_100uM_ABA_Mutants_cDNA_P Parameter: Tissue Value: Aerial
  misc_feature: MA Experiment 20000072 PARAMETER Experiment Name: At_100uM_ABA_Mutants_cDNA_P Parameter: Treatment Value: 100uM ABA vs. No Treatment
  misc_feature: MA Experiment ID: 20000086 Result: Down-regulated in Transcription
  misc_feature: MA Experiment 20000086 PARAMETER Experiment Name: At_100uM_ABA_Mutants_cDNA_P Parameter: Plant Line Value: CS22
  misc_feature: MA Experiment 20000086 PARAMETER Experiment Name: At_100uM_ABA_Mutants_cDNA_P Parameter: Timepoint (hr) Value: 6
  misc_feature: MA Experiment 20000086 PARAMETER Experiment Name: At_100uM_ABA_Mutants_cDNA_P Parameter: Tissue Value: Aerial
  misc_feature: MA Experiment 20000086 PARAMETER Experiment Name: At_100uM_ABA_Mutants_cDNA_P Parameter: Treatment Value: 100uM ABA vs. No Treatment
  misc_feature: MA Experiment ID: 20000087 Result: Down-regulated in Transcription
  misc_feature: MA Experiment 20000087 PARAMETER Experiment Name: At_100uM_ABA_Mutants_cDNA_P Parameter: Plant Line Value: WS
  misc_feature: MA Experiment 20000087 PARAMETER Experiment Name: At_100uM_ABA_Mutants_cDNA_P Parameter: Timepoint (hr) Value: 6
  misc_feature: MA Experiment 20000087 PARAMETER Experiment Name: At_100uM_ABA_Mutants_cDNA_P Parameter: Tissue Value: Aerial
  misc_feature: MA Experiment 20000087 PARAMETER Experiment Name: At_100uM_ABA_Mutants_cDNA_P Parameter: Treatment Value: 100uM ABA vs. No Treatment
  misc_feature: MA Experiment ID: 20000088 Result: Down-regulated in Transcription
  misc_feature: MA Experiment 20000088 PARAMETER Experiment Name: At_100uM_ABA_Mutants_cDNA_P Parameter: Plant Line Value: Landsberg
  misc_feature: MA Experiment 20000088 PARAMETER Experiment Name: At_100uM_ABA_Mutants_cDNA_P Parameter: Timepoint (hr) Value: 6
  misc_feature: MA Experiment 20000088 PARAMETER Experiment Name: At_100uM_ABA_Mutants_cDNA_P Parameter: Tissue Value: Aerial
  misc_feature: MA Experiment 20000088 PARAMETER Experiment Name: At_100uM_ABA_Mutants_cDNA_P Parameter: Treatment Value: 100uM ABA vs. No Treatment
  misc_feature: MA Experiment ID: 20000089 Result: Down-regulated in Transcription
  misc_feature: MA Experiment ID: 20000090 Result: Down-regulated in Transcription
  misc_feature: MA Experiment ID: 20000113 Result: Up-regulated in Transcription
  misc_feature: MA Experiment 20000113 PARAMETER Experiment Name: At_42deg_Heat_cDNA_P Parameter: Temperature (deg C) Value: 42 vs. 22
  misc_feature: MA Experiment 20000113 PARAMETER Experiment Name: At_42deg_Heat_cDNA_P Parameter: Timepoint (hr) Value: 8
  misc_feature: MA Experiment 20000113 PARAMETER Experiment Name: At_42deg_Heat_cDNA_P Parameter: Tissue Value: Aerial
  misc_feature: MA Experiment ID: 20000117 Result: Down-regulated in Transcription
  misc_feature: MA Experiment 20000117 PARAMETER Experiment Name: At_100uM_ABA_Mutants_cDNA_P Parameter: Plant Line Value: Columbia
  misc_feature: MA Experiment 20000117 PARAMETER Experiment Name: At_100uM_ABA_Mutants_cDNA_P Parameter: Timepoint (hr) Value: 6
  misc_feature: MA Experiment 20000117 PARAMETER Experiment Name: At_100uM_ABA_Mutants_cDNA_P Parameter: Tissue Value: Aerial
  misc_feature: MA Experiment 20000117 PARAMETER Experiment Name: At_100uM_ABA_Mutants_cDNA_P Parameter: Treatment Value: 100uM ABA vs. No Treatment
  misc_feature: MA Experiment ID: 20000179 Result: Up-regulated in Transcription
  misc_feature: MA Experiment 20000179 PARAMETER Experiment Name: At_Germinating_Seeds_P Parameter: Age (hr) Value: 6 vs. 0
  misc_feature: MA Experiment 20000179 PARAMETER Experiment Name: At_Germinating_Seeds_P Parameter: Tissue Value: Germinating Seeds
  misc_feature: MA Experiment ID: 20000180 Result: Up-regulated in Transcription
  misc_feature: MA Experiment 20000180 PARAMETER Experiment Name: At_Germinating_Seeds_P Parameter: Age (hr) Value: 24 vs. 0
  misc_feature: MA Experiment 20000180 PARAMETER Experiment Name: At_Germinating_Seeds_P Parameter: Tissue Value: Germinating Seeds
  misc_feature: MA Experiment ID: 20000184 Result: Up-regulated in Transcription
  misc_feature: MA Experiment 20000184 PARAMETER Experiment Name: At_Shoots__P Parameter: Age (day) Value: 7
  misc_feature: MA Experiment 20000184 PARAMETER Experiment Name: At_Shoots__P Parameter: Tissue Value: Shoots vs. Whole Plant
  misc_feature: MA Experiment ID: 20000185 Result: Down-regulated in Transcription
  misc_feature: MA Experiment 20000185 PARAMETER Experiment Name: At_Roots__P Parameter: Age (day) Value: 7 vs. 21
  misc_feature: MA Experiment 20000185 PARAMETER Experiment Name: At_Roots__P Parameter: Organism Value: A. thaliana
  misc_feature: MA Experiment 20000185 PARAMETER Experiment Name: At_Roots__P Parameter: Tissue Value: Roots vs. Whole Plant
  misc_feature: MA Experiment ID: 20000227 Result: Down-regulated in Transcription
  misc_feature: MA Experiment 20000227 PARAMETER Experiment Name: At_Root-Tips-vs-Tops_P Parameter: Tissue Value: Root Tips vs. Root Tops
  misc_feature: MA Experiment ID: 20000438 Result: Up-regulated in Transcription
  misc_feature: MA Experiment 20000438 PARAMETER Experiment Name: At_Shoots__P Parameter: Age (day) Value: 14
  misc_feature: MA Experiment 20000438 PARAMETER Experiment Name: At_Shoots__P Parameter: Tissue Value: Shoots vs. Whole Plant
  misc_feature: MA Experiment ID: 20000439 Result: Down-regulated in Transcription
  misc_feature: MA Experiment 20000439 PARAMETER Experiment Name: At_Roots__P Parameter: Age (day) Value: 14 vs. 21
  misc_feature: MA Experiment 20000439 PARAMETER Experiment Name: At_Roots__P Parameter: Organism Value: A. thaliana
  misc_feature: MA Experiment 20000439 PARAMETER Experiment Name: At_Roots__P Parameter: Tissue Value: Roots vs. Whole Plant
  misc_feature: MA Experiment ID: 20000573 Result: Down-regulated in Transcription
  misc_feature: MA Experiment 20000573 PARAMETER Experiment Name: At_100uM_ABA_Mutants__P Parameter: Organism Value: A. thaliana
  misc_feature: MA Experiment 20000573 PARAMETER Experiment Name: At_100uM_ABA_Mutants__P Parameter: Plant Line Value: CS22 vs. Ler wt
  misc_feature: MA Experiment 20000573 PARAMETER Experiment Name: At_100uM_ABA_Mutants__P Parameter: Timepoint (hr) Value: N/A
  misc_feature: MA Experiment 20000573 PARAMETER Experiment Name: At_100uM_ABA_Mutants__P Parameter: Tissue Value: Whole Plant
  misc_feature: MA Experiment 20000573 PARAMETER Experiment Name: At_100uM_ABA_Mutants__P Parameter: Treatment Value: None
  misc_feature: MA Experiment ID: 20001248 Result: Down-regulated in Transcription
  misc_feature: MA Experiment 20001248 PARAMETER Experiment Name: At_Far-red-induction_P Parameter: Age (day) Value: 7
  misc_feature: MA Experiment 20001248 PARAMETER Experiment Name: At_Far-red-induction_P Parameter: Light Value: Far-red vs. White
  misc_feature: MA Experiment 20001248 PARAMETER Experiment Name: At_Far-red-induction_P Parameter: Organism Value: A. thaliana
  misc_feature: MA Experiment 20001248 PARAMETER Experiment Name: At_Far-red-induction_P Parameter: Plant Line Value: Columbia
  misc_feature: MA Experiment 20001248 PARAMETER Experiment Name: At_Far-red-induction_P Parameter: Timepoint (hr) Value: 4
  misc_feature: MA Experiment 20001248 PARAMETER Experiment Name: At_Far-red-induction_P Parameter: Tissue Value: Whole Plant
  misc_feature: MA Experiment ID: 20001450 Result: Down-regulated in Transcription
  misc_feature: MA Experiment 20001450 PARAMETER Experiment Name: At_Far-red-induction_P Parameter: Age (day) Value: 7
  misc_feature: MA Experiment 20001450 PARAMETER Experiment Name: At_Far-red-induction_P Parameter: Light Value: Far-red vs. White
  misc_feature: MA Experiment 20001450 PARAMETER Experiment Name: At_Far-red-induction_P Parameter: Organism Value: A. thaliana
  misc_feature: MA Experiment 20001450 PARAMETER Experiment Name: At_Far-red-induction_P Parameter: Plant Line Value: Columbia
  misc_feature: MA Experiment 20001450 PARAMETER Experiment Name: At_Far-red-induction_P Parameter: Timepoint (hr) Value: 8
  misc_feature: MA Experiment 20001450 PARAMETER Experiment Name: At_Far-red-induction_P Parameter: Tissue Value: Whole Plant
  misc_feature: MA Experiment ID: 20001557 Result: Down-regulated in Transcription
  misc_feature: MA Experiment 20001557 PARAMETER Experiment Name: At_Drought_Soil_Dry_P Parameter: Age (day) Value: 27
  misc_feature: MA Experiment 20001557 PARAMETER Experiment Name: At_Drought_Soil_Dry_P Parameter: Organism Value: A. thaliana
  misc_feature: MA Experiment 20001557 PARAMETER Experiment Name: At_Drought_Soil_Dry_P Parameter: Plant Line Value: WS
  misc_feature: MA Experiment 20001557 PARAMETER Experiment Name: At_Drought_Soil_Dry_P Parameter: Post Timepoint (hr) Value: 3
  misc_feature: MA Experiment 20001557 PARAMETER Experiment Name: At_Drought_Soil_Dry_P Parameter: Post-Treatment Value: Re-Water vs. No Drought
  misc_feature: MA Experiment 20001557 PARAMETER Experiment Name: At_Drought_Soil_Dry_P Parameter: Timepoint (day) Value: 13
  misc_feature: MA Experiment 20001557 PARAMETER Experiment Name: At_Drought_Soil_Dry_P Parameter: Treatment Value: Drought vs. No Drought
  misc_feature: MA Experiment ID: 20001905 Result: Down-regulated in Transcription
  misc_feature: MA Experiment 20001905 PARAMETER Experiment Name: At_Drought_Reproduction_P Parameter: Age (day) Value: 40
  misc_feature: MA Experiment 20001905 PARAMETER Experiment Name: At_Drought_Reproduction_P Parameter: Organism Value: A. thaliana
  misc_feature: MA Experiment 20001905 PARAMETER Experiment Name: At_Drought_Reproduction_P Parameter: Plant Line Value: WS
  misc_feature: MA Experiment 20001905 PARAMETER Experiment Name: At_Drought_Reproduction_P Parameter: Timepoint (day) Value: 10
  misc_feature: MA Experiment 20001905 PARAMETER Experiment Name: At_Drought_Reproduction_P Parameter: Tissue Value: Rosettes
  misc_feature: MA Experiment 20001905 PARAMETER Experiment Name: At_Drought_Reproduction_P Parameter: Treatment Value: Drought vs. No Drought
  misc_feature: MA Experiment ID: 20001908 Result: Down-regulated in Transcription
  misc_feature: MA Experiment 20001908 PARAMETER Experiment Name: At_Drought_Reproduction_P Parameter: Age (day) Value: 40
  misc_feature: MA Experiment 20001908 PARAMETER Experiment Name: At_Drought_Reproduction_P Parameter: Organism Value: A. thaliana
  misc_feature: MA Experiment 20001908 PARAMETER Experiment Name: At_Drought_Reproduction_P Parameter: Plant Line Value: WS
  misc_feature: MA Experiment 20001908 PARAMETER Experiment Name: At_Drought_Reproduction_P Parameter: Timepoint (day) Value: 10
  misc_feature: MA Experiment 20001908 PARAMETER Experiment Name: At_Drought_Reproduction_P Parameter: Tissue Value: Siliques
  misc_feature: MA Experiment 20001908 PARAMETER Experiment Name: At_Drought_Reproduction_P Parameter: Treatment Value: Drought vs. No Drought

SEQ ID NO: 47562 - protein, 293 aa, Arabidopsis thaliana; identical to SEQ ID NO: 27242
  peptide (1)..(293): Ceres Seq. ID no. 13592441
  misc_feature (180)..(286): Homolog of NCBI NO: 23042896 NR Description: hypothetical protein [Trichodesmium erythraeum
  misc_feature (183)..(286): Homolog of NCBI NO: 17229007 NR Description: hypothetical protein [Nostoc sp. PCC 7120]
  misc_feature (181)..(287): Homolog of NCBI NO: 33864786 NR Description: conserved hypothetical protein [Synechococcus sp.
  misc_feature (181)..(286): Homolog of NCBI NO: 16330950 NR Description: hypothetical protein [Synechocystis sp. PCC 6803]
  misc_feature (174)..(286): Homolog of NCBI NO: 17230241 NR Description: hypothetical protein [Nostoc sp. PCC 7120]
  misc_feature (174)..(286): Homolog of NCBI NO: 23130190 NR Description: hypothetical protein [Nostoc punctiforme]
  misc_feature (112)..(142): Homolog of NCBI NO: 22299036 NR Description: ORF_ID:tll1493~hypothetical protein
  misc_feature (181)..(286): Homolog of NCBI NO: 22299036 NR Description: ORF_ID:tll1493~hypothetical protein
  misc_feature (22)..(293): Homolog of NCBI NO: 15228623 NR Description: expressed protein [Arabidopsis thaliana]
  misc_feature (180)..(286): Homolog of NCBI NO: 23042896 NR Description: hypothetical protein [Trichodesmium erythraeum
  misc_feature (183)..(286): Homolog of NCBI NO: 17229007 NR Description: hypothetical protein [Nostoc sp. PCC 7120]
  misc_feature (181)..(287): Homolog of NCBI NO: 33864786 NR Description: conserved hypothetical protein [Synechococcus sp.
  misc_feature (181)..(286): Homolog of NCBI NO: 16330950 NR Description: hypothetical protein [Synechocystis sp. PCC 6803]
  misc_feature (174)..(286): Homolog of NCBI NO: 17230241 NR Description: hypothetical protein [Nostoc sp. PCC 7120]
  misc_feature (174)..(286): Homolog of NCBI NO: 23130190 NR Description: hypothetical protein [Nostoc punctiforme]
  misc_feature (112)..(142): Homolog of NCBI NO: 22299036 NR Description: ORF_ID:tll1493~hypothetical protein
  misc_feature (181)..(286): Homolog of NCBI NO: 22299036 NR Description: ORF_ID:tll1493~hypothetical protein
  misc_feature (22)..(293): Homolog of NCBI NO: 15228623 NR Description: expressed protein [Arabidopsis thaliana]

SEQ ID NO: 47563 - protein, 272 aa, Arabidopsis thaliana; identical to SEQ ID NO: 27243
  peptide (1)..(272): Ceres Seq. ID no. 13592442
  misc_feature (159)..(265): Homolog of NCBI NO: 23042896 NR Description: hypothetical protein [Trichodesmium erythraeum
  misc_feature (162)..(265): Homolog of NCBI NO: 17229007 NR Description: hypothetical protein [Nostoc sp. PCC 7120]
  misc_feature (160)..(266): Homolog of NCBI NO: 33864786 NR Description: conserved hypothetical protein [Synechococcus sp.
  misc_feature (160)..(265): Homolog of NCBI NO: 16330950 NR Description: hypothetical protein [Synechocystis sp. PCC 6803]
  misc_feature (153)..(265): Homolog of NCBI NO: 17230241 NR Description: hypothetical protein [Nostoc sp. PCC 7120]
  misc_feature (153)..(265): Homolog of NCBI NO: 23130190 NR Description: hypothetical protein [Nostoc punctiforme]
  misc_feature (91)..(121): Homolog of NCBI NO: 22299036 NR Description: ORF_ID:tll1493~hypothetical protein
  misc_feature (160)..(265): Homolog of NCBI NO: 22299036 NR Description: ORF_ID:tll1493~hypothetical protein
  misc_feature (1)..(272): Homolog of NCBI NO: 15228623 NR Description: expressed protein [Arabidopsis thaliana]
  misc_feature (159)..(265): Homolog of NCBI NO: 23042896 NR Description: hypothetical protein [Trichodesmium erythraeum
  misc_feature (162)..(265): Homolog of NCBI NO: 17229007 NR Description: hypothetical protein [Nostoc sp. PCC 7120]
  misc_feature (160)..(266): Homolog of NCBI NO: 33864786 NR Description: conserved hypothetical protein [Synechococcus sp.
  misc_feature (160)..(265): Homolog of NCBI NO: 16330950 NR Description: hypothetical protein [Synechocystis sp. PCC 6803]
  misc_feature (153)..(265): Homolog of NCBI NO: 17230241 NR Description: hypothetical protein [Nostoc sp. PCC 7120]
  misc_feature (153)..(265): Homolog of NCBI NO: 23130190 NR Description: hypothetical protein [Nostoc punctiforme]
  misc_feature (91)..(121): Homolog of NCBI NO: 22299036 NR Description: ORF_ID:tll1493~hypothetical protein
  misc_feature (160)..(265): Homolog of NCBI NO: 22299036 NR Description: ORF_ID:tll1493~hypothetical protein
  misc_feature (1)..(272): Homolog of NCBI NO: 15228623 NR Description: expressed protein [Arabidopsis thaliana]

SEQ ID NO: 47564 - protein, 178 aa, Arabidopsis thaliana; identical to SEQ ID NO: 27244
  peptide (1)..(178): Ceres Seq. ID no. 13592443
  misc_feature (65)..(171): Homolog of NCBI NO: 23042896 NR Description: hypothetical protein [Trichodesmium erythraeum
  misc_feature (68)..(171): Homolog of NCBI NO: 17229007 NR Description: hypothetical protein [Nostoc sp. PCC 7120]
  misc_feature (66)..(172): Homolog of NCBI NO: 33864786 NR Description: conserved hypothetical protein [Synechococcus sp.
  misc_feature (66)..(171): Homolog of NCBI NO: 16330950 NR Description: hypothetical protein [Synechocystis sp. PCC 6803]
  misc_feature (59)..(171): Homolog of NCBI NO: 17230241 NR Description: hypothetical protein [Nostoc sp. PCC 7120]
  misc_feature (59)..(171): Homolog of NCBI NO: 23130190 NR Description: hypothetical protein [Nostoc punctiforme]
  misc_feature (1)..(27): Homolog of NCBI NO: 22299036 NR Description: ORF_ID:tll1493~hypothetical protein
  misc_feature (66)..(171): Homolog of NCBI NO: 22299036 NR Description: ORF_ID:tll1493~hypothetical protein
  misc_feature (1)..(178): Homolog of NCBI NO: 15228623 NR Description: expressed protein [Arabidopsis thaliana]
  misc_feature (65)..(171): Homolog of NCBI NO: 23042896 NR Description: hypothetical protein [Trichodesmium erythraeum
  misc_feature (68)..(171): Homolog of NCBI NO: 17229007 NR Description: hypothetical protein [Nostoc sp. PCC 7120]
  misc_feature (66)..(172): Homolog of NCBI NO: 33864786 NR Description: conserved hypothetical protein [Synechococcus sp.
  misc_feature (66)..(171): Homolog of NCBI NO: 16330950 NR Description: hypothetical protein [Synechocystis sp. PCC 6803]
  misc_feature (59)..(171): Homolog of NCBI NO: 17230241 NR Description: hypothetical protein [Nostoc sp. PCC 7120]
  misc_feature (59)..(171): Homolog of NCBI NO: 23130190 NR Description: hypothetical protein [Nostoc punctiforme]
  misc_feature (1)..(27): Homolog of NCBI NO: 22299036 NR Description: ORF_ID:tll1493~hypothetical protein
  misc_feature (66)..(171): Homolog of NCBI NO: 22299036 NR Description: ORF_ID:tll1493~hypothetical protein
  misc_feature (1)..(178): Homolog of NCBI NO: 15228623 NR Description: expressed protein [Arabidopsis thaliana]

SEQ ID NO: 47565 - DNA, 722 bp, Arabidopsis thaliana
  misc_feature (1)..(722): Ceres Seq. ID no. 12605661
  misc_feature: MA Experiment ID: 20000180 Result: Up-regulated in Transcription
  misc_feature: MA Experiment 20000180 PARAMETER Experiment Name: At_Germinating_Seeds_P Parameter: Age (hr) Value: 24 vs. 0
  misc_feature: MA Experiment 20000180 PARAMETER Experiment Name: At_Germinating_Seeds_P Parameter: Tissue Value: Germinating Seeds
  misc_feature: MA Experiment ID: 20000184 Result: Up-regulated in Transcription
  misc_feature: MA Experiment 20000184 PARAMETER Experiment Name: At_Shoots__P Parameter: Age (day) Value: 7
  misc_feature: MA Experiment 20000184 PARAMETER Experiment Name: At_Shoots__P Parameter: Tissue Value: Shoots vs. Whole Plant
  misc_feature: MA Experiment ID: 20000436 Result: Down-regulated in Transcription
  misc_feature: MA Experiment 20000436 PARAMETER Experiment Name: At_Drought_P Parameter: Age (day) Value: 7
  misc_feature: MA Experiment 20000436 PARAMETER Experiment Name: At_Drought_P Parameter: Organism Value: A. thaliana
  misc_feature: MA Experiment 20000436 PARAMETER Experiment Name: At_Drought_P Parameter: Plant Line Value: WS
  misc_feature: MA Experiment 20000436 PARAMETER Experiment Name: At_Drought_P Parameter: Timepoint (hr) Value: 12
  misc_feature: MA Experiment 20000436 PARAMETER Experiment Name: At_Drought_P Parameter: Tissue Value: Whole Plant
  misc_feature: MA Experiment 20000436 PARAMETER Experiment Name: At_Drought_P Parameter: Treatment Value: Drought vs. No Drought
  misc_feature: MA Experiment ID: 20000437 Result: Down-regulated in Transcription
  misc_feature: MA Experiment 20000437 PARAMETER Experiment Name: At_Drought_P Parameter: Age (day) Value: 8
  misc_feature: MA Experiment 20000437 PARAMETER Experiment Name: At_Drought_P Parameter: Organism Value: A. thaliana
  misc_feature: MA Experiment 20000437 PARAMETER Experiment Name: At_Drought_P Parameter: Plant Line Value: WS
  misc_feature: MA Experiment 20000437 PARAMETER Experiment Name: At_Drought_P Parameter: Timepoint (hr) Value: 24
  misc_feature: MA Experiment 20000437 PARAMETER Experiment Name: At_Drought_P Parameter: Tissue Value: Whole Plant
  misc_feature: MA Experiment 20000437 PARAMETER Experiment Name: At_Drought_P Parameter: Treatment Value: Drought vs. No Drought
  misc_feature: MA Experiment ID: 20000438 Result: Up-regulated in Transcription
  misc_feature: MA Experiment 20000438 PARAMETER Experiment Name: At_Shoots__P Parameter: Age (day) Value: 14
  misc_feature: MA Experiment 20000438 PARAMETER Experiment Name: At_Shoots__P Parameter: Tissue Value: Shoots vs. Whole Plant
  misc_feature: MA Experiment ID: 20000495 Result: Down-regulated in Transcription
  misc_feature: MA Experiment 20000495 PARAMETER Experiment Name: At_Guard_Cells_P Parameter: Harvest Date Value: 8/2/2002
  misc_feature: MA Experiment 20000495 PARAMETER Experiment Name: At_Guard_Cells_P Parameter: Organism Value: A. thaliana
  misc_feature: MA Experiment 20000495 PARAMETER Experiment Name: At_Guard_Cells_P Parameter: Tissue Value: Guard Cells vs. Leaves
  misc_feature: MA Experiment ID: 20000527 Result: Up-regulated in Transcription
  misc_feature: MA Experiment 20000527 PARAMETER Experiment Name: At_10percent_PEG_P Parameter: Age (day) Value: 20
  misc_feature: MA Experiment 20000527 PARAMETER Experiment Name: At_10percent_PEG_P Parameter: Organism Value: A. thaliana
  misc_feature: MA Experiment 20000527 PARAMETER Experiment Name: At_10percent_PEG_P Parameter: Plant Line Value: WS
  misc_feature: MA Experiment 20000527 PARAMETER Experiment Name: At_10percent_PEG_P Parameter: Timepoint (day) Value: 20
  misc_feature: MA Experiment 20000527 PARAMETER Experiment Name: At_10percent_PEG_P Parameter: Tissue Value: Whole Plant
  misc_feature: MA Experiment 20000527 PARAMETER Experiment Name: At_10percent_PEG_P Parameter: Treatment Value: 10percent PEG vs. No Treatment
  misc_feature: MA Experiment ID: 20001248 Result: Down-regulated in Transcription
  misc_feature: MA Experiment 20001248 PARAMETER Experiment Name: At_Far-red-induction_P Parameter: Age (day) Value: 7
  misc_feature: MA Experiment 20001248 PARAMETER Experiment Name: At_Far-red-induction_P Parameter: Light Value: Far-red vs. White
  misc_feature: MA Experiment 20001248 PARAMETER Experiment Name: At_Far-red-induction_P Parameter: Organism Value: A. thaliana
  misc_feature: MA Experiment 20001248 PARAMETER Experiment Name: At_Far-red-induction_P Parameter: Plant Line Value: Columbia
  misc_feature: MA Experiment 20001248 PARAMETER Experiment Name: At_Far-red-induction_P Parameter: Timepoint (hr) Value: 4
  misc_feature: MA Experiment 20001248 PARAMETER Experiment Name: At_Far-red-induction_P Parameter: Tissue Value: Whole Plant
  misc_feature: MA Experiment ID: 20001905 Result: Down-regulated in Transcription
  misc_feature: MA Experiment 20001905 PARAMETER Experiment Name: At_Drought_Reproduction_P Parameter: Age (day) Value: 40
  misc_feature: MA Experiment 20001905 PARAMETER Experiment Name: At_Drought_Reproduction_P Parameter: Organism Value: A. thaliana
  misc_feature: MA Experiment 20001905 PARAMETER Experiment Name: At_Drought_Reproduction_P Parameter: Plant Line Value: WS
  misc_feature: MA Experiment 20001905 PARAMETER Experiment Name: At_Drought_Reproduction_P Parameter: Timepoint (day) Value: 10
  misc_feature: MA Experiment 20001905 PARAMETER Experiment Name: At_Drought_Reproduction_P Parameter: Tissue Value: Rosettes
  misc_feature: MA Experiment 20001905 PARAMETER Experiment Name: At_Drought_Reproduction_P Parameter: Treatment Value: Drought vs. No Drought
gtttcgttacttgctcagagaccttttcaaatccaaaacagaggaatataagagattaaggaaccattgtgacgatgcctaacttgctccacaccaatcaatctcacttcttcttcctccatcatccgccaatctacaccgtcagttcaaagacgcaggctttccacttcccgcaaccaatggcgccggtcaacctccgtacgaatctctccgtgcgcaggaccgtacggtgtatggcgaacccgaggagagttaagatggtggctaagcagataatgagagaactctccgacatgcttctaacagacacggttttacaacacgctgtcttacctgaagctgcacttggagctgaccgctacctctcttctctcaccaccattagcgatgttgaagtctctaatgatttgcaggtggttaaagtatatgtatccgtgtttggagatgatagagggaaagacgttgcaattgcggggttgaaatcgaaagctaagtacgttaggagtgagcttgggaagcgaatgaagttgagattgacgcctgaggtcaggtttattgaggatgaagccatggaaagaggaagcagggtaattgcaatactggacaaaataaaagctgagaaaggaagcggtgaagggaaaacagaaccatctgactcaacagaagatgatcaagattgggaagtggatgaccccgacgaagacataatctatgtaaagtaa

SEQ ID NO: 47566 - protein, 215 aa, Arabidopsis thaliana
  peptide (1)..(215): Ceres Seq. ID no. 12605662
  misc_feature (59)..(179): Pfam Name: Ribosome-binding factor A Pfam Description: Ribosome-binding factor A
  misc_feature (54)..(189): Homolog of NCBI NO: 33239584 NR Description: Ribosome-binding factor A
  misc_feature (59)..(183): Homolog of NCBI NO: 37523601 NR Description: ribosome binding facror A [Gloeobacter violaceus]
  misc_feature (54)..(179): Homolog of NCBI NO: 16331339 NR Description: hypothetical protein [Synechocystis sp. PCC 6803]
  misc_feature (54)..(187): Homolog of NCBI NO: 22299172 NR Description: ribosome binding factor A [Thermosynechococcus
  misc_feature (54)..(201): Homolog of NCBI NO: 23039367 NR Description: hypothetical protein [Trichodesmium erythraeum
  misc_feature (54)..(199): Homolog of NCBI NO: 17227559 NR Description: ribosome binding facror A [Nostoc sp. PCC 7120]
  misc_feature (54)..(201): Homolog of NCBI NO: 23127176 NR Description: hypothetical protein [Nostoc punctiforme]
  misc_feature (71)..(215): Homolog of NCBI NO: 3914555 NR Description: Putative ribosome-binding factor A, chloroplast
  misc_feature (36)..(211): Homolog of NCBI NO: 3914555 NR Description: Putative ribosome-binding factor A, chloroplast
  misc_feature (1)..(215): Homolog of NCBI NO: 30690114 NR Description: expressed protein [Arabidopsis thaliana]
MPNLLHTNQSHFFFLHHPPIYTVSSKTQAFHFPQPMAPVNLRTNLSVRRTVRCMANPRRVKMVAKQIMRELSDMLLTDTVLQHAVLPEAALGADRYLSSLTTISDVEVSNDLQVVKVYVSVFGDDRGKDVAIAGLKSKAKYVRSELGKRMKLRLTPEVRFIEDEAMERGSRVIAILDKIKAEKGSGEGKTEPSDSTEDDQDWEVDDPDEDIIYVK

SEQ ID NO: 47567 - protein, 180 aa, Arabidopsis thaliana
  peptide (1)..(180): Ceres Seq. ID no. 12605663
  misc_feature (24)..(144): Pfam Name: Ribosome-binding factor A Pfam Description: Ribosome-binding factor A
  misc_feature (19)..(154): Homolog of NCBI NO: 33239584 NR Description: Ribosome-binding factor A
  misc_feature (24)..(148): Homolog of NCBI NO: 37523601 NR Description: ribosome binding facror A [Gloeobacter violaceus]
  misc_feature (19)..(144): Homolog of NCBI NO: 16331339 NR Description: hypothetical protein [Synechocystis sp. PCC 6803]
  misc_feature (19)..(152): Homolog of NCBI NO: 22299172 NR Description: ribosome binding factor A [Thermosynechococcus
  misc_feature (19)..(166): Homolog of NCBI NO: 23039367 NR Description: hypothetical protein [Trichodesmium erythraeum
  misc_feature (19)..(164): Homolog of NCBI NO: 17227559 NR Description: ribosome binding facror A [Nostoc sp. PCC 7120]
  misc_feature (19)..(166): Homolog of NCBI NO: 23127176 NR Description: hypothetical protein [Nostoc punctiforme]
  misc_feature (36)..(180): Homolog of NCBI NO: 3914555 NR Description: Putative ribosome-binding factor A, chloroplast
  misc_feature (1)..(176): Homolog of NCBI NO: 3914555 NR Description: Putative ribosome-binding factor A, chloroplast
  misc_feature (1)..(180): Homolog of NCBI NO: 30690114 NR Description: expressed protein [Arabidopsis thaliana]
MAPVNLRTNLSVRRTVRCMANPRRVKMVAKQIMRELSDMLLTDTVLQHAVLPEAALGADRYLSSLTTISDVEVSNDLQVVKVYVSVFGDDRGKDVAIAGLKSKAKYVRSELGKRMKLRLTPEVRFIEDEAMERGSRVIAILDKIKAEKGSGEGKTEPSDSTEDDQDWEVDDPDEDIIYVK

SEQ ID NO: 47568 - protein, 162 aa, Arabidopsis thaliana
  peptide (1)..(162): Ceres Seq. ID no. 12605664
  misc_feature (6)..(126): Pfam Name: Ribosome-binding factor A Pfam Description: Ribosome-binding factor A
  misc_feature (1)..(136): Homolog of NCBI NO: 33239584 NR Description: Ribosome-binding factor A
  misc_feature (6)..(130): Homolog of NCBI NO: 37523601 NR Description: ribosome binding facror A [Gloeobacter violaceus]
  misc_feature (1)..(126): Homolog of NCBI NO: 16331339 NR Description: hypothetical protein [Synechocystis sp. PCC 6803]
  misc_feature (1)..(134): Homolog of NCBI NO: 22299172 NR Description: ribosome binding factor A [Thermosynechococcus
  misc_feature (1)..(148): Homolog of NCBI NO: 23039367 NR Description: hypothetical protein [Trichodesmium erythraeum
  misc_feature (1)..(146): Homolog of NCBI NO: 17227559 NR Description: ribosome binding facror A [Nostoc sp. PCC 7120]
  misc_feature (1)..(148): Homolog of NCBI NO: 23127176 NR Description: hypothetical protein [Nostoc punctiforme]
  misc_feature (18)..(162): Homolog of NCBI NO: 3914555 NR Description: Putative ribosome-binding factor A, chloroplast
  misc_feature (1)..(158): Homolog of NCBI NO: 3914555 NR Description: Putative ribosome-binding factor A, chloroplast
  misc_feature (1)..(162): Homolog of NCBI NO: 30690114 NR Description: expressed protein [Arabidopsis thaliana]
MANPRRVKMVAKQIMRELSDMLLTDTVLQHAVLPEAALGADRYLSSLTTISDVEVSNDLQVVKVYVSVFGDDRGKDVAIAGLKSKAKYVRSELGKRMKLRLTPEVRFIEDEAMERGSRVIAILDKIKAEKGSGEGKTEPSDSTEDDQDWEVDDPDEDIIYVK

SEQ ID NO: 47569 - DNA, 1710 bp, Arabidopsis thaliana; identical to SEQ ID NO: 45690
  misc_feature (1)..(1710): Ceres Seq. ID no. 13576229
  misc_feature: MA Experiment ID: 20000214 Result: Down-regulated in Transcription
  misc_feature: MA Experiment 20000214 PARAMETER Experiment Name: At_4deg_Cold_P Parameter: Timepoint (hr) Value: 6
  misc_feature: MA Experiment ID: 20000437 Result: Down-regulated in Transcription
  misc_feature: MA Experiment 20000437 PARAMETER Experiment Name: At_Drought_P Parameter: Age (day) Value: 8
  misc_feature: MA Experiment 20000437 PARAMETER Experiment Name: At_Drought_P Parameter: Organism Value: A. thaliana
  misc_feature: MA Experiment 20000437 PARAMETER Experiment Name: At_Drought_P Parameter: Plant Line Value: WS
  misc_feature: MA Experiment 20000437 PARAMETER Experiment Name: At_Drought_P Parameter: Timepoint (hr) Value: 24
  misc_feature: MA Experiment 20000437 PARAMETER Experiment Name: At_Drought_P Parameter: Tissue Value: Whole Plant
  misc_feature: MA Experiment 20000437 PARAMETER Experiment Name: At_Drought_P Parameter: Treatment Value: Drought vs. No Drought
  misc_feature: MA Experiment ID: 20000794 Result: Down-regulated in Transcription
  misc_feature: MA Experiment 20000794 PARAMETER Experiment Name: At_Petals_P Parameter: Age (day) Value: 23-25 days
  misc_feature: MA Experiment 20000794 PARAMETER Experiment Name: At_Petals_P Parameter: Plant Line Value: WS
  misc_feature: MA Experiment 20000794 PARAMETER Experiment Name: At_Petals_P Parameter: Tissue Value: Petals vs. Whole plant
  misc_feature: MA Experiment ID: 20001905 Result: Down-regulated in Transcription
  misc_feature: MA Experiment 20001905 PARAMETER Experiment Name: At_Drought_Reproduction_P Parameter: Age (day) Value: 40
  misc_feature: MA Experiment 20001905 PARAMETER Experiment Name: At_Drought_Reproduction_P Parameter: Organism Value: A. thaliana
  misc_feature: MA Experiment 20001905 PARAMETER Experiment Name: At_Drought_Reproduction_P Parameter: Plant Line Value: WS
  misc_feature: MA Experiment 20001905 PARAMETER Experiment Name: At_Drought_Reproduction_P Parameter: Timepoint (day) Value: 10
  misc_feature: MA Experiment 20001905 PARAMETER Experiment Name: At_Drought_Reproduction_P Parameter: Tissue Value: Rosettes
  misc_feature: MA Experiment 20001905 PARAMETER Experiment Name: At_Drought_Reproduction_P Parameter: Treatment Value: Drought vs. No Drought

SEQ ID NO: 47570 - protein, 410 aa, Arabidopsis thaliana; identical to SEQ ID NO: 45691
  peptide (1)..(410): Ceres Seq. ID no. 13576230
  misc_feature (69)..(346): Pfam Name: Protein kinase domain Pfam Description: Protein kinase domain
  misc_feature (69)..(346): Pfam Name: Protein kinase domain Pfam Description: Protein kinase domain
  misc_feature (17)..(118): Homolog of NCBI NO: 27436752 NR Description: Putative serine/threonine protein kinase
  misc_feature (109)..(354): Homolog of NCBI NO: 27436752 NR Description: Putative serine/threonine protein kinase
  misc_feature (1)..(358): Homolog of NCBI NO: 15241220 NR Description: protein kinase, putative [Arabidopsis thaliana]
  misc_feature (9)..(355): Homolog of NCBI NO: 19423982 NR Description: putative protein kinase [Arabidopsis thaliana]
  misc_feature (15)..(350): Homolog of NCBI NO: 30013675 NR Description: Avr9/Cf-9 rapidly elicited protein 264 [Nicotiana
  misc_feature (17)..(118): Homolog of NCBI NO: 27436752 NR Description: Putative serine/threonine protein kinase
  misc_feature (1)..(358): Homolog of NCBI NO: 15241220 NR Description: protein kinase, putative [Arabidopsis thaliana]
  misc_feature (15)..(350): Homolog of NCBI NO: 30013675 NR Description: Avr9/Cf-9 rapidly elicited protein 264 [Nicotiana
  misc_feature (1)..(410): Homolog of NCBI NO: 30679085 NR Description: protein kinase family [Arabidopsis thaliana]
  misc_feature (1)..(410): Homolog of NCBI NO: 9542860 NR Description: protein kinase-like protein [Arabidopsis thaliana]
  misc_feature (15)..(361): Homolog of NCBI NO: 15225019 NR Description: protein kinase, putative [Arabidopsis thaliana]
  misc_feature (9)..(355): Homolog of NCBI NO: 22325532 NR Description: protein kinase, putative [Arabidopsis thaliana]
  misc_feature (9)..(355): Homolog of NCBI NO: 25287636 NR Description: probable protein kinase [imported] - Arabidopsis
  misc_feature (9)..(355): Homolog of NCBI NO: 19423982 NR Description: putative protein kinase [Arabidopsis thaliana]
  misc_feature (109)..(354): Homolog of NCBI NO: 27436752 NR Description: Putative serine/threonine protein kinase
  misc_feature (9)..(355): Homolog of NCBI NO: 25287636 NR Description: probable protein kinase [imported] - Arabidopsis
  misc_feature (9)..(355): Homolog of NCBI NO: 22325532 NR Description: protein kinase, putative [Arabidopsis thaliana]
  misc_feature (15)..(361): Homolog of NCBI NO: 15225019 NR Description: protein kinase, putative [Arabidopsis thaliana]
  misc_feature (1)..(410): Homolog of NCBI NO: 9542860 NR Description: protein kinase-like protein [Arabidopsis thaliana]
  misc_feature (1)..(410): Homolog of NCBI NO: 30679085 NR Description: protein kinase family [Arabidopsis thaliana]

SEQ ID NO: 47571 - protein, 259 aa, Arabidopsis thaliana; identical to SEQ ID NO: 45692
  peptide (1)..(259): Ceres Seq. ID no. 13576231
  misc_feature (1)..(195): Pfam Name: Protein kinase domain Pfam Description: Protein kinase domain
  misc_feature (1)..(195): Pfam Name: Protein kinase domain Pfam Description: Protein kinase domain
  misc_feature (1)..(199): Homolog of NCBI NO: 22773239 NR Description: Putative protein kinase [Oryza sativa (japonica
  misc_feature (1)..(203): Homolog of NCBI NO: 27436752 NR Description: Putative serine/threonine protein kinase
  misc_feature (1)..(207): Homolog of NCBI NO: 15241220 NR Description: protein kinase, putative [Arabidopsis thaliana]
  misc_feature (1)..(204): Homolog of NCBI NO: 19423982 NR Description: putative protein kinase [Arabidopsis thaliana]
  misc_feature (1)..(199): Homolog of NCBI NO: 30013675 NR Description: Avr9/Cf-9 rapidly elicited protein 264 [Nicotiana
  misc_feature (1)..(199): Homolog of NCBI NO: 22773239 NR Description: Putative protein kinase [Oryza sativa (japonica
  misc_feature (1)..(207): Homolog of NCBI NO: 15241220 NR Description: protein kinase, putative [Arabidopsis thaliana]
  misc_feature (1)..(199): Homolog of NCBI NO: 30013675 NR Description: Avr9/Cf-9 rapidly elicited protein 264 [Nicotiana
  misc_feature (1)..(259): Homolog of NCBI NO: 30679085 NR Description: protein kinase family [Arabidopsis thaliana]
  misc_feature (1)..(259): Homolog of NCBI NO: 9542860 NR Description: protein kinase-like protein [Arabidopsis thaliana]
  misc_feature (1)..(210): Homolog of NCBI NO: 15225019 NR Description: protein kinase, putative [Arabidopsis thaliana]
  misc_feature (1)..(204): Homolog of NCBI NO: 22325532 NR Description: protein kinase, putative [Arabidopsis thaliana]
  misc_feature (1)..(204): Homolog of NCBI NO: 25287636 NR Description: probable protein kinase [imported] - Arabidopsis
  misc_feature (1)..(204): Homolog of NCBI NO: 19423982 NR Description: putative protein kinase [Arabidopsis thaliana]
  misc_feature (1)..(203): Homolog of NCBI NO: 27436752 NR Description: Putative serine/threonine protein kinase
  misc_feature (1)..(204): Homolog of NCBI NO: 25287636 NR Description: probable protein kinase [imported] - Arabidopsis
  misc_feature (1)..(204): Homolog of NCBI NO: 22325532 NR Description: protein kinase, putative [Arabidopsis thaliana]
  misc_feature (1)..(210): Homolog of NCBI NO: 15225019 NR Description: protein kinase, putative [Arabidopsis thaliana]
  misc_feature (1)..(259): Homolog of NCBI NO: 9542860 NR Description: protein kinase-like protein [Arabidopsis thaliana]
  misc_feature (1)..(259): Homolog of NCBI NO: 30679085 NR Description: protein kinase family [Arabidopsis thaliana]

SEQ ID NO: 47572 - protein, 236 aa, Arabidopsis thaliana; identical to SEQ ID NO: 45693
  peptide (1)..(236): Ceres Seq. ID no. 13576232
  misc_feature (1)..(172): Pfam Name: Protein kinase domain Pfam Description: Protein kinase domain
  misc_feature (1)..(172): Pfam Name: Protein kinase domain Pfam Description: Protein kinase domain
  misc_feature (1)..(176): Homolog of NCBI NO: 22773239 NR Description: Putative protein kinase [Oryza sativa (japonica
  misc_feature (1)..(180): Homolog of NCBI NO: 27436752 NR Description: Putative serine/threonine protein kinase
  misc_feature (1)..(184): Homolog of NCBI NO: 15241220 NR Description: protein kinase, putative [Arabidopsis thaliana]
  misc_feature (1)..(181): Homolog of NCBI NO: 19423982 NR Description: putative protein kinase [Arabidopsis thaliana]
  misc_feature (1)..(176): Homolog of NCBI NO: 30013675 NR Description: Avr9/Cf-9 rapidly elicited protein 264 [Nicotiana
  misc_feature (1)..(176): Homolog of NCBI NO: 22773239 NR Description: Putative protein kinase [Oryza sativa (japonica
  misc_feature (1)..(184): Homolog of NCBI NO: 15241220 NR Description: protein kinase, putative [Arabidopsis thaliana]
  misc_feature (1)..(176): Homolog of NCBI NO: 30013675 NR Description: Avr9/Cf-9 rapidly elicited protein 264 [Nicotiana
  misc_feature (1)..(236): Homolog of NCBI NO: 30679085 NR Description: protein kinase family [Arabidopsis thaliana]
  misc_feature (1)..(236): Homolog of NCBI NO: 9542860 NR Description: protein kinase-like protein [Arabidopsis thaliana]
  misc_feature (1)..(187): Homolog of NCBI NO: 15225019 NR Description: protein kinase, putative [Arabidopsis thaliana]
  misc_feature (1)..(181): Homolog of NCBI NO: 22325532 NR Description: protein kinase, putative [Arabidopsis thaliana]
  misc_feature (1)..(181): Homolog of NCBI NO: 25287636 NR Description: probable protein kinase [imported] - Arabidopsis
  misc_feature (1)..(181): Homolog of NCBI NO: 19423982 NR Description: putative protein kinase [Arabidopsis thaliana]
  misc_feature (1)..(180): Homolog of NCBI NO: 27436752 NR Description: Putative serine/threonine protein kinase
  misc_feature (1)..(181): Homolog of NCBI NO: 25287636 NR Description: probable protein kinase [imported] - Arabidopsis
  misc_feature (1)..(181): Homolog of NCBI NO: 22325532 NR Description: protein kinase, putative [Arabidopsis thaliana]
  misc_feature (1)..(187): Homolog of NCBI NO: 15225019 NR Description: protein kinase, putative [Arabidopsis thaliana]
  misc_feature (1)..(236): Homolog of NCBI NO: 9542860 NR Description: protein kinase-like protein [Arabidopsis thaliana]
  misc_feature (1)..(236): Homolog of NCBI NO: 30679085 NR Description: protein kinase family [Arabidopsis thaliana]

SEQ ID NO: 47573 - DNA, 808 bp, Arabidopsis thaliana; identical to SEQ ID NO: 22027
  misc_feature (1)..(808): Ceres Seq. ID no. 13592444
  misc_feature: MA Experiment ID: 108488 Result: Up-regulated in Transcription
  misc_feature: MA Experiment ID: 108595 Result: Down-regulated in Transcription
  misc_feature: MA Experiment 108595 PARAMETER Experiment Name: At_Ler-pi_Ovule_cDNA_P Parameter: Plant Line Value: null
  misc_feature: MA Experiment ID: 20000070 Result: Down-regulated in Transcription
  misc_feature: MA Experiment 20000070 PARAMETER Experiment Name: At_100uM_ABA_Mutants_cDNA_P Parameter: Plant Line Value: CS24
  misc_feature: MA Experiment 20000070 PARAMETER Experiment Name: At_100uM_ABA_Mutants_cDNA_P Parameter: Timepoint (hr) Value: 6
  misc_feature: MA Experiment 20000070 PARAMETER Experiment Name: At_100uM_ABA_Mutants_cDNA_P Parameter: Tissue Value: Aerial
  misc_feature: MA Experiment 20000070 PARAMETER Experiment Name: At_100uM_ABA_Mutants_cDNA_P Parameter: Treatment Value: 100uM ABA vs. No Treatment
  misc_feature: MA Experiment ID: 20000071 Result: Down-regulated in Transcription
  misc_feature: MA Experiment 20000071 PARAMETER Experiment Name: At_100uM_ABA_Mutants_cDNA_P Parameter: Plant Line Value: CS8104
  misc_feature: MA Experiment 20000071 PARAMETER Experiment Name: At_100uM_ABA_Mutants_cDNA_P Parameter: Timepoint (hr) Value: 6
  misc_feature: MA Experiment 20000071 PARAMETER Experiment Name: At_100uM_ABA_Mutants_cDNA_P Parameter: Tissue Value: Aerial
  misc_feature: MA Experiment 20000071 PARAMETER Experiment Name: At_100uM_ABA_Mutants_cDNA_P Parameter: Treatment Value: 100uM ABA vs. No Treatment
  misc_feature: MA Experiment ID: 20000072 Result: Down-regulated in Transcription
  misc_feature: MA Experiment 20000072 PARAMETER Experiment Name: At_100uM_ABA_Mutants_cDNA_P Parameter: Plant Line Value: CS8105
  misc_feature: MA Experiment 20000072 PARAMETER Experiment Name: At_100uM_ABA_Mutants_cDNA_P Parameter: Timepoint (hr) Value: 6
  misc_feature: MA Experiment 20000072 PARAMETER Experiment Name: At_100uM_ABA_Mutants_cDNA_P Parameter: Tissue Value: Aerial
  misc_feature: MA Experiment 20000072 PARAMETER Experiment Name: At_100uM_ABA_Mutants_cDNA_P Parameter: Treatment Value: 100uM ABA vs. No Treatment
  misc_feature: MA Experiment ID: 20000086 Result: Down-regulated in Transcription
  misc_feature: MA Experiment 20000086 PARAMETER Experiment Name: At_100uM_ABA_Mutants_cDNA_P Parameter: Plant Line Value: CS22
  misc_feature: MA Experiment 20000086 PARAMETER Experiment Name: At_100uM_ABA_Mutants_cDNA_P Parameter: Timepoint (hr) Value: 6
  misc_feature: MA Experiment 20000086 PARAMETER Experiment Name: At_100uM_ABA_Mutants_cDNA_P Parameter: Tissue Value: Aerial
  misc_feature: MA Experiment 20000086 PARAMETER Experiment Name: At_100uM_ABA_Mutants_cDNA_P Parameter: Treatment Value: 100uM ABA vs. No Treatment
  misc_feature: MA Experiment ID: 20000117 Result: Down-regulated in Transcription
  misc_feature: MA Experiment 20000117 PARAMETER Experiment Name: At_100uM_ABA_Mutants_cDNA_P Parameter: Plant Line Value: Columbia
  misc_feature: MA Experiment 20000117 PARAMETER Experiment Name: At_100uM_ABA_Mutants_cDNA_P Parameter: Timepoint (hr) Value: 6
  misc_feature: MA Experiment 20000117 PARAMETER Experiment Name: At_100uM_ABA_Mutants_cDNA_P Parameter: Tissue Value: Aerial
  misc_feature: MA Experiment 20000117 PARAMETER Experiment Name: At_100uM_ABA_Mutants_cDNA_P Parameter: Treatment Value: 100uM ABA vs. No Treatment
  misc_feature: MA Experiment ID: 20000307 Result: Up-regulated in Transcription
  misc_feature: MA Experiment 20000307 PARAMETER Experiment Name: At_Germinating_Seeds_Sub_P Parameter: Age (hr) Value: 24 vs. 0
  misc_feature: MA Experiment 20000307 PARAMETER Experiment Name: At_Germinating_Seeds_Sub_P Parameter: Organism Value: A. thaliana
  misc_feature: MA Experiment 20000307 PARAMETER Experiment Name: At_Germinating_Seeds_Sub_P Parameter: Plant Line Value: WS
  misc_feature: MA Experiment 20000307 PARAMETER Experiment Name: At_Germinating_Seeds_Sub_P Parameter: Tissue Value: Germinating Seeds
  misc_feature: MA Experiment ID: 20000314 Result: Down-regulated in Transcription
  misc_feature: MA Experiment 20000314 PARAMETER Experiment Name: At_14day_Shoots-Roots_Sub_P Parameter: Age (day) Value: 14
  misc_feature: MA Experiment 20000314 PARAMETER Experiment Name: At_14day_Shoots-Roots_Sub_P Parameter: Organism Value: A. thaliana
  misc_feature: MA Experiment 20000314 PARAMETER Experiment Name: At_14day_Shoots-Roots_Sub_P Parameter: Plant Line Value: WS
  misc_feature: MA Experiment 20000314 PARAMETER Experiment Name: At_14day_Shoots-Roots_Sub_P Parameter: Tissue Value: Roots vs. Whole Plant
  misc_feature: MA Experiment ID: 20000355 Result: Up-regulated in Transcription
  misc_feature: MA Experiment 20000355 PARAMETER Experiment Name: At_Siliques_Sub_P Parameter: Age (day) Value: 21
  misc_feature: MA Experiment 20000355 PARAMETER Experiment Name: At_Siliques_Sub_P Parameter: Organism Value: A. thaliana
  misc_feature: MA Experiment 20000355 PARAMETER Experiment Name: At_Siliques_Sub_P Parameter: Plant Line Value: WS
  misc_feature: MA Experiment 20000355 PARAMETER Experiment Name: At_Siliques_Sub_P Parameter: Tissue Value: Less Than 5mm Siliques vs. Whole Plant
  misc_feature: MA Experiment ID: 20001807 Result: Up-regulated in Transcription
  misc_feature: MA Experiment 20001807 PARAMETER Experiment Name: At_50mM_NH4NO3_L-to-H_Sub_P Parameter: Timepoint (hr) Value: 6
  misc_feature: MA Experiment 20001807 PARAMETER Experiment Name: At_50mM_NH4NO3_L-to-H_Sub_P Parameter: Tissue Value: Leaf
  misc_feature: MA Experiment 20001807 PARAMETER Experiment Name: At_50mM_NH4NO3_L-to-H_Sub_P Parameter: Treatment Value: 50mM NH4NO3 vs 100mM Mannitol

SEQ ID NO: 47574 - protein, 187 aa, Arabidopsis thaliana; identical to SEQ ID NO: 22028
  peptide (1)..(187): Ceres Seq. ID no. 15221104
  misc_feature (119)..(187): Pfam Name: Ribosomal protein L7/L12 C-terminal domain Pfam Description: Ribosomal protein L7/L12 C-terminal domain
  misc_feature (119)..(187): Pfam Name: Ribosomal protein L7/L12 C-terminal domain Pfam Description: Ribosomal protein L7/L12 C-terminal domain
  misc_feature (1)..(186): Homolog of NCBI NO: 133085 NR Description: 50S RIBOSOMAL PROTEIN L12, CHLOROPLAST PRECURSOR
  misc_feature (1)..(187): Homolog of NCBI NO: 548746 NR Description: 50S RIBOSOMAL PROTEIN L12, CHLOROPLAST PRECURSOR
  misc_feature (1)..(187): Homolog of NCBI NO: 133088 NR Description: 50S RIBOSOMAL PROTEIN L12, CHLOROPLAST PRECURSOR
  misc_feature (1)..(187): Homolog of NCBI NO: 20020 NR Description: ribosomal protein L12-1a [Nicotiana tabacum]
  misc_feature (1)..(186): Homolog of NCBI NO: 541896 NR Description: ribosomal protein L12.B precursor, chloroplast -
  misc_feature (1)..(187): Homolog of NCBI NO: 15232274 NR Description: 50S ribosomal protein L12-1, chloroplast
  misc_feature (1)..(187): Homolog of NCBI NO: 15232276 NR Description: 50S ribosomal protein L12-3, chloroplast
  misc_feature (1)..(186): Homolog of NCBI NO: 15232275 NR Description: 50S ribosomal protein L12-2, chloroplast
  misc_feature (1)..(186): Homolog of NCBI NO: 541896 NR Description: ribosomal protein L12.B precursor, chloroplast -
  misc_feature (1)..(187): Homolog of NCBI NO: 20020 NR Description: ribosomal protein L12-1a [Nicotiana tabacum]
  misc_feature (1)..(187): Homolog of NCBI NO: 133088 NR Description: 50S RIBOSOMAL PROTEIN L12, CHLOROPLAST PRECURSOR
  misc_feature (1)..(187): Homolog of NCBI NO: 548746 NR Description: 50S RIBOSOMAL PROTEIN L12, CHLOROPLAST PRECURSOR
  misc_feature (1)..(186): Homolog of NCBI NO: 133085 NR Description: 50S RIBOSOMAL PROTEIN L12, CHLOROPLAST PRECURSOR
  misc_feature (1)..(187): Homolog of NCBI NO: 21592776 NR Description: 50S ribosomal protein L12-C [Arabidopsis thaliana]
  misc_feature (1)..(187): Homolog of NCBI NO: 541897 NR Description: ribosomal protein L12.C precursor, chloroplast -
  misc_feature (1)..(186): Homolog of NCBI NO: 15232275 NR Description: 50S ribosomal protein L12-2, chloroplast
  misc_feature (1)..(187): Homolog of NCBI NO: 15232274 NR Description: 50S ribosomal protein L12-1, chloroplast
  misc_feature (1)..(187): Homolog of NCBI NO: 541897 NR Description: ribosomal protein L12.C precursor, chloroplast -
  misc_feature (1)..(187): Homolog of NCBI NO: 15232276 NR Description: 50S ribosomal protein L12-3, chloroplast
  misc_feature (1)..(187): Homolog of NCBI NO: 21592776 NR Description: 50S ribosomal protein L12-C [Arabidopsis thaliana]

SEQ ID NO: 47575 - protein, 93 aa, Arabidopsis thaliana; identical to SEQ ID NO: 22029
  peptide (1)..(93): Ceres Seq. ID no. 15221105

SEQ ID NO: 47576 - DNA, 1080 bp, Arabidopsis thaliana
  misc_feature (1)..(1080): Ceres Seq. ID no. 12591749
  misc_feature: MA Experiment ID: 20000182 Result: Up-regulated in Transcription
  misc_feature: MA Experiment 20000182 PARAMETER Experiment Name: At_2mM_SA_P Parameter: Age (day) Value: 14
  misc_feature: MA Experiment 20000182 PARAMETER Experiment Name: At_2mM_SA_P Parameter: Organism Value: A. thaliana
  misc_feature: MA Experiment 20000182 PARAMETER Experiment Name: At_2mM_SA_P Parameter: Plant Line Value: WS
  misc_feature: MA Experiment 20000182 PARAMETER Experiment Name: At_2mM_SA_P Parameter: Timepoint (hr) Value: 6
  misc_feature: MA Experiment 20000182 PARAMETER Experiment Name: At_2mM_SA_P Parameter: Tissue Value: Aerial
  misc_feature: MA Experiment 20000182 PARAMETER Experiment Name: At_2mM_SA_P Parameter: Treatment Value: 2mM SA vs. No Treatment
  misc_feature: MA Experiment ID: 20000234 Result: Down-regulated in Transcription
  misc_feature: MA Experiment 20000234 PARAMETER Experiment Name: At_Siliques_P Parameter: Age (day) Value: 21
  misc_feature: MA Experiment 20000234 PARAMETER Experiment Name: At_Siliques_P Parameter: Organism Value: A. thaliana
  misc_feature: MA Experiment 20000234 PARAMETER Experiment Name: At_Siliques_P Parameter: Plant Line Value: WS
  misc_feature: MA Experiment 20000234 PARAMETER Experiment Name: At_Siliques_P Parameter: Tissue Value: Less Than 5mm Siliques vs. Whole Plant
  misc_feature: MA Experiment ID: 20000264 Result: Down-regulated in Transcription
  misc_feature: MA Experiment 20000264 PARAMETER Experiment Name: At_Open_Flower_P Parameter: Age (day) Value: 21
  misc_feature: MA Experiment 20000264 PARAMETER Experiment Name: At_Open_Flower_P Parameter: Plant Line Value: WS
  misc_feature: MA Experiment 20000264 PARAMETER Experiment Name: At_Open_Flower_P Parameter: Tissue Value: Open Flower vs. Whole Plant
  misc_feature: MA Experiment ID: 20000265 Result: Down-regulated in Transcription
  misc_feature: MA Experiment 20000265 PARAMETER Experiment Name: At_Open_Flower_P Parameter: Age (day) Value: 21
  misc_feature: MA Experiment 20000265 PARAMETER Experiment Name: At_Open_Flower_P Parameter: Plant Line Value: WS
  misc_feature: MA Experiment 20000265 PARAMETER Experiment Name: At_Open_Flower_P Parameter: Tissue Value: Closed Flower vs. Whole Plant
  misc_feature: MA Experiment ID: 20000286 Result: Down-regulated in Transcription
  misc_feature: MA Experiment 20000286 PARAMETER Experiment Name: At_Open_Flower_P Parameter: Age (day) Value: 21
  misc_feature: MA Experiment 20000286 PARAMETER Experiment Name: At_Open_Flower_P Parameter: Plant Line Value: WS
  misc_feature: MA Experiment 20000286 PARAMETER Experiment Name: At_Open_Flower_P Parameter: Tissue Value: Half Open vs. Whole Plant
  misc_feature: MA Experiment ID: 20000794 Result: Down-regulated in Transcription
  misc_feature: MA Experiment 20000794 PARAMETER Experiment Name: At_Petals_P Parameter: Age (day) Value: 23-25 days
  misc_feature: MA Experiment 20000794 PARAMETER Experiment Name: At_Petals_P Parameter: Plant Line Value: WS
  misc_feature: MA Experiment 20000794 PARAMETER Experiment Name: At_Petals_P Parameter: Tissue Value: Petals vs. Whole plant
atggattaccaaatctcactaatcctagccaccagcataagctccatcttcctcttgcttatcgtcttcaccgtcgttatgatcgtatgtcgccgtcgtcctccaatccaaaaccatcctcgccggaatcgtaacttccccgaccccgatcccgatctaaacacggaaacagtaaccgaaagcttcgatccatcaatctgtgaaatatccatggcggaactcactatagcaactaaaaacttctcatcggatcttatcgtcggcgacggaagtttcggtctcgtttatcgagctcagctctcaaacggcgtcgtagtcgccgttaaaaagctcgatcacgacgctttacaaggattccgagaattcgcagccgaaatggacactctaggtcgtctcaatcacccaaacatagttaggatcctcggttattgcatctcgggatcagatcggattcttatctacgagttcttagagaaaagtagtcttgactattggttacacgagactgacgaagagaacagtccattgacttggtcaacgcgcgtgaatatcacgcgcgatgtggccaagggtttagcttatctgcatggtttaccgaaaccaattatacatagagatatcaaatcgagtaatgtgctgttggattcggatttcgtggcgcatattgcggatttcggattggcgcgaaggatcgatgcgtcgaggtcgcatgtgtcgacgcaagtggcggggacgatggggtacatgccaccggagtattgggaagggaataccgcggcgacggttaaagctgatgtttatagttttggtgtattgatgttggaattggcgacgcggagacggccgaatttaacggttgttgtggatgagaaggaagttgggttggctcaatgggctgtgatcatggtggagcaaaatcggtgttatgaaatgttggattttggaggtgtttgtggtagtgagaagggagtggaagagtattttaggattgcttgtctttgtattaaagagtcgactagagaaaggcctactatggttcaagtggtggagttattggaggagttatgtcgatttatgtag

SEQ ID NO: 47577 - protein, 359 aa, Arabidopsis thaliana
  peptide (1)..(359): Ceres Seq. ID no. 12591750
  misc_feature (81)..(282): Pfam Name: Protein kinase domain Pfam Description: Protein kinase domain
  misc_feature (68)..(355): Homolog of NCBI NO: 15238872 NR Description: leucine-rich repeat transmembrane protein kinase,
  misc_feature (62)..(355): Homolog of NCBI NO: 23304947 NR Description: extra sporogenous cells [Arabidopsis thaliana]
  misc_feature (62)..(355): Homolog of NCBI NO: 15240747 NR Description: receptor-like protein kinase-like protein
  misc_feature (62)..(354): Homolog of NCBI NO: 38423989 NR Description: putative brassinosteroid receptor
  misc_feature (5)..(355): Homolog of NCBI NO: 29427830 NR Description: Phytosulfokine receptor precursor (Phytosulfokine
  misc_feature (5)..(355): Homolog of NCBI NO: 32488727 NR Description: OSJNBb0004A17.6 [Oryza sativa (japonica
  misc_feature (47)..(355): Homolog of NCBI NO: 15218425 NR Description: leucine-rich repeat transmembrane protein kinase,
  misc_feature (5)..(355): Homolog of NCBI NO: 15227264 NR Description: leucine-rich repeat transmembrane protein kinase,
  misc_feature (5)..(355): Homolog of NCBI NO: 20197485 NR Description: putative receptor-like protein kinase
  misc_feature (1)..(359): Homolog of NCBI NO: 15238960 NR Description: serine/threonine protein kinase-like protein
MDYQISLILATSISSIFLLLIVFTVVMIVCRRRPPIQNHPRRNRNFPDPDPDLNTETVTESFDPSICEISMAELTIATKNFSSDLIVGDGSFGLVYRAQLSNGVVVAVKKLDHDALQGFREFAAEMDTLGRLNHPNIVRILGYCISGSDRILIYEFLEKSSLDYWLHETDEENSPLTWSTRVNITRDVAKGLAYLHGLPKPIIHRDIKSSNVLLDSDFVAHIADFGLARRIDASRSHVSTQVAGTMGYMPPEYWEGNTAATVKADVYSFGVLMLELATRRRPNLTVVVDEKEVGLAQWAVIMVEQNRCYEMLDFGGVCGSEKGVEEYFRIACLCIKESTRERPTMVQVVELLEELCRFM

SEQ ID NO: 47578 - protein, 333 aa, Arabidopsis thaliana
  peptide (1)..(333): Ceres Seq. ID no. 12591751
  misc_feature (55)..(256): Pfam Name: Protein kinase domain Pfam Description: Protein kinase domain
  misc_feature (42)..(329): Homolog of NCBI NO: 15238872 NR Description: leucine-rich repeat transmembrane protein kinase,
  misc_feature (36)..(329): Homolog of NCBI NO: 23304947 NR Description: extra sporogenous cells [Arabidopsis thaliana]
  misc_feature (36)..(329): Homolog of NCBI NO: 15240747 NR Description: receptor-like protein kinase-like protein
  misc_feature (36)..(328): Homolog of NCBI NO: 38423989 NR Description: putative brassinosteroid receptor
  misc_feature (1)..(329): Homolog of NCBI NO: 29427830 NR Description: Phytosulfokine receptor precursor (Phytosulfokine
  misc_feature (1)..(329): Homolog of NCBI NO: 32488727 NR Description: OSJNBb0004A17.6 [Oryza sativa (japonica
  misc_feature (21)..(329): Homolog of NCBI NO: 15218425 NR Description: leucine-rich repeat transmembrane protein kinase,
  misc_feature (1)..(329): Homolog of NCBI NO: 15227264 NR Description: leucine-rich repeat transmembrane protein kinase,
  misc_feature (1)..(329): Homolog of NCBI NO: 20197485 NR Description: putative receptor-like protein kinase
  misc_feature (1)..(333): Homolog of NCBI NO: 15238960 NR Description: serine/threonine protein kinase-like protein
MIVCRRRPPIQNHPRRNRNFPDPDPDLNTETVTESFDPSICEISMAELTIATKNFSSDLIVGDGSFGLVYRAQLSNGVVVAVKKLDHDALQGFREFAAEMDTLGRLNHPNIVRILGYCISGSDRILIYEFLEKSSLDYWLHETDEENSPLTWSTRVNITRDVAKGLAYLHGLPKPIIHRDIKSSNVLLDSDFVAHIADFGLARRIDASRSHVSTQVAGTMGYMPPEYWEGNTAATVKADVYSFGVLMLELATRRRPNLTVVVDEKEVGLAQWAVIMVEQNRCYEMLDFGGVCGSEKGVEEYFRIACLCIKESTRERPTMVQVVELLEELCRFM

SEQ ID NO: 47579 - protein, 289 aa, Arabidopsis thaliana
  peptide (1)..(289): Ceres Seq. ID no. 12591752
  misc_feature (11)..(212): Pfam Name: Protein kinase domain Pfam Description: Protein kinase domain
  misc_feature (1)..(285): Homolog of NCBI NO: 15238872 NR Description: leucine-rich repeat transmembrane protein kinase,
  misc_feature (1)..(285): Homolog of NCBI NO: 23304947 NR Description: extra sporogenous cells [Arabidopsis thaliana]
  misc_feature (1)..(285): Homolog of NCBI NO: 15240747 NR Description: receptor-like protein kinase-like protein
  misc_feature (1)..(284): Homolog of NCBI NO: 38423989 NR Description: putative brassinosteroid receptor
  misc_feature (1)..(285): Homolog of NCBI NO: 29427830 NR Description: Phytosulfokine receptor precursor (Phytosulfokine
  misc_feature (1)..(285): Homolog of NCBI NO: 32488727 NR Description: OSJNBb0004A17.6 [Oryza sativa (japonica
  misc_feature (1)..(285): Homolog of NCBI NO: 15218425 NR Description: leucine-rich repeat transmembrane protein kinase,
  misc_feature (1)..(285): Homolog of NCBI NO: 15227264 NR Description: leucine-rich repeat transmembrane protein kinase,
  misc_feature (1)..(285): Homolog of NCBI NO: 20197485 NR Description: putative receptor-like protein kinase
  misc_feature (1)..(289): Homolog of NCBI NO: 15238960 NR Description: serine/threonine protein kinase-like protein
MAELTIATKNFSSDLIVGDGSFGLVYRAQLSNGVVVAVKKLDHDALQGFREFAAEMDTLGRLNHPNIVRILGYCISGSDRILIYEFLEKSSLDYWLHETDEENSPLTWSTRVNITRDVAKGLAYLHGLPKPIIHRDIKSSNVLLDSDFVAHIADFGLARRIDASRSHVSTQVAGTMGYMPPEYWEGNTAATVKADVYSFGVLMLELATRRRPNLTVVVDEKEVGLAQWAVIMVEQNRCYEMLDFGGVCGSEKGVEEYFRIACLCIKESTRERPTMVQVVELLEELCRFM

SEQ ID NO: 47580 - DNA, 2921 bp, Arabidopsis thaliana
  misc_feature (1)..(2921): Ceres Seq. ID no. 12591927
  misc_feature: MA Experiment ID: 20001451 Result: Down-regulated in Transcription
  misc_feature: MA Experiment 20001451 PARAMETER Experiment Name: At_Far-red-induction_P Parameter: Age (day) Value: 7
  misc_feature: MA Experiment 20001451 PARAMETER Experiment Name: At_Far-red-induction_P Parameter: Light Value: Far-red vs. White
  misc_feature: MA Experiment 20001451 PARAMETER Experiment Name: At_Far-red-induction_P Parameter: Organism Value: A. thaliana
  misc_feature: MA Experiment 20001451 PARAMETER Experiment Name: At_Far-red-induction_P Parameter: Plant Line Value: Columbia
  misc_feature: MA Experiment 20001451 PARAMETER Experiment Name: At_Far-red-induction_P Parameter: Timepoint (hr) Value: 24
  misc_feature: MA Experiment 20001451 PARAMETER Experiment Name: At_Far-red-induction_P Parameter: Tissue Value: Whole Plant
atgagatctcttctctttgtactatcactcatttgcttttgctctcaaacagcactttcatggaagaaggaagagtttcgcagctgtgaccaaactccattttgtaaacgcgctcgatctcgtactcccggcgcgtgttctctaattgtcggcgatgtttccatcactgatggagatctcgtagcgaagcttctaccgaaagcgcctaatcaaggcgatggggatcagatcaagccgttgattctttctctctcagtttacaaggatgggatcgtgcggcttaaaatcgatgaggaccattcgttgaacccgccgaagaagaggttccaagttcctgatgtggtagtgtctgagtttgaggagaagaagatctggctgcagaaagtagcgacggagacgatctctggagacactagtccgtcttcagtagtttatgtatccgatggttacgaggcggtggtgcgacacgatccgtttgaggtgtatgtgcgtgagaaatcaggtgatcgccgtcgcgttgtgtcattgaattctcatggattatttgattttgagcagttggggaggaaaactgaaggagataactgggaagagaaatttaggactcatacagattctagaccatctggtcctcaatctattagtttcgatgtttcgttttatgattccagtttcgtttatggaattcctgaacacgccactagcttcgcgttgaagcctaccaagggtcctggagttgaggaatctgaaccctacaggctttttaatctagatgtgtttgaatacgatcatgaatcaccgtttgggctttacgggtcgattccgttcatggtttcgcatgggaagtctggtaaaacttcaggatttttctggttgaatgctgcggaaatgcagattgatgtgttggctaatggttgggatgcagagagtggtatttctttgccttctagtcacagtaggatcgacacattctggatgagcgaggcagggattgtggatacattctttttcgttgggcctgagccaaaggatgttgtaaagcagtatgcaagtgtgacaggtacttcagccatgcctcagttgtttgccactggttatcatcaatgtaggtggaactacaaagatgaggaggatgtggcacaggtggactcgaaattcgatgaacacgatattccttatgatgttctctggcttgacattgagcatacagatgggaagagatactttacatgggatagtgtgttgtttcctcatccagaggagatgcaaaagaaattggctgcaaagggtaggaagatggtgaccattgtggatcctcatatcaagagggatgactcatacttcttacacaaagaggctactcagatgggatactatgttaaggattcatctggaaaagactttgatggttggtgctggcctggttcatcatcttacattgatatgttgagcccagagattagaaaatggtggggtgggaggttctcgtataagaactatgttggttcaactccatcattgtacacctggaatgacatgaatgagccttctgtattcaatggtcccgaggttactatgccaagagatgcattacatgttgggggtgttgaacacagagaagttcataacgcatatggatattacttccacatggcgacttccgatggacttgttatgcgtgaagaaggaaaggataggccttttgtattgtcaagagcaatctttcccggcactcaaagatacggagcaatttggactggagataacacagccgaatgggaacaccttagagtctccattccaatgatattgacacttggtcttactggaattacattctctggagctgatattggtgggttttttggaaatcctgaaccagaacttctagttaggtggtaccaagtgggtgcttactatccatttttcaggggtcatgctcatcacgataccaaaagacgagagccttggttgtttggtgaacggaacacagaactcatgagagatgccatacacactcgttacacactgctcccatacttctacacgttgttcagagaagcaaacgttacgggtgttcctgttgtacgcccattatggatggaattcccgcaagatgaagctacttttagcaacgatgaagccttcatggtcggtagtggtctactggttcaaggagtttacaccaagggaacaacgcaagcttccgtgtatttgcctggcaaagaatcatggtatgacttgagaaacggtaagacttacgttggaggcaagactcacaagatggatgctccagaggagagtattcctgcgtttcaaaaggcaggaaccatcatcccaaggaaggaccggtttaggcgaagttcctctcaaatggacaatgatccttatactttggtggtagctttgaacagttctcaagaagcagaaggtgaactctacatcgatgacggcaaaagctttgaattcagacgaggctcttacatccatcgtcgcttcgtcttctcaaagggtgttcttacatcaacgaacttagctcctccagaagctcgtctctcttcccaatgcttgatcgacagaattatcctcttgggacacagctcaggtccaaaatctgcgttggtggaaccgttgaatcaaaaggcagagattgagatgggacctctgcgaatgggtgggcttgtagcttcctcgggtacaaaggtgttgactatccgcaaaccgggtgttcgagtggaccaagactggaccgtaaagattctgtgattgaacggtttgaaccagtttcactcatggccgttagagtggccgaaatctgcttttccggcgacggaatatcacactttttaatatatgtttggagatttagacttaaatagttgtaagagctaacagtttgaaagtcactttgcattgttgtt

SEQ ID NO: 47581 - protein, 921 aa, Arabidopsis thaliana
  peptide (1)..(921): Ceres Seq. ID no. 12591928
  misc_feature (190)..(920): Homolog of NCBI NO: 2274968 NR Description: Glucosidase II [Homo sapiens]
  misc_feature (190)..(920): Homolog of NCBI NO: 577295 NR Description: KIAA0088 [Homo sapiens]
  misc_feature (185)..(920): Homolog of NCBI NO: 28972059 NR Description: mKIAA0088 protein [Mus musculus]
  misc_feature (185)..(920): Homolog of NCBI NO: 26326711 NR Description: unnamed protein product [Mus musculus]
  misc_feature (185)..(920): Homolog of NCBI NO: 34861580 NR Description: similar to alpha glucosidase II, alpha subunit
  misc_feature (158)..(920): Homolog of NCBI NO: 1613878 NR Description: ModA [Dictyostelium discoideum]
  misc_feature (7)..(165): Homolog of NCBI NO: 7672977 NR Description: glucosidase II alpha subunit [Homo sapiens]
  misc_feature (190)..(920): Homolog of NCBI NO: 7672977 NR Description: glucosidase II alpha subunit [Homo sapiens]
  misc_feature (4)..(165): Homolog of NCBI NO: 6679891 NR Description: alpha glucosidase 2, alpha neutral subunit [Mus
  misc_feature (185)..(920): Homolog of NCBI NO: 6679891 NR Description: alpha glucosidase 2, alpha neutral subunit [Mus
MRSLLFVLSLICFCSQTALSWKKEEFRSCDQTPFCKRARSRTPGACSLIVGDVSITDGDLVAKLLPKAPNQGDGDQIKPLILSLSVYKDGIVRLKIDEDHSLNPPKKRFQVPDVVVSEFEEKKIWLQKVATETISGDTSPSSVVYVSDGYEAVVRHDPFEVYVREKSGDRRRVVSLNSHGLFDFEQLGRKTEGDNWEEKFRTHTDSRPSGPQSISFDVSFYDSSFVYGIPEHATSFALKPTKGPGVEESEPYRLFNLDVFEYDHESPFGLYGSIPFMVSHGKSGKTSGFFWLNAAEMQIDVLANGWDAESGISLPSSHSRIDTFWMSEAGIVDTFFFVGPEPKDVVKQYASVTGTSAMPQLFATGYHQCRWNYKDEEDVAQVDSKFDEHDIPYDVLWLDIEHTDGKRYFTWDSVLFPHPEEMQKKLAAKGRKMVTIVDPHIKRDDSYFLHKEATQMGYYVKDSSGKDFDGWCWPGSSSYIDMLSPEIRKWWGGRFSYKNYVGSTPSLYTWNDMNEPSVFNGPEVTMPRDALHVGGVEHREVHNAYGYYFHMATSDGLVMREEGKDRPFVLSRAIFPGTQRYGAIWTGDNTAEWEHLRVSIPMILTLGLTGITFSGADIGGFFGNPEPELLVRWYQVGAYYPFFRGHAHHDTKRREPWLFGERNTELMRDAIHTRYTLLPYFYTLFREANVTGVPVVRPLWMEFPQDEATFSNDEAFMVGSGLLVQGVYTKGTTQASVYLPGKESWYDLRNGKTYVGGKTHKMDAPEESIPAFQKAGTIIPRKDRFRRSSSQMDNDPYTLVVALNSSQEAEGELYIDDGKSFEFRRGSYIHRRFVFSKGVLTSTNLAPPEARLSSQCLIDRIILLGHSSGPKSALVEPLNQKAEIEMGPLRMGGLVASSGTKVLTIRKPGVRVDQDWTVKIL

SEQ ID NO: 47582 - protein, 645 aa, Arabidopsis thaliana
  peptide (1)..(645): Ceres Seq. ID no. 12591929
  misc_feature (1)..(644): Homolog of NCBI NO: 39594663 NR Description: Hypothetical protein CBG19359 [Caenorhabditis
  misc_feature (1)..(644): Homolog of NCBI NO: 1890664 NR Description: glucosidase II [Sus scrofa]
  misc_feature (1)..(644): Homolog of NCBI NO: 2274968 NR Description: Glucosidase II [Homo sapiens]
  misc_feature (1)..(644): Homolog of NCBI NO: 577295 NR Description: KIAA0088 [Homo sapiens]
  misc_feature (1)..(644): Homolog of NCBI NO: 28972059 NR Description: mKIAA0088 protein [Mus musculus]
  misc_feature (1)..(644): Homolog of NCBI NO: 26326711 NR Description: unnamed protein product [Mus musculus]
  misc_feature (1)..(644): Homolog of NCBI NO: 34861580 NR Description: similar to alpha glucosidase II, alpha subunit
  misc_feature (1)..(644): Homolog of NCBI NO: 1613878 NR Description: ModA [Dictyostelium discoideum]
  misc_feature (1)..(644): Homolog of NCBI NO: 7672977 NR Description: glucosidase II alpha subunit [Homo sapiens]
  misc_feature (1)..(644): Homolog of NCBI NO: 6679891 NR Description: alpha glucosidase 2, alpha neutral subunit [Mus
MVSHGKSGKTSGFFWLNAAEMQIDVLANGWDAESGISLPSSHSRIDTFWMSEAGIVDTFFFVGPEPKDVVKQYASVTGTSAMPQLFATGYHQCRWNYKDEEDVAQVDSKFDEHDIPYDVLWLDIEHTDGKRYFTWDSVLFPHPEEMQKKLAAKGRKMVTIVDPHIKRDDSYFLHKEATQMGYYVKDSSGKDFDGWCWPGSSSYIDMLSPEIRKWWGGRFSYKNYVGSTPSLYTWNDMNEPSVFNGPEVTMPRDALHVGGVEHREVHNAYGYYFHMATSDGLVMREEGKDRPFVLSRAIFPGTQRYGAIWTGDNTAEWEHLRVSIPMILTLGLTGITFSGADIGGFFGNPEPELLVRWYQVGAYYPFFRGHAHHDTKRREPWLFGERNTELMRDAIHTRYTLLPYFYTLFREANVTGVPVVRPLWMEFPQDEATFSNDEAFMVGSGLLVQGVYTKGTTQASVYLPGKESWYDLRNGKTYVGGKTHKMDAPEESIPAFQKAGTIIPRKDRFRRSSSQMDNDPYTLVVALNSSQEAEGELYIDDGKSFEFRRGSYIHRRFVFSKGVLTSTNLAPPEARLSSQCLIDRIILLGHSSGPKSALVEPLNQKAEIEMGPLRMGGLVASSGTKVLTIRKPGVRVDQDWTVKIL

SEQ ID NO: 47583 - protein, 625 aa, Arabidopsis thaliana
  peptide (1)..(625): Ceres Seq. ID no. 12591930
  misc_feature (1)..(624): Homolog of NCBI NO: 39594663 NR Description: Hypothetical protein CBG19359 [Caenorhabditis
  misc_feature (1)..(624): Homolog of NCBI NO: 1890664 NR Description: glucosidase II [Sus scrofa]
  misc_feature (1)..(624): Homolog of NCBI NO: 2274968 NR Description: Glucosidase II [Homo sapiens]
  misc_feature (1)..(624): Homolog of NCBI NO: 577295 NR Description: KIAA0088 [Homo sapiens]
  misc_feature (1)..(624): Homolog of NCBI NO: 28972059 NR Description: mKIAA0088 protein [Mus musculus]
  misc_feature (1)..(624): Homolog of NCBI NO: 26326711 NR Description: unnamed protein product [Mus musculus]
  misc_feature (1)..(624): Homolog of NCBI NO: 34861580 NR Description: similar to alpha glucosidase II, alpha subunit
  misc_feature (1)..(624): Homolog of NCBI NO: 1613878 NR Description: ModA [Dictyostelium discoideum]
  misc_feature (1)..(624): Homolog of NCBI NO: 7672977 NR Description: glucosidase II alpha subunit [Homo sapiens]
  misc_feature (1)..(624): Homolog of NCBI NO: 6679891 NR Description: alpha glucosidase 2, alpha neutral subunit [Mus
MQIDVLANGWDAESGISLPSSHSRIDTFWMSEAGIVDTFFFVGPEPKDVVKQYASVTGTSAMPQLFATGYHQCRWNYKDEEDVAQVDSKFDEHDIPYDVLWLDIEHTDGKRYFTWDSVLFPHPEEMQKKLAAKGRKMVTIVDPHIKRDDSYFLHKEATQMGYYVKDSSGKDFDGWCWPGSSSYIDMLSPEIRKWWGGRFSYKNYVGSTPSLYTWNDMNEPSVFNGPEVTMPRDALHVGGVEHREVHNAYGYYFHMATSDGLVMREEGKDRPFVLSRAIFPGTQRYGAIWTGDNTAEWEHLRVSIPMILTLGLTGITFSGADIGGFFGNPEPELLVRWYQVGAYYPFFRGHAHHDTKRREPWLFGERNTELMRDAIHTRYTLLPYFYTLFREANVTGVPVVRPLWMEFPQDEATFSNDEAFMVGSGLLVQGVYTKGTTQASVYLPGKESWYDLRNGKTYVGGKTHKMDAPEESIPAFQKAGTIIPRKDRFRRSSSQMDNDPYTLVVALNSSQEAEGELYIDDGKSFEFRRGSYIHRRFVFSKGVLTSTNLAPPEARLSSQCLIDRIILLGHSSGPKSALVEPLNQKAEIEMGPLRMGGLVASSGTKVLTIRKPGVRVDQDWTVKIL

SEQ ID NO: 47584 - DNA, 1596 bp, Arabidopsis thaliana
  misc_feature (1)..(1596): Ceres Seq. ID no. 13588360
  misc_feature: MA Experiment ID: 108435 Result: Down-regulated in Transcription
  misc_feature: MA Experiment 108435 PARAMETER Experiment Name: At_stm_Mutants_cDNA_P Parameter: Plant Line Value: wt Landsburg vs stm
  misc_feature: MA Experiment 108435 PARAMETER Experiment Name: At_stm_Mutants_cDNA_P Parameter: Tissue Value: Shoot Apical Meristem Region
  misc_feature: MA Experiment ID: 108463 Result: Up-regulated in Transcription
  misc_feature: MA Experiment 108463 PARAMETER Experiment Name: At_Germinating_Seeds_cDNA_P Parameter: Age (day) Value: 3 vs. 0
  misc_feature: MA Experiment 108463 PARAMETER Experiment Name: At_Germinating_Seeds_cDNA_P Parameter: Tissue Value: Germinating Seeds
  misc_feature: MA Experiment ID: 108464 Result: Up-regulated in Transcription
  misc_feature: MA Experiment 108464 PARAMETER Experiment Name: At_Germinating_Seeds_cDNA_P Parameter: Age (day) Value: 4 vs. 0
  misc_feature: MA Experiment 108464 PARAMETER Experiment Name: At_Germinating_Seeds_cDNA_P Parameter: Tissue Value: Germinating Seeds
  misc_feature: MA Experiment ID: 108573 Result: Up-regulated in Transcription
  misc_feature: MA Experiment 108573 PARAMETER Experiment Name: At_Drought_cDNA_P Parameter: Timepoint (hr) Value: 6
  misc_feature: MA Experiment 108573 PARAMETER Experiment Name: At_Drought_cDNA_P Parameter: Tissue Value: Aerial
  misc_feature: MA Experiment 108573 PARAMETER Experiment Name: At_Drought_cDNA_P Parameter: Treatment Value: Drought vs. No Drought
  misc_feature: MA Experiment ID: 108595 Result: Down-regulated in Transcription
  misc_feature: MA Experiment 108595 PARAMETER Experiment Name: At_Ler-pi_Ovule_cDNA_P Parameter: Plant Line Value: null
  misc_feature: MA Experiment ID: 20000113 Result: Up-regulated in Transcription
  misc_feature: MA Experiment 20000113 PARAMETER Experiment Name: At_42deg_Heat_cDNA_P Parameter: Temperature (deg C) Value: 42 vs. 22
  misc_feature: MA Experiment 20000113 PARAMETER Experiment Name: At_42deg_Heat_cDNA_P Parameter: Timepoint (hr) Value: 8
  misc_feature: MA Experiment 20000113 PARAMETER Experiment Name: At_42deg_Heat_cDNA_P Parameter: Tissue Value: Aerial
  misc_feature: MA Experiment ID: 20000227 Result: Down-regulated in Transcription
  misc_feature: MA Experiment 20000227 PARAMETER Experiment Name: At_Root-Tips-vs-Tops_P Parameter: Tissue Value: Root Tips vs. Root Tops
  misc_feature: MA Experiment ID: 20000234 Result: Down-regulated in Transcription
  misc_feature: MA Experiment 20000234 PARAMETER Experiment Name: At_Siliques_P Parameter: Age (day) Value: 21
  misc_feature: MA Experiment 20000234 PARAMETER Experiment Name: At_Siliques_P Parameter: Organism Value: A. thaliana
  misc_feature: MA Experiment 20000234 PARAMETER Experiment Name: At_Siliques_P Parameter: Plant Line Value: WS
  misc_feature: MA Experiment 20000234 PARAMETER Experiment Name: At_Siliques_P Parameter: Tissue Value: Less Than 5mm Siliques vs. Whole Plant
  misc_feature: MA Experiment ID: 20000235 Result: Down-regulated in Transcription
  misc_feature: MA Experiment 20000235 PARAMETER Experiment Name: At_Siliques_P Parameter: Age (day) Value: 21
  misc_feature: MA Experiment 20000235 PARAMETER Experiment Name: At_Siliques_P Parameter: Organism Value: A. thaliana
  misc_feature: MA Experiment 20000235 PARAMETER Experiment Name: At_Siliques_P Parameter: Plant Line Value: WS
  misc_feature: MA Experiment 20000235 PARAMETER Experiment Name: At_Siliques_P Parameter: Tissue Value: 5-10mm Siliques vs. Whole Plant
  misc_feature: MA Experiment ID: 20000264 Result: Down-regulated in Transcription
  misc_feature: MA Experiment 20000264 PARAMETER Experiment Name: At_Open_Flower_P Parameter: Age (day) Value: 21
  misc_feature: MA Experiment 20000264 PARAMETER Experiment Name: At_Open_Flower_P Parameter: Plant Line Value: WS
  misc_feature: MA Experiment 20000264 PARAMETER Experiment Name: At_Open_Flower_P Parameter: Tissue Value: Open Flower vs. Whole Plant
  misc_feature: MA Experiment ID: 20000265 Result: Down-regulated in Transcription
  misc_feature: MA Experiment 20000265 PARAMETER Experiment Name: At_Open_Flower_P Parameter: Age (day) Value: 21
  misc_feature: MA Experiment 20000265 PARAMETER Experiment Name: At_Open_Flower_P Parameter: Plant Line Value: WS
  misc_feature: MA Experiment 20000265 PARAMETER Experiment Name: At_Open_Flower_P Parameter: Tissue Value: Closed Flower vs. Whole Plant
  misc_feature: MA Experiment ID: 20000286 Result: Down-regulated in Transcription
  misc_feature: MA Experiment 20000286 PARAMETER Experiment Name: At_Open_Flower_P Parameter: Age (day) Value: 21
  misc_feature: MA Experiment 20000286 PARAMETER Experiment Name: At_Open_Flower_P Parameter: Plant Line Value: WS
  misc_feature: MA Experiment 20000286 PARAMETER Experiment Name: At_Open_Flower_P Parameter: Tissue Value: Half Open vs. Whole Plant
  misc_feature: MA Experiment ID: 20000439 Result: Down-regulated in Transcription
  misc_feature: MA Experiment 20000439 PARAMETER Experiment Name: At_Roots__P Parameter: Age (day) Value: 14 vs. 21
  misc_feature: MA Experiment 20000439 PARAMETER Experiment Name: At_Roots__P Parameter: Organism Value: A. thaliana
  misc_feature: MA Experiment 20000439 PARAMETER Experiment Name: At_Roots__P Parameter: Tissue Value: Roots vs. Whole Plant
  misc_feature: MA Experiment ID: 20000794 Result: Down-regulated in Transcription
  misc_feature: MA Experiment 20000794 PARAMETER Experiment Name: At_Petals_P Parameter: Age (day) Value: 23-25 days
  misc_feature: MA Experiment 20000794 PARAMETER Experiment Name: At_Petals_P Parameter: Plant Line Value: WS
  misc_feature: MA Experiment 20000794 PARAMETER Experiment Name: At_Petals_P Parameter: Tissue Value: Petals vs. Whole plant
  misc_feature: MA Experiment ID: 20001557 Result: Down-regulated in Transcription
  misc_feature: MA Experiment 20001557 PARAMETER Experiment Name: At_Drought_Soil_Dry_P Parameter: Age (day) Value: 27
  misc_feature: MA Experiment 20001557 PARAMETER Experiment Name: At_Drought_Soil_Dry_P Parameter: Organism Value: A. thaliana
  misc_feature: MA Experiment 20001557 PARAMETER Experiment Name: At_Drought_Soil_Dry_P Parameter: Plant Line Value: WS
  misc_feature: MA Experiment 20001557 PARAMETER Experiment Name: At_Drought_Soil_Dry_P Parameter: Post Timepoint (hr) Value: 3
  misc_feature: MA Experiment 20001557 PARAMETER Experiment Name: At_Drought_Soil_Dry_P Parameter: Post-Treatment Value: Re-Water vs. No Drought
  misc_feature: MA Experiment 20001557 PARAMETER Experiment Name: At_Drought_Soil_Dry_P Parameter: Timepoint (day) Value: 13
  misc_feature: MA Experiment 20001557 PARAMETER Experiment Name: At_Drought_Soil_Dry_P Parameter: Treatment Value: Drought vs. No Drought
  misc_feature: MA Experiment ID: 20001558 Result: Down-regulated in Transcription
  misc_feature: MA Experiment 20001558 PARAMETER Experiment Name: At_Drought_Soil_Dry_P Parameter: Age (day) Value: 27
  misc_feature: MA Experiment 20001558 PARAMETER Experiment Name: At_Drought_Soil_Dry_P Parameter: Organism Value: A. thaliana
  misc_feature: MA Experiment 20001558 PARAMETER Experiment Name: At_Drought_Soil_Dry_P Parameter: Plant Line Value: WS
  misc_feature: MA Experiment 20001558 PARAMETER Experiment Name: At_Drought_Soil_Dry_P Parameter: Post Timepoint (hr) Value: 6
  misc_feature: MA Experiment 20001558 PARAMETER Experiment Name: At_Drought_Soil_Dry_P Parameter: Post-Treatment Value: Re-Water vs. No Drought
  misc_feature: MA Experiment 20001558 PARAMETER Experiment Name: At_Drought_Soil_Dry_P Parameter: Timepoint (day) Value: 13
  misc_feature: MA Experiment 20001558 PARAMETER Experiment Name: At_Drought_Soil_Dry_P Parameter: Treatment Value: Drought vs. No Drought
  misc_feature: MA Experiment ID: 20001560 Result: Down-regulated in Transcription
  misc_feature: MA Experiment 20001560 PARAMETER Experiment Name: At_Drought_Soil_Dry_P Parameter: Age (day) Value: 28
  misc_feature: MA Experiment 20001560 PARAMETER Experiment Name: At_Drought_Soil_Dry_P Parameter: Organism Value: A. thaliana
  misc_feature: MA Experiment 20001560 PARAMETER Experiment Name: At_Drought_Soil_Dry_P Parameter: Plant Line Value: WS
  misc_feature: MA Experiment 20001560 PARAMETER Experiment Name: At_Drought_Soil_Dry_P Parameter: Post Timepoint (hr) Value: None
  misc_feature: MA Experiment 20001560 PARAMETER Experiment Name: At_Drought_Soil_Dry_P Parameter: Post-Treatment Value: None
  misc_feature: MA Experiment 20001560 PARAMETER Experiment Name: At_Drought_Soil_Dry_P Parameter: Timepoint (day) Value: 14
  misc_feature: MA Experiment 20001560 PARAMETER Experiment Name: At_Drought_Soil_Dry_P Parameter: Treatment Value: Drought vs. No Drought
  misc_feature: MA Experiment ID: 20001905 Result: Down-regulated in Transcription
  misc_feature: MA Experiment 20001905 PARAMETER Experiment Name: At_Drought_Reproduction_P Parameter: Age (day) Value: 40
  misc_feature: MA Experiment 20001905 PARAMETER Experiment Name: At_Drought_Reproduction_P Parameter: Organism Value: A. thaliana
  misc_feature: MA Experiment 20001905 PARAMETER Experiment Name: At_Drought_Reproduction_P Parameter: Plant Line Value: WS
  misc_feature: MA Experiment 20001905 PARAMETER Experiment Name: At_Drought_Reproduction_P Parameter: Timepoint (day) Value: 10
  misc_feature: MA Experiment 20001905 PARAMETER Experiment Name: At_Drought_Reproduction_P Parameter: Tissue Value: Rosettes
  misc_feature: MA Experiment 20001905 PARAMETER Experiment Name: At_Drought_Reproduction_P Parameter: Treatment Value: Drought vs. No Drought
ggtttgttttgtggctgacgataaaacagagcacaaaagaaaaaaaaatctagggtttgttttgagactaagaggaagagaaagaagaagaagagaaaattcgtacaattccgccattaaagcttcaacctttaatggcgacaacgactctttcttccttctctctttctcttcctcaacttctccataaacccacaaagcctcttcctttcctcttccttcttcctcgattcaatcggagatttcgaagtctcactatcacttcttcttctacaacttcttcaaacaatttcagtagtaattgtggcgatgatggcttctctcttgacgatttcactctccattctgattctcgatcacctaaaaaatgtgtcctttctgatcttatacaagagattgagccattagatgtgagtttgattcagaaggatgttccagttactactttggatgcaatgaaaagaacaatctcaggcatgttgggtcttcttccatctgataggtttcaggttcatattgagtcactttgggaacctttgtctaagcttttggtatcttcaatgatgactgggtatacattgaggaatgctgaatatcggctttttcttgaaaaaaaccttgatatgagtggtggaggcttggacagccacgcttcggaaaacactgaatatgatatggaagggacgtttcctgatgaagatcatgtttcatccaaaagggatagcagaactcagaacctttctgaaacgattgatgaagaaggtttgggcagagtatcctctgaagctcaagaatatatcttacgtttgcagtcacaattgtcttctgtgaaaaaggaattacaagaaatgagacgaaagaacgctgccctacaaatgcaacaatttgttggcgaagagaagaatgatttgttggactatttacgatctttgcaacctgagaaggtagctgagttgtcagaacctgcggctcctgaggtgaaagagactattcattctgttgttcacggtcttttggcaactctatcaccgaagatgcactctaagtttccagcatcagaagttccacctactgaaacggtgaaagcaaaaagtgatgaagattgtgctgaacttgtagagaacacttcgttgcagtttcagcctcttatctcactgactcgagactaccttgctcgtcttctcttctggtgcatgctattgggacattatctcagaggtttggaatatcgaatggaactgatggaggtcctgtctttgacatgcgatgccaatgggtctgagaacgtcgcttgaagctatctttatacatctcaacattgtcttacatgcgtatcagcggccttgacactcttaaaccaacaaagtgggcaagtgactaggagacaggccagcctttgagctttagctcttgcacatatatgcagctttgtgctggcctgaaaattcatgggcgaggtaaagtgtaacataagaaatcacttctactaaaattatttttcgttgcattatcgtgtgatggatctgcaaagcaataaagctaagtgtaattgtattcaggaatatactcgtttggtcattaagtatagtttgtcct

SEQ ID NO: 47585 - protein, 386 aa, Arabidopsis thaliana
  peptide (1)..(386): Ceres Seq. ID no. 13588361
  misc_feature (1)..(386): Homolog of NCBI NO: 15226027 NR Description: expressed protein [Arabidopsis thaliana]
MATTTLSSFSLSLPQLLHKPTKPLPFLFLLPRFNRRFRSLTITSSSTTSSNNFSSNCGDDGFSLDDFTLHSDSRSPKKCVLSDLIQEIEPLDVSLIQKDVPVTTLDAMKRTISGMLGLLPSDRFQVHIESLWEPLSKLLVSSMMTGYTLRNAEYRLFLEKNLDMSGGGLDSHASENTEYDMEGTFPDEDHVSSKRDSRTQNLSETIDEEGLGRVSSEAQEYILRLQSQLSSVKKELQEMRRKNAALQMQQFVGEEKNDLLDYLRSLQPEKVAELSEPAAPEVKETIHSVVHGLLATLSPKMHSKFPASEVPPTETVKAKSDEDCAELVENTSLQFQPLISLTRDYLARLLFWCMLLGHYLRGLEYRMELMEVLSLTCDANGSENVA

SEQ ID NO: 47586 - protein, 279 aa, Arabidopsis thaliana; identical to SEQ ID NO: 30593
  peptide (1)..(279): Ceres Seq. ID no. 13588362
  misc_feature (1)..(279): Homolog of NCBI NO: 15226027 NR Description: expressed protein [Arabidopsis thaliana]

SEQ ID NO: 47587 - protein, 272 aa, Arabidopsis thaliana; identical to SEQ ID NO: 30594
  peptide (1)..(272): Ceres Seq. ID no. 13588363
  misc_feature (1)..(272): Homolog of NCBI NO: 15226027 NR Description: expressed protein [Arabidopsis thaliana]

SEQ ID NO: 47588 - DNA, 785 bp, Arabidopsis thaliana
  misc_feature (1)..(785): Ceres Seq. ID no. 14304327
  misc_feature: MA Experiment ID: 20000496 Result: Down-regulated in Transcription
  misc_feature: MA Experiment 20000496 PARAMETER Experiment Name: At_Guard_Cells_P Parameter: Harvest Date Value: 7/19/2002
  misc_feature: MA Experiment 20000496 PARAMETER Experiment Name: At_Guard_Cells_P Parameter: Organism Value: Canola
  misc_feature: MA Experiment 20000496 PARAMETER Experiment Name: At_Guard_Cells_P Parameter: Tissue Value: Guard Cells vs. Leaves
  misc_feature: MA Experiment ID: 20001557 Result: Down-regulated in Transcription
  misc_feature: MA Experiment 20001557 PARAMETER Experiment Name: At_Drought_Soil_Dry_P Parameter: Age (day) Value: 27
  misc_feature: MA Experiment 20001557 PARAMETER Experiment Name: At_Drought_Soil_Dry_P Parameter: Organism Value: A. thaliana
  misc_feature: MA Experiment 20001557 PARAMETER Experiment Name: At_Drought_Soil_Dry_P Parameter: Plant Line Value: WS
  misc_feature: MA Experiment 20001557 PARAMETER Experiment Name: At_Drought_Soil_Dry_P Parameter: Post Timepoint (hr) Value: 3
  misc_feature: MA Experiment 20001557 PARAMETER Experiment Name: At_Drought_Soil_Dry_P Parameter: Post-Treatment Value: Re-Water vs. No Drought
  misc_feature: MA Experiment 20001557 PARAMETER Experiment Name: At_Drought_Soil_Dry_P Parameter: Timepoint (day) Value: 13
  misc_feature: MA Experiment 20001557 PARAMETER Experiment Name: At_Drought_Soil_Dry_P Parameter: Treatment Value: Drought vs. No Drought
ggcttagatatcatcgaacttgctccaactgctctatctcaggatctctctcagacacagtttcttccatccatggcgtctctttcttctacctctctctctctccccaagaattctcaccaactccatccttcatctggtttttctctgaatccaaatgctcgttgtgtcagtgtttcatttggactgaatcactccaacaaacttcatatttctgctcctagaaccaaaaggatcctaaccattcaatctgcatacagagatgatgatggttcaggcagcacaggcctattcgtcggagggtttattttgggcggacttatagtcggtgccctcggatgtgtatatgcaccacagatcagcaaggctatagctggagcagaccgaaaggatctcatgaggaagttgcctaaattcatatatgacgaggaaaaagctttggagaaaacacgtaaggtactagctgagaaaattgctcagcttaactctgctatcgacgatgtctcctctcagctcaaatcagaagatactccgaatggtgcagctctaagcaccgatgaaatcgaggctacagcctgaaatcatctgtttttaggatttgaaattgaatcatgggagattacttactatgatcccaataattgttttcctttctgtgtaatgttgtacaacttttcgtctactatcttcaaatgactgctttcttccttctttttttttttctcgaaatcgcggtgttgaaggatatatcacagttatatgcgaaaccagacgttatgaagact

SEQ ID NO: 47589 - protein, 192 aa, Arabidopsis thaliana
  peptide (1)..(192): Ceres Seq. ID no. 14304328
  misc_feature (25)..(192): Homolog of NCBI NO: 15233017 NR Description: expressed protein [Arabidopsis thaliana]
  misc_feature (15)..(191): Homolog of NCBI NO: 10176975 NR Description: protein; similar to unknown protein [Arabidopsis
  misc_feature (25)..(191): Homolog of NCBI NO: 17065406 NR Description: Unknown protein [Arabidopsis thaliana]
  misc_feature (25)..(191): Homolog of NCBI NO: 22326856 NR Description: protein; similar to unknown protein
  misc_feature (25)..(192): Homolog of NCBI NO: 18400762 NR Description: expressed protein [Arabidopsis thaliana]
GLDIIELAPTALSQDLSQTQFLPSMASLSSTSLSLPKNSHQLHPSSGFSLNPNARCVSVSFGLNHSNKLHISAPRTKRILTIQSAYRDDDGSGSTGLFVGGFILGGLIVGALGCVYAPQISKAIAGADRKDLMRKLPKFIYDEEKALEKTRKVLAEKIAQLNSAIDDVSSQLKSEDTPNGAALSTDEIEATA

SEQ ID NO: 47590 - protein, 168 aa, Arabidopsis thaliana
  peptide (1)..(168): Ceres Seq. ID no. 14304329
  misc_feature (1)..(168): Homolog of NCBI NO: 15233017 NR Description: expressed protein [Arabidopsis thaliana]
  misc_feature (1)..(167): Homolog of NCBI NO: 10176975 NR Description: protein; similar to unknown protein [Arabidopsis
  misc_feature (1)..(167): Homolog of NCBI NO: 17065406 NR Description: Unknown protein [Arabidopsis thaliana]
  misc_feature (1)..(167): Homolog of NCBI NO: 22326856 NR Description: protein; similar to unknown protein
  misc_feature (1)..(168): Homolog of NCBI NO: 18400762 NR Description: expressed protein [Arabidopsis thaliana]
MASLSSTSLSLPKNSHQLHPSSGFSLNPNARCVSVSFGLNHSNKLHISAPRTKRILTIQSAYRDDDGSGSTGLFVGGFILGGLIVGALGCVYAPQISKAIAGADRKDLMRKLPKFIYDEEKALEKTRKVLAEKIAQLNSAIDDVSSQLKSEDTPNGAALSTDEIEATA

SEQ ID NO: 47591 - DNA, 2237 bp, Arabidopsis thaliana
  misc_feature (1)..(2237): Ceres Seq. ID no. 12602079
  misc_feature: MA Experiment ID: 20000182 Result: Up-regulated in Transcription
  misc_feature: MA Experiment 20000182 PARAMETER Experiment Name: At_2mM_SA_P Parameter: Age (day) Value: 14
  misc_feature: MA Experiment 20000182 PARAMETER Experiment Name: At_2mM_SA_P Parameter: Organism Value: A. thaliana
  misc_feature: MA Experiment 20000182 PARAMETER Experiment Name: At_2mM_SA_P Parameter: Plant Line Value: WS
  misc_feature: MA Experiment 20000182 PARAMETER Experiment Name: At_2mM_SA_P Parameter: Timepoint (hr) Value: 6
  misc_feature: MA Experiment 20000182 PARAMETER Experiment Name: At_2mM_SA_P Parameter: Tissue Value: Aerial
  misc_feature: MA Experiment 20000182 PARAMETER Experiment Name: At_2mM_SA_P Parameter: Treatment Value: 2mM SA vs. No Treatment
  misc_feature: MA Experiment ID: 20000184 Result: Down-regulated in Transcription
  misc_feature: MA Experiment 20000184 PARAMETER Experiment Name: At_Shoots__P Parameter: Age (day) Value: 7
  misc_feature: MA Experiment 20000184 PARAMETER Experiment Name: At_Shoots__P Parameter: Tissue Value: Shoots vs. Whole Plant
  misc_feature: MA Experiment ID: 20000234 Result: Down-regulated in Transcription
  misc_feature: MA Experiment 20000234 PARAMETER Experiment Name: At_Siliques_P Parameter: Age (day) Value: 21
  misc_feature: MA Experiment 20000234 PARAMETER Experiment Name: At_Siliques_P Parameter: Organism Value: A. thaliana
  misc_feature: MA Experiment 20000234 PARAMETER Experiment Name: At_Siliques_P Parameter: Plant Line Value: WS
  misc_feature: MA Experiment 20000234 PARAMETER Experiment Name: At_Siliques_P Parameter: Tissue Value: Less Than 5mm Siliques vs. Whole Plant
  misc_feature: MA Experiment ID: 20000235 Result: Down-regulated in Transcription
  misc_feature: MA Experiment 20000235 PARAMETER Experiment Name: At_Siliques_P Parameter: Age (day) Value: 21
  misc_feature: MA Experiment 20000235 PARAMETER Experiment Name: At_Siliques_P Parameter: Organism Value: A. thaliana
  misc_feature: MA Experiment 20000235 PARAMETER Experiment Name: At_Siliques_P Parameter: Plant Line Value: WS
  misc_feature: MA Experiment 20000235 PARAMETER Experiment Name: At_Siliques_P Parameter: Tissue Value: 5-10mm Siliques vs. Whole Plant
  misc_feature: MA Experiment ID: 20000264 Result: Down-regulated in Transcription
  misc_feature: MA Experiment 20000264 PARAMETER Experiment Name: At_Open_Flower_P Parameter: Age (day) Value: 21
  misc_feature: MA Experiment 20000264 PARAMETER Experiment Name: At_Open_Flower_P Parameter: Plant Line Value: WS
  misc_feature: MA Experiment 20000264 PARAMETER Experiment Name: At_Open_Flower_P Parameter: Tissue Value: Open Flower vs. Whole Plant
  misc_feature: MA Experiment ID: 20000265 Result: Down-regulated in Transcription
  misc_feature: MA Experiment 20000265 PARAMETER Experiment Name: At_Open_Flower_P Parameter: Age (day) Value: 21
  misc_feature: MA Experiment 20000265 PARAMETER Experiment Name: At_Open_Flower_P Parameter: Plant Line Value: WS
  misc_feature: MA Experiment 20000265 PARAMETER Experiment Name: At_Open_Flower_P Parameter: Tissue Value: Closed Flower vs. Whole Plant
  misc_feature: MA Experiment ID: 20000286 Result: Down-regulated in Transcription
  misc_feature: MA Experiment 20000286 PARAMETER Experiment Name: At_Open_Flower_P Parameter: Age (day) Value: 21
  misc_feature: MA Experiment 20000286 PARAMETER Experiment Name: At_Open_Flower_P Parameter: Plant Line Value: WS
  misc_feature: MA Experiment 20000286 PARAMETER Experiment Name: At_Open_Flower_P Parameter: Tissue Value: Half Open vs. Whole Plant
  misc_feature: MA Experiment ID: 20000438 Result: Down-regulated in Transcription
  misc_feature: MA Experiment 20000438 PARAMETER Experiment Name: At_Shoots__P Parameter: Age (day) Value: 14
  misc_feature: MA Experiment 20000438 PARAMETER Experiment Name: At_Shoots__P Parameter: Tissue Value: Shoots vs. Whole Plant
aacgaatccaattacccaaccagaaacagcaacacatatagagatatatactattaaacaataacataacaaagaaaccattttttctcttttgttattgacttaaacaaaaactatcaacgaataattatccttttttgagtttttcccatttcttcttcgtctccatttcatcgtcttctcgctgttctgctatattccgtttcgttggatgaggagaagaagaaagtgaaaaaagttgtgaaatagagagagtttgtttcatgggcaattcatgtcgtggttcttttaaggacaaaatctacgagggcaatcatagtaggcccgaggagaattccaaatccaccaccactactgtttcctctgttcattctcctactacagaccaagatttctccaaacagaacaccaatccagctcttgtgattcctgttaaagaacccattatgcggcgtaacgttgacaatcaatcttactatgttcttggtcacaagactcctaacattcgtgatctttacacgttgagtcgtaagttaggacaaggacaattcgggacaacgtatttgtgtactgatattgccacaggtgttgactatgcttgtaagtctatatccaagaggaaattgatatctaaagaagatgttgaggatgttaggagggagattcagattatgcatcatttagctggtcacaagaatattgttactattaaaggagcttatgaggatcctttgtatgttcacattgtgatggagctttgtgctggtggtgagttgtttgataggattattcatagaggtcattacagcgagaggaaagctgctgagttgaccaagatcattgtcggtgttgttgaggcgtgtcattctcttggtgttatgcatagagatttaaagcctgagaatttcttgttggttaataaggatgatgatttctctcttaaggccattgattttggtctctctgttttcttcaaaccaggccaaatattcaaggatgttgttggaagtccatactatgttgctcctgaggttcttctaaaacattatggtccagaagctgatgtgtggactgctggtgttatactctatatcttactaagtggtgtcccgcctttctgggcagaaacacagcaaggaatatttgatgctgtgttgaagggatatattgactttgatacagacccgtggcctgtcatatccgacagtgctaaagatctgatccggaagatgttatgctctagtccttctgaacgtttgactgctcatgaagtcttgcgtcatccatggatctgtgagaatggagttgcaccggatagagcacttgacccggctgttttgtctcgtctaaaacagttttctgcaatgaataaattaaagaagatggctttaaaggtgatagctgagagcctctcagaagaagagattgcgggtttaagagcaatgtttgaggcaatggatactgataacagcggtgcaatcacttttgatgaactcaaagctggcttgagaagatatggatcaaccttgaaagacaccgagatccgagatcttatggaagcggctgatgtggacaacagcggtacaatagattacagcgagtttattgcagcgacgatccatctgaataaactagagagagaagagcatcttgtctctgcatttcagtactttgacaaagatggaagtggttacatcaccattgatgagctgcaacaatcttgcattgaacatgggatgaccgatgtttttcttgaagacataatcaaagaagtagatcaagacaacgatggacggattgattacgaagaatttgttgcgatgatgcaaaagggaaatgctggtgtagggagaagaacaatgaaaaatagtctaaacatcagcatgagagatgtgtaggcacatacacacatctttaaatcgtctattcggtgaggatgcaaatgtttccatggaatcaacatttgcaatgtttaatcacagaggaggaagagaaaccagattcatagctgcagcgaaccagctaaatcgttgaaggtttgagttaaaaatgttaaaaactactgtatgattaaaaaatggtgaaagataaaaaaaaagtgttaagttctgttcatcagtagctgtgaggactatttctattttctctctctctgttttgtttgtttgtaacaactgtttaagtttggtttttatttcatctccatcgtcgaaagctttgaccctttttgggttttt

SEQ ID NO: 47592 - protein, 544 aa, Arabidopsis thaliana
  peptide (1)..(544): Ceres Seq. ID no. 12602080
  misc_feature (85)..(343): Pfam Name: Protein kinase domain Pfam Description: Protein kinase domain
  misc_feature (62)..(544): Homolog of NCBI NO: 603473 NR Description: calcium-dependent protein kinase [Arabidopsis
  misc_feature (1)..(543): Homolog of NCBI NO: 15236966 NR Description: calmodulin-domain protein kinase CDPK isoform 5
MGNSCRGSFKDKIYEGNHSRPEENSKSTTTTVSSVHSPTTDQDFSKQNTNPALVIPVKEPIMRRNVDNQSYYVLGHKTPNIRDLYTLSRKLGQGQFGTTYLCTDIATGVDYACKSISKRKLISKEDVEDVRREIQIMHHLAGHKNIVTIKGAYEDPLYVHIVMELCAGGELFDRIIHRGHYSERKAAELTKIIVGVVEACHSLGVMHRDLKPENFLLVNKDDDFSLKAIDFGLSVFFKPGQIFKDVVGSPYYVAPEVLLKHYGPEADVWTAGVILYILLSGVPPFWAETQQGIFDAVLKGYIDFDTDPWPVISDSAKDLIRKMLCSSPSERLTAHEVLRHPWICENGVAPDRALDPAVLSRLKQFSAMNKLKKMALKVIAESLSEEEIAGLRAMFEAMDTDNSGAITFDELKAGLRRYGSTLKDTEIRDLMEAADVDNSGTIDYSEFIAATIHLNKLEREEHLVSAFQYFDKDGSGYITIDELQQSCIEHGMTDVFLEDIIKEVDQDNDGRIDYEEFVAMMQKGNAGVGRRTMKNSLNISMRDV

SEQ ID NO: 47593 - protein, 483 aa, Arabidopsis thaliana
  peptide (1)..(483): Ceres Seq. ID no. 12602081
  misc_feature (24)..(282): Pfam Name: Protein kinase domain Pfam Description: Protein kinase domain
  misc_feature (1)..(483): Homolog of NCBI NO: 603473 NR Description: calcium-dependent protein kinase [Arabidopsis
  misc_feature (1)..(482): Homolog of NCBI NO: 15236966 NR Description: calmodulin-domain protein kinase CDPK isoform 5
MRRNVDNQSYYVLGHKTPNIRDLYTLSRKLGQGQFGTTYLCTDIATGVDYACKSISKRKLISKEDVEDVRREIQIMHHLAGHKNIVTIKGAYEDPLYVHIVMELCAGGELFDRIIHRGHYSERKAAELTKIIVGVVEACHSLGVMHRDLKPENFLLVNKDDDFSLKAIDFGLSVFFKPGQIFKDVVGSPYYVAPEVLLKHYGPEADVWTAGVILYILLSGVPPFWAETQQGIFDAVLKGYIDFDTDPWPVISDSAKDLIRKMLCSSPSERLTAHEVLRHPWICENGVAPDRALDPAVLSRLKQFSAMNKLKKMALKVIAESLSEEEIAGLRAMFEAMDTDNSGAITFDELKAGLRRYGSTLKDTEIRDLMEAADVDNSGTIDYSEFIAATIHLNKLEREEHLVSAFQYFDKDGSGYITIDELQQSCIEHGMTDVFLEDIIKEVDQDNDGRIDYEEFVAMMQKGNAGVGRRTMKNSLNISMRDV

SEQ ID NO: 47594 - protein, 408 aa, Arabidopsis thaliana
  peptide (1)..(408): Ceres Seq. ID no. 12602082
  misc_feature (1)..(207): Pfam Name: Protein kinase domain Pfam Description: Protein kinase domain
  misc_feature (1)..(408): Homolog of NCBI NO: 603473 NR Description: calcium-dependent protein kinase [Arabidopsis
  misc_feature (1)..(407): Homolog of NCBI NO: 15236966 NR Description: calmodulin-domain protein kinase CDPK isoform 5
MHHLAGHKNIVTIKGAYEDPLYVHIVMELCAGGELFDRIIHRGHYSERKAAELTKIIVGVVEACHSLGVMHRDLKPENFLLVNKDDDFSLKAIDFGLSVFFKPGQIFKDVVGSPYYVAPEVLLKHYGPEADVWTAGVILYILLSGVPPFWAETQQGIFDAVLKGYIDFDTDPWPVISDSAKDLIRKMLCSSPSERLTAHEVLRHPWICENGVAPDRALDPAVLSRLKQFSAMNKLKKMALKVIAESLSEEEIAGLRAMFEAMDTDNSGAITFDELKAGLRRYGSTLKDTEIRDLMEAADVDNSGTIDYSEFIAATIHLNKLEREEHLVSAFQYFDKDGSGYITIDELQQSCIEHGMTDVFLEDIIKEVDQDNDGRIDYEEFVAMMQKGNAGVGRRTMKNSLNISMRDV

SEQ ID NO: 47595 - DNA, 1503 bp, Arabidopsis thaliana
  misc_feature (1)..(1503): Ceres Seq. ID no. 13592541
  misc_feature: MA Experiment ID: 20000307 Result: Up-regulated in Transcription
  misc_feature: MA Experiment 20000307 PARAMETER Experiment Name: At_Germinating_Seeds_Sub_P Parameter: Age (hr) Value: 24 vs. 0
  misc_feature: MA Experiment 20000307 PARAMETER Experiment Name: At_Germinating_Seeds_Sub_P Parameter: Organism Value: A. thaliana
  misc_feature: MA Experiment 20000307 PARAMETER Experiment Name: At_Germinating_Seeds_Sub_P Parameter: Plant Line Value: WS
  misc_feature: MA Experiment 20000307 PARAMETER Experiment Name: At_Germinating_Seeds_Sub_P Parameter: Tissue Value: Germinating Seeds
  misc_feature: MA Experiment ID: 20000315 Result: Down-regulated in Transcription
  misc_feature: MA Experiment 20000315 PARAMETER Experiment Name: At_14day_Shoots-Roots_Sub_P Parameter: Age (day) Value: 14
  misc_feature: MA Experiment 20000315 PARAMETER Experiment Name: At_14day_Shoots-Roots_Sub_P Parameter: Organism Value: A. thaliana
  misc_feature: MA Experiment 20000315 PARAMETER Experiment Name: At_14day_Shoots-Roots_Sub_P Parameter: Plant Line Value: WS
  misc_feature: MA Experiment 20000315 PARAMETER Experiment Name: At_14day_Shoots-Roots_Sub_P Parameter: Tissue Value: Shoots vs. Whole Plant
  misc_feature: MA Experiment ID: 20000329 Result: Down-regulated in Transcription
  misc_feature: MA Experiment 20000329 PARAMETER Experiment Name: At_4deg_Cold_Sub_P Parameter: Age (day) Value: 14
  misc_feature: MA Experiment 20000329 PARAMETER Experiment Name: At_4deg_Cold_Sub_P Parameter: Organism Value: A. thaliana
  misc_feature: MA Experiment 20000329 PARAMETER Experiment Name: At_4deg_Cold_Sub_P Parameter: Plant Line Value: WS
  misc_feature: MA Experiment 20000329 PARAMETER Experiment Name: At_4deg_Cold_Sub_P Parameter: Temperature (deg C) Value: 4 vs. 22
  misc_feature: MA Experiment 20000329 PARAMETER Experiment Name: At_4deg_Cold_Sub_P Parameter: Timepoint (hr) Value: 6
  misc_feature: MA Experiment 20000329 PARAMETER Experiment Name: At_4deg_Cold_Sub_P Parameter: Tissue Value: Aerial
gctatcaaacgtagaaagcgaaaactatctttcttcttcctctctctcactatttttctctgtacggtggtgagtgaagaccatcaaaaattgcagaaaataggcttaatctgaatctcttctcctccgtcgaagttttgaattctctctggttctccaattctcctctcgagctgccttaagcttcgcatttacgtttacgttatgcacgaatgagatcatcgtagatcgtgattgaagaagcgagagataaattaggagagcgaagatgagcgagggccagaagttccagttgggaacaatcggcgctttgagtttgtccgttgtgtcatctgtctcgattgtgatctgtaacaaagcgcttattagcacccttggcttcacattcgcgactactttgacaagttggcatcttttggtcacattttgttcccttcatgtggcattatggatgaagatgttcgaacacaagccttttgatccacgagctgtgatgggatttggcatattgaatgggatatccataggactattgaacctcagcctgggctttaattctgtcggtttttaccagatgactaaactagctatcatcccctgcactgttctcttggagaccctcttcttcaggaaaaagttcagtcgaaaaatccagttttcattaaccatccttctccttggtgttggaattgcaaccgtcacagatcttcaacttaatatgctgggttctgtcttgtcgctgctggctgttgtcacaacttgtgttgctcaaattatgacaaataccatccagaagaagttcaaagtttcatccacgcagcttctgtatcagtcttgcccatatcaagcaatcactcttttcgtcactgggccatttttagatgggctcctaaccaatcagaacgtgtttgctttcaagtacacttctcaagtagtgttcttcatcgtcctgtcttgcctcatatcagtctctgtaaacttcagcacatttcttgtcattggaaaaacatctcctgtcacatatcaggttctaggacatctcaaaacatgcctggttctagcatttggctatgtgttgctgcgagacccattcgactggcgcaacattctcggtattctagtggctgtgattggaatggttgtttattcctattactgctcgattgagactcagcagaaggcaagtgaaacctcaactcagttgcctcagatgaaagagagcgagaaggatccgctaatagcagctgaaaatggaagcggagtgttatcagatggcggcgggggagtgcagcaaaagacggtggctcctgtatggaactcaaataaagattttcaagcctaaaagctttgatcatcgctatttttttatataatatcaaactctctttgtattgtccccaaaaaaacacaaactttttaatttctctttttttttttttttgttccctttttaaatatgcatagcagagaagtaggggagactgaaaaatcaacaaaccttcc

SEQ ID NO: 47596 - protein, 357 aa, Arabidopsis thaliana
  peptide (1)..(357): Ceres Seq. ID no. 13592542
  misc_feature (1)..(319): Homolog of NCBI NO: 18411172 NR Description: transporter-related [Arabidopsis thaliana]
  misc_feature (2)..(81): Homolog of NCBI NO: 37535412 NR Description: putative
  misc_feature (103)..(357): Homolog of NCBI NO: 37535412 NR Description: putative
  misc_feature (2)..(357): Homolog of NCBI NO: 13384378 NR Description: putative phosphate translocator
  misc_feature (1)..(328): Homolog of NCBI NO: 30683853 NR Description: transporter-related [Arabidopsis thaliana]
  misc_feature (103)..(357): Homolog of NCBI NO: 25406945 NR Description: hypothetical protein [imported] - Arabidopsis
  misc_feature (4)..(351): Homolog of NCBI NO: 13699188 NR Description: putative glucose-6-phosphate/phosphate-tranlocat
  misc_feature (4)..(351): Homolog of NCBI NO: 34896140 NR Description: P0701D05.25 [Oryza sativa (japonica
  misc_feature (1)..(357): Homolog of NCBI NO: 27311731 NR Description: putative integral membrane protein [Arabidopsis
  misc_feature (1)..(357): Homolog of NCBI NO: 22329373 NR Description: transporter-related [Arabidopsis thaliana]
MSEGQKFQLGTIGALSLSVVSSVSIVICNKALISTLGFTFATTLTSWHLLVTFCSLHVALWMKMFEHKPFDPRAVMGFGILNGISIGLLNLSLGFNSVGFYQMTKLAIIPCTVLLETLFFRKKFSRKIQFSLTILLLGVGIATVTDLQLNMLGSVLSLLAVVTTCVAQIMTNTIQKKFKVSSTQLLYQSCPYQAITLFVTGPFLDGLLTNQNVFAFKYTSQVVFFIVLSCLISVSVNFSTFLVIGKTSPVTYQVLGHLKTCLVLAFGYVLLRDPFDWRNILGILVAVIGMVVYSYYCSIETQQKASETSTQLPQMKESEKDPLIAAENGSGVLSDGGGGVQQKTVAPVWNSNKDFQA

SEQ ID NO: 47597 - protein, 296 aa, Arabidopsis thaliana
  peptide (1)..(296): Ceres Seq. ID no. 13592543
  misc_feature (1)..(258): Homolog of NCBI NO: 18411172 NR Description: transporter-related [Arabidopsis thaliana]
  misc_feature (1)..(20): Homolog of NCBI NO: 37535412 NR Description: putative
  misc_feature (42)..(296): Homolog of NCBI NO: 37535412 NR Description: putative
  misc_feature (1)..(296): Homolog of NCBI NO: 13384378 NR Description: putative phosphate translocator
  misc_feature (1)..(267): Homolog of NCBI NO: 30683853 NR Description: transporter-related [Arabidopsis thaliana]
  misc_feature (42)..(296): Homolog of NCBI NO: 25406945 NR Description: hypothetical protein [imported] - Arabidopsis
  misc_feature (1)..(290): Homolog of NCBI NO: 13699188 NR Description: putative glucose-6-phosphate/phosphate-tranlocat
  misc_feature (1)..(290): Homolog of NCBI NO: 34896140 NR Description: P0701D05.25 [Oryza sativa (japonica
  misc_feature (1)..(296): Homolog of NCBI NO: 27311731 NR Description: putative integral membrane protein [Arabidopsis
  misc_feature (1)..(296): Homolog of NCBI NO: 22329373 NR Description: transporter-related [Arabidopsis thaliana]
MKMFEHKPFDPRAVMGFGILNGISIGLLNLSLGFNSVGFYQMTKLAIIPCTVLLETLFFRKKFSRKIQFSLTILLLGVGIATVTDLQLNMLGSVLSLLAVVTTCVAQIMTNTIQKKFKVSSTQLLYQSCPYQAITLFVTGPFLDGLLTNQNVFAFKYTSQVVFFIVLSCLISVSVNFSTFLVIGKTSPVTYQVLGHLKTCLVLAFGYVLLRDPFDWRNILGILVAVIGMVVYSYYCSIETQQKASETSTQLPQMKESEKDPLIAAENGSGVLSDGGGGVQQKTVAPVWNSNKDFQA

SEQ ID NO: 47598 - protein, 294 aa, Arabidopsis thaliana
  peptide (1)..(294): Ceres Seq. ID no. 13592544
  misc_feature (1)..(256): Homolog of NCBI NO: 18411172 NR Description: transporter-related [Arabidopsis thaliana]
  misc_feature (1)..(18): Homolog of NCBI NO: 37535412 NR Description: putative
  misc_feature (40)..(294): Homolog of NCBI NO: 37535412 NR Description: putative
  misc_feature (1)..(294): Homolog of NCBI NO: 13384378 NR Description: putative phosphate translocator
  misc_feature (1)..(265): Homolog of NCBI NO: 30683853 NR Description: transporter-related [Arabidopsis thaliana]
  misc_feature (40)..(294): Homolog of NCBI NO: 25406945 NR Description: hypothetical protein [imported] - Arabidopsis
  misc_feature (1)..(288): Homolog of NCBI NO: 13699188 NR Description: putative glucose-6-phosphate/phosphate-tranlocat
  misc_feature (1)..(288): Homolog of NCBI NO: 34896140 NR Description: P0701D05.25 [Oryza sativa (japonica
  misc_feature (1)..(294): Homolog of NCBI NO: 27311731 NR Description: putative integral membrane protein [Arabidopsis
  misc_feature (1)..(294): Homolog of NCBI NO: 22329373 NR Description: transporter-related [Arabidopsis thaliana]
MFEHKPFDPRAVMGFGILNGISIGLLNLSLGFNSVGFYQMTKLAIIPCTVLLETLFFRKKFSRKIQFSLTILLLGVGIATVTDLQLNMLGSVLSLLAVVTTCVAQIMTNTIQKKFKVSSTQLLYQSCPYQAITLFVTGPFLDGLLTNQNVFAFKYTSQVVFFIVLSCLISVSVNFSTFLVIGKTSPVTYQVLGHLKTCLVLAFGYVLLRDPFDWRNILGILVAVIGMVVYSYYCSIETQQKASETSTQLPQMKESEKDPLIAAENGSGVLSDGGGGVQQKTVAPVWNSNKDFQA

SEQ ID NO: 47599 - DNA, 4931 bp, Arabidopsis thaliana; identical to SEQ ID NO: 47541
  misc_feature (1)..(4931): Ceres Seq. ID no. 12602182
  misc_feature: MA Experiment ID: 20000166 Result: Down-regulated in Transcription
  misc_feature: MA Experiment 20000166 PARAMETER Experiment Name: At_100uM_ABA_P Parameter: Age (day) Value: 14
  misc_feature: MA Experiment 20000166 PARAMETER Experiment Name: At_100uM_ABA_P Parameter: Organism Value: A. thaliana
  misc_feature: MA Experiment 20000166 PARAMETER Experiment Name: At_100uM_ABA_P Parameter: Plant Line Value: WS
  misc_feature: MA Experiment 20000166 PARAMETER Experiment Name: At_100uM_ABA_P Parameter: Timepoint (hr) Value: 1
  misc_feature: MA Experiment 20000166 PARAMETER Experiment Name: At_100uM_ABA_P Parameter: Tissue Value: Aerial
  misc_feature: MA Experiment 20000166 PARAMETER Experiment Name: At_100uM_ABA_P Parameter: Treatment Value: 100uM ABA vs. No Treatment
  misc_feature: MA Experiment ID: 20000173 Result: Down-regulated in Transcription
  misc_feature: MA Experiment 20000173 PARAMETER Experiment Name: At_42deg_Heat_P Parameter: Age (day) Value: 14
  misc_feature: MA Experiment 20000173 PARAMETER Experiment Name: At_42deg_Heat_P Parameter: Organism Value: A. thaliana
  misc_feature: MA Experiment 20000173 PARAMETER Experiment Name: At_42deg_Heat_P Parameter: Plant Line Value: WS
  misc_feature: MA Experiment 20000173 PARAMETER Experiment Name: At_42deg_Heat_P Parameter: Temperature (deg C) Value: 42 vs. 22
  misc_feature: MA Experiment 20000173 PARAMETER Experiment Name: At_42deg_Heat_P Parameter: Timepoint (hr) Value: 6
  misc_feature: MA Experiment 20000173 PARAMETER Experiment Name: At_42deg_Heat_P Parameter: Tissue Value: Aerial
  misc_feature: MA Experiment ID: 20000184 Result: Down-regulated in Transcription
  misc_feature: MA Experiment 20000184 PARAMETER Experiment Name: At_Shoots__P Parameter: Age (day) Value: 7
  misc_feature: MA Experiment 20000184 PARAMETER Experiment Name: At_Shoots__P Parameter: Tissue Value: Shoots vs. Whole Plant
  misc_feature: MA Experiment ID: 20000185 Result: Down-regulated in Transcription
  misc_feature: MA Experiment 20000185 PARAMETER Experiment Name: At_Roots__P Parameter: Age (day) Value: 7 vs. 21
  misc_feature: MA Experiment 20000185 PARAMETER Experiment Name: At_Roots__P Parameter: Organism Value: A. thaliana
  misc_feature: MA Experiment 20000185 PARAMETER Experiment Name: At_Roots__P Parameter: Tissue Value: Roots vs. Whole Plant
  misc_feature: MA Experiment ID: 20000234 Result: Down-regulated in Transcription
  misc_feature: MA Experiment 20000234 PARAMETER Experiment Name: At_Siliques_P Parameter: Age (day) Value: 21
  misc_feature: MA Experiment 20000234 PARAMETER Experiment Name: At_Siliques_P Parameter: Organism Value: A. thaliana
  misc_feature: MA Experiment 20000234 PARAMETER Experiment Name: At_Siliques_P Parameter: Plant Line Value: WS
  misc_feature: MA Experiment 20000234 PARAMETER Experiment Name: At_Siliques_P Parameter: Tissue Value: Less Than 5mm Siliques vs. Whole Plant
  misc_feature: MA Experiment ID: 20000264 Result: Down-regulated in Transcription
  misc_feature: MA Experiment 20000264 PARAMETER Experiment Name: At_Open_Flower_P Parameter: Age (day) Value: 21
  misc_feature: MA Experiment 20000264 PARAMETER Experiment Name: At_Open_Flower_P Parameter: Plant Line Value: WS
  misc_feature: MA Experiment 20000264 PARAMETER Experiment Name: At_Open_Flower_P Parameter: Tissue Value: Open Flower vs. Whole Plant
  misc_feature: MA Experiment ID: 20000265 Result: Down-regulated in Transcription
  misc_feature: MA Experiment 20000265 PARAMETER Experiment Name: At_Open_Flower_P Parameter: Age (day) Value: 21
  misc_feature: MA Experiment 20000265 PARAMETER Experiment Name: At_Open_Flower_P Parameter: Plant Line Value: WS
  misc_feature: MA Experiment 20000265 PARAMETER Experiment Name: At_Open_Flower_P Parameter: Tissue Value: Closed Flower vs. Whole Plant
  misc_feature: MA Experiment ID: 20000286 Result: Down-regulated in Transcription
  misc_feature: MA Experiment 20000286 PARAMETER Experiment Name: At_Open_Flower_P Parameter: Age (day) Value: 21
  misc_feature: MA Experiment 20000286 PARAMETER Experiment Name: At_Open_Flower_P Parameter: Plant Line Value: WS
  misc_feature: MA Experiment 20000286 PARAMETER Experiment Name: At_Open_Flower_P Parameter: Tissue Value: Half Open vs. Whole Plant
  misc_feature: MA Experiment ID: 20000439 Result: Down-regulated in Transcription
  misc_feature: MA Experiment 20000439 PARAMETER Experiment Name: At_Roots__P Parameter: Age (day) Value: 14 vs. 21
  misc_feature: MA Experiment 20000439 PARAMETER Experiment Name: At_Roots__P Parameter: Organism Value: A. thaliana
  misc_feature: MA Experiment 20000439 PARAMETER Experiment Name: At_Roots__P Parameter: Tissue Value: Roots vs. Whole Plant
  misc_feature: MA Experiment ID: 20000794 Result: Down-regulated in Transcription
  misc_feature: MA Experiment 20000794 PARAMETER Experiment Name: At_Petals_P Parameter: Age (day) Value: 23-25 days
  misc_feature: MA Experiment 20000794 PARAMETER Experiment Name: At_Petals_P Parameter: Plant Line Value: WS
  misc_feature: MA Experiment 20000794 PARAMETER Experiment Name: At_Petals_P Parameter: Tissue Value: Petals vs. Whole plant
  misc_feature: MA Experiment ID: 20001555 Result: Down-regulated in Transcription
  misc_feature: MA Experiment 20001555 PARAMETER Experiment Name: At_Drought_Soil_Dry_P Parameter: Age (day) Value: 24
  misc_feature: MA Experiment 20001555 PARAMETER Experiment Name: At_Drought_Soil_Dry_P Parameter: Organism Value: A. thaliana
  misc_feature: MA Experiment 20001555 PARAMETER Experiment Name: At_Drought_Soil_Dry_P Parameter: Plant Line Value: WS
  misc_feature: MA Experiment 20001555 PARAMETER Experiment Name: At_Drought_Soil_Dry_P Parameter: Post Timepoint (hr) Value: None
  misc_feature: MA Experiment 20001555 PARAMETER Experiment Name: At_Drought_Soil_Dry_P Parameter: Post-Treatment Value: None
  misc_feature: MA Experiment 20001555 PARAMETER Experiment Name: At_Drought_Soil_Dry_P Parameter: Timepoint (day) Value: 10
  misc_feature: MA Experiment 20001555 PARAMETER Experiment Name: At_Drought_Soil_Dry_P Parameter: Treatment Value: Drought vs. No Drought
  misc_feature: MA Experiment ID: 20001904 Result: Down-regulated in Transcription
  misc_feature: MA Experiment 20001904 PARAMETER Experiment Name: At_Drought_Reproduction_P Parameter: Age (day) Value: 37
  misc_feature: MA Experiment 20001904 PARAMETER Experiment Name: At_Drought_Reproduction_P Parameter: Organism Value: A. thaliana
  misc_feature: MA Experiment 20001904 PARAMETER Experiment Name: At_Drought_Reproduction_P Parameter: Plant Line Value: WS
  misc_feature: MA Experiment 20001904 PARAMETER Experiment Name: At_Drought_Reproduction_P Parameter: Timepoint (day) Value: 7
  misc_feature: MA Experiment 20001904 PARAMETER Experiment Name: At_Drought_Reproduction_P Parameter: Tissue Value: Rosettes
  misc_feature: MA Experiment 20001904 PARAMETER Experiment Name: At_Drought_Reproduction_P Parameter: Treatment Value: Drought vs. No Drought

SEQ ID NO: 47600 - protein, 442 aa, Arabidopsis thaliana; identical to SEQ ID NO: 47542
  peptide (1)..(442): Ceres Seq. ID no. 12602183
  misc_feature (68)..(182): Pfam Name: D-mannose binding lectin Pfam Description: D-mannose binding lectin
  misc_feature (68)..(182): Pfam Name: D-mannose binding lectin Pfam Description: D-mannose binding lectin
  misc_feature (5)..(428): Homolog of NCBI NO: 30682149 NR Description: S-locus protein kinase, putative [Arabidopsis
  misc_feature (6)..(426): Homolog of NCBI NO: 15220351 NR Description: receptor kinase, putative; protein id:
  misc_feature (5)..(426): Homolog of NCBI NO: 15234429 NR Description: serine/threonine kinase - like protein; protein
  misc_feature (9)..(442): Homolog of NCBI NO: 7434416 NR Description: serine/threonine kinase (EC 2.7.1.-) BRLK - wild
  misc_feature (5)..(427): Homolog of NCBI NO: 25287697 NR Description: hypothetical protein [imported] - Arabidopsis
  misc_feature (5)..(428): Homolog of NCBI NO: 30682149 NR Description: S-locus protein kinase, putative [Arabidopsis
  misc_feature (5)..(426): Homolog of NCBI NO: 15234429 NR Description: serine/threonine kinase - like protein; protein
  misc_feature (5)..(427): Homolog of NCBI NO: 25287697 NR Description: hypothetical protein [imported] - Arabidopsis
  misc_feature (5)..(434): Homolog of NCBI NO: 15220348 NR Description: receptor-like protein kinase, putative; protein
  misc_feature (5)..(434): Homolog of NCBI NO: 25287698 NR Description: hypothetical protein [imported] - Arabidopsis
  misc_feature (6)..(426): Homolog of NCBI NO: 25287696 NR Description: hypothetical protein [imported] - Arabidopsis
  misc_feature (6)..(428): Homolog of NCBI NO: 15220338 NR Description: serine/threonine kinase, putative; protein id:
  misc_feature (1)..(427): Homolog of NCBI NO: 15220338 NR Description: serine/threonine kinase, putative; protein id:
  misc_feature (9)..(442): Homolog of NCBI NO: 7434416 NR Description: serine/threonine kinase (EC 2.7.1.-) BRLK - wild
  misc_feature (6)..(426): Homolog of NCBI NO: 15220351 NR Description: receptor kinase, putative; protein id:
  misc_feature (1)..(427): Homolog of NCBI NO: 15220338 NR Description: serine/threonine kinase, putative; protein id:
  misc_feature (6)..(428): Homolog of NCBI NO: 15220338 NR Description: serine/threonine kinase, putative; protein id:
  misc_feature (6)..(426): Homolog of NCBI NO: 25287696 NR Description: hypothetical protein [imported] - Arabidopsis
  misc_feature (5)..(434): Homolog of NCBI NO: 25287698 NR Description: hypothetical protein [imported] - Arabidopsis
  misc_feature (5)..(434): Homolog of NCBI NO: 15220348 NR Description: receptor-like protein kinase, putative; protein

SEQ ID NO: 47601 - protein, 356 aa, Arabidopsis thaliana; identical to SEQ ID NO: 47543
  peptide (1)..(356): Ceres Seq. ID no. 12602184
  misc_feature (1)..(96): Pfam Name: D-mannose binding lectin Pfam Description: D-mannose binding lectin
  misc_feature (1)..(96): Pfam Name: D-mannose binding lectin Pfam Description: D-mannose binding lectin
  misc_feature (1)..(342): Homolog of NCBI NO: 30682149 NR Description: S-locus protein kinase, putative [Arabidopsis
  misc_feature (1)..(340): Homolog of NCBI NO: 15220351 NR Description: receptor kinase, putative; protein id:
  misc_feature (1)..(340): Homolog of NCBI NO: 15234429 NR Description: serine/threonine kinase - like protein; protein
  misc_feature (1)..(356): Homolog of NCBI NO: 7434416 NR Description: serine/threonine kinase (EC 2.7.1.-) BRLK - wild
  misc_feature (1)..(341): Homolog of NCBI NO: 25287697 NR Description: hypothetical protein [imported] - Arabidopsis
  misc_feature (1)..(342): Homolog of NCBI NO: 30682149 NR Description: S-locus protein kinase, putative [Arabidopsis
  misc_feature (1)..(340): Homolog of NCBI NO: 15234429 NR Description: serine/threonine kinase - like protein; protein
  misc_feature (1)..(341): Homolog of NCBI NO: 25287697 NR Description: hypothetical protein [imported] - Arabidopsis
  misc_feature (1)..(348): Homolog of NCBI NO: 15220348 NR Description: receptor-like protein kinase, putative; protein
  misc_feature (1)..(348): Homolog of NCBI NO: 25287698 NR Description: hypothetical protein [imported] - Arabidopsis
  misc_feature (1)..(340): Homolog of NCBI NO: 25287696 NR Description: hypothetical protein [imported] - Arabidopsis
  misc_feature (1)..(342): Homolog of NCBI NO: 15220338 NR Description: serine/threonine kinase, putative; protein id:
  misc_feature (1)..(341): Homolog of NCBI NO: 15220338 NR Description: serine/threonine kinase, putative; protein id:
  misc_feature (1)..(356): Homolog of NCBI NO: 7434416 NR Description: serine/threonine kinase (EC 2.7.1.-) BRLK - wild
  misc_feature (1)..(340): Homolog of NCBI NO: 15220351 NR Description: receptor kinase, putative; protein id:
  misc_feature (1)..(341): Homolog of NCBI NO: 15220338 NR Description: serine/threonine kinase, putative; protein id:
  misc_feature (1)..(342): Homolog of NCBI NO: 15220338 NR Description: serine/threonine kinase, putative; protein id:
  misc_feature (1)..(340): Homolog of NCBI NO: 25287696 NR Description: hypothetical protein [imported] - Arabidopsis
  misc_feature (1)..(348): Homolog of NCBI NO: 25287698 NR Description: hypothetical protein [imported] - Arabidopsis
  misc_feature (1)..(348): Homolog of NCBI NO: 15220348 NR Description: receptor-like protein kinase, putative; protein

SEQ ID NO: 47602 - protein, 355 aa, Arabidopsis thaliana; identical to SEQ ID NO: 47544
  peptide (1)..(355): Ceres Seq. ID no. 12602185
  misc_feature (20)..(355): Homolog of NCBI NO: 15220351 NR Description: receptor kinase, putative; protein id:
  misc_feature (1)..(355): Homolog of NCBI NO: 15234429 NR Description: serine/threonine kinase - like protein; protein
  misc_feature (1)..(355): Homolog of NCBI NO: 7434416 NR Description: serine/threonine kinase (EC 2.7.1.-) BRLK - wild
  misc_feature (1)..(355): Homolog of NCBI NO: 25287697 NR Description: hypothetical protein [imported] - Arabidopsis
  misc_feature (1)..(355): Homolog of NCBI NO: 15220338 NR Description: serine/threonine kinase, putative; protein id:
  misc_feature (1)..(354): Homolog of NCBI NO: 15220338 NR Description: serine/threonine kinase, putative; protein id:
  misc_feature (1)..(355): Homolog of NCBI NO: 25287696 NR Description: hypothetical protein [imported] - Arabidopsis
  misc_feature (1)..(107): Homolog of NCBI NO: 25287698 NR Description: hypothetical protein [imported] - Arabidopsis
  misc_feature (153)..(355): Homolog of NCBI NO: 25287698 NR Description: hypothetical protein [imported] - Arabidopsis
  misc_feature (1)..(355): Homolog of NCBI NO: 15220348 NR Description: receptor-like protein kinase, putative; protein
  misc_feature (20)..(355): Homolog of NCBI NO: 15220351 NR Description: receptor kinase, putative; protein id:
  misc_feature (1)..(355): Homolog of NCBI NO: 15234429 NR Description: serine/threonine kinase - like protein; protein
  misc_feature (1)..(355): Homolog of NCBI NO: 7434416 NR Description: serine/threonine kinase (EC 2.7.1.-) BRLK - wild
  misc_feature (1)..(355): Homolog of NCBI NO: 25287697 NR Description: hypothetical protein [imported] - Arabidopsis
  misc_feature (1)..(355): Homolog of NCBI NO: 15220338 NR Description: serine/threonine kinase, putative; protein id:
  misc_feature (1)..(354): Homolog of NCBI NO: 15220338 NR Description: serine/threonine kinase, putative; protein id:
  misc_feature (1)..(355): Homolog of NCBI NO: 25287696 NR Description: hypothetical protein [imported] - Arabidopsis
  misc_feature (1)..(107): Homolog of NCBI NO: 25287698 NR Description: hypothetical protein [imported] - Arabidopsis
  misc_feature (153)..(355): Homolog of NCBI NO: 25287698 NR Description: hypothetical protein [imported] - Arabidopsis
  misc_feature (1)..(355): Homolog of NCBI NO: 15220348 NR Description: receptor-like protein kinase, putative; protein

SEQ ID NO: 47603 - DNA, 1654 bp, Arabidopsis thaliana
  misc_feature (1)..(1654): Ceres Seq. ID no. 13647961
cactagtcccccccccccccccaccgcttctccccggcttgacccttgtcgtactcgtcgatggctccggtgaagcagaagaagaagaataagaagaagcctctggataaggcgaagaagttggcgaagaataaagagaagaagagagtcaacgcagtgccattggatccggaggctatcgactgcgactggtgggatactttctggctccgaaactcttctccctcagctcctctagggttctttgaattgaaccgagagattgttgttgttttcagtcccctcagacgaagactatgcgttcaagcacttctttagggcttctaagacaacttttagctacatttgctcgctcgtcagggaggatcttatctctagacctccctctggtctcatcaacatcgagggaaggcttcttagtgttgagaaacaagtcgccattgctcttcgaaggttagcttccggtgattctcaggtctccgttggtgctgcctttggtgttggccagtccactgtttctcaggttacatggagattcatcgaggcactcgaagaacgtgccaagcatcatcttagatggccagattctgaccgaattgaagagatcaagtcaaagttcgaggagatgtacggtctccccaattgctgcggagccattgacactacgcacatcatcatgactctcccggctgtgcaagcatcagatgactggtgtgaccaggagaagaactacagcatgttcttacaaggagtctttgatcacgagatgagatttctcaacatggttaccggctggcctggcggcatgaccgtctccaagcttctcaagttctctggcttcttcaaactctgtgaaaacgctcagattttagacggcaatcctaaaactctatcccaaggagcccagattagagaatacgttgttggagggatcagttacccgcttcttccctggcttataactcctcacgacagcgatcatccctctgattccatggtggcgttcaacgaaaggcatgagaaggtgaggtcagtcgcagctactgcctttcaacagcttaaaggaagctggaggattctgagcaaagttatgtggagaccagacaggaggaagctacctagtataatactggtgtgttgtttgttgcataacatcattatcgactgtggggattatcttcaagaagatgttcctttgtctggtcatcacgactccggttatgcagaccggtactgcaagcagaccgagccgcttggtagtgagctcagaggatgtctgactgagcatttgcttaggtgaggatcttaaccttgggaattggacatcttcatctcttctctaaggccgtactaagcccgttagaccattcagcatcagtttagtggtagcccgagacatatcggacaaaagcaatgttatgaaacttttcttcaggtatcaacaccagattaacatcatgccagttggacctacaaaaatagattcatccttaagtgtgattaccatactttgtgaactactaatcttttgagaggagtggactatatccccaacggaactgtttgttttggcaatgtaaatgttatttttttaataataattggtgttttctttcaaaaaaaaaaaaaaaaaactcgagggggggcccggtac

SEQ ID NO: 47604 - protein, 224 aa, Arabidopsis thaliana
  peptide (1)..(224): Ceres Seq. ID no. 13647962
  misc_feature (1)..(177): Homolog of NCBI NO: 21592524 NR Description: unknown [Arabidopsis thaliana]
  misc_feature (1)..(177): Homolog of NCBI NO: 7452044 NR Description: hypothetical protein F27B13.20 - Arabidopsis
  misc_feature (1)..(224): Homolog of NCBI NO: 34906342 NR Description: unnamed protein product [Oryza sativa (japonica
  misc_feature (1)..(189): Homolog of NCBI NO: 21902022 NR Description: B1097D05.23 [Oryza sativa (japonica
  misc_feature (1)..(177): Homolog of NCBI NO: 15239835 NR Description: expressed protein [Arabidopsis thaliana]
  misc_feature (1)..(224): Homolog of NCBI NO: 34908114 NR Description: P0031D11.14 [Oryza sativa (japonica
  misc_feature (1)..(222): Homolog of NCBI NO: 15233248 NR Description: expressed protein [Arabidopsis thaliana]
  misc_feature (1)..(222): Homolog of NCBI NO: 25553597 NR Description: OJ1656_E11.28 [Oryza sativa (japonica
  misc_feature (1)..(223): Homolog of NCBI NO: 11357482 NR Description: hypothetical protein F16M2.120 - Arabidopsis
  misc_feature (1)..(224): Homolog of NCBI NO: 18412695 NR Description: expressed protein [Arabidopsis thaliana]
MYGLPNCCGAIDTTHIIMTLPAVQASDDWCDQEKNYSMFLQGVFDHEMRFLNMVTGWPGGMTVSKLLKFSGFFKLCENAQILDGNPKTLSQGAQIREYVVGGISYPLLPWLITPHDSDHPSDSMVAFNERHEKVRSVAATAFQQLKGSWRILSKVMWRPDRRKLPSIILVCCLLHNIIIDCGDYLQEDVPLSGHHDSGYADRYCKQTEPLGSELRGCLTEHLLR

SEQ ID NO: 47605 - protein, 207 aa, Arabidopsis thaliana
  peptide (1)..(207): Ceres Seq. ID no. 13647963
  misc_feature (1)..(160): Homolog of NCBI NO: 21592524 NR Description: unknown [Arabidopsis thaliana]
  misc_feature (1)..(160): Homolog of NCBI NO: 7452044 NR Description: hypothetical protein F27B13.20 - Arabidopsis
  misc_feature (1)..(207): Homolog of NCBI NO: 34906342 NR Description: unnamed protein product [Oryza sativa (japonica
  misc_feature (1)..(172): Homolog of NCBI NO: 21902022 NR Description: B1097D05.23 [Oryza sativa (japonica
  misc_feature (1)..(160): Homolog of NCBI NO: 15239835 NR Description: expressed protein [Arabidopsis thaliana]
  misc_feature (1)..(207): Homolog of NCBI NO: 34908114 NR Description: P0031D11.14 [Oryza sativa (japonica
  misc_feature (1)..(205): Homolog of NCBI NO: 15233248 NR Description: expressed protein [Arabidopsis thaliana]
  misc_feature (1)..(205): Homolog of NCBI NO: 25553597 NR Description: OJ1656_E11.28 [Oryza sativa (japonica
  misc_feature (1)..(206): Homolog of NCBI NO: 11357482 NR Description: hypothetical protein F16M2.120 - Arabidopsis
  misc_feature (1)..(207): Homolog of NCBI NO: 18412695 NR Description: expressed protein [Arabidopsis thaliana]
MTLPAVQASDDWCDQEKNYSMFLQGVFDHEMRFLNMVTGWPGGMTVSKLLKFSGFFKLCENAQILDGNPKTLSQGAQIREYVVGGISYPLLPWLITPHDSDHPSDSMVAFNERHEKVRSVAATAFQQLKGSWRILSKVMWRPDRRKLPSIILVCCLLHNIIIDCGDYLQEDVPLSGHHDSGYADRYCKQTEPLGSELRGCLTEHLLR

SEQ ID NO: 47606 - protein, 187 aa, Arabidopsis thaliana
  peptide (1)..(187): Ceres Seq. ID no. 13647964
  misc_feature (1)..(140): Homolog of NCBI NO: 21592524 NR Description: unknown [Arabidopsis thaliana]
  misc_feature (1)..(140): Homolog of NCBI NO: 7452044 NR Description: hypothetical protein F27B13.20 - Arabidopsis
  misc_feature (1)..(187): Homolog of NCBI NO: 34906342 NR Description: unnamed protein product [Oryza sativa (japonica
  misc_feature (1)..(152): Homolog of NCBI NO: 21902022 NR Description: B1097D05.23 [Oryza sativa (japonica
  misc_feature (1)..(140): Homolog of NCBI NO: 15239835 NR Description: expressed protein [Arabidopsis thaliana]
  misc_feature (1)..(187): Homolog of NCBI NO: 34908114 NR Description: P0031D11.14 [Oryza sativa (japonica
  misc_feature (1)..(185): Homolog of NCBI NO: 15233248 NR Description: expressed protein [Arabidopsis thaliana]
  misc_feature (1)..(185): Homolog of NCBI NO: 25553597 NR Description: OJ1656_E11.28 [Oryza sativa (japonica
  misc_feature (1)..(186): Homolog of NCBI NO: 11357482 NR Description: hypothetical protein F16M2.120 - Arabidopsis
  misc_feature (1)..(187): Homolog of NCBI NO: 18412695 NR Description: expressed protein [Arabidopsis thaliana]
MFLQGVFDHEMRFLNMVTGWPGGMTVSKLLKFSGFFKLCENAQILDGNPKTLSQGAQIREYVVGGISYPLLPWLITPHDSDHPSDSMVAFNERHEKVRSVAATAFQQLKGSWRILSKVMWRPDRRKLPSIILVCCLLHNIIIDCGDYLQEDVPLSGHHDSGYADRYCKQTEPLGSELRGCLTEHLLR

SEQ ID NO: 47607 - DNA, 2649 bp, Arabidopsis thaliana; identical to SEQ ID NO: 46523
  misc_feature (1)..(2649): Ceres Seq. ID no. 13592024
  misc_feature: MA Experiment ID: 20000315 Result: Down-regulated in Transcription
  misc_feature: MA Experiment 20000315 PARAMETER Experiment Name: At_14day_Shoots-Roots_Sub_P Parameter: Age (day) Value: 14
  misc_feature: MA Experiment 20000315 PARAMETER Experiment Name: At_14day_Shoots-Roots_Sub_P Parameter: Organism Value: A. thaliana
  misc_feature: MA Experiment 20000315 PARAMETER Experiment Name: At_14day_Shoots-Roots_Sub_P Parameter: Plant Line Value: WS
  misc_feature: MA Experiment 20000315 PARAMETER Experiment Name: At_14day_Shoots-Roots_Sub_P Parameter: Tissue Value: Shoots vs. Whole Plant

SEQ ID NO: 47608 - protein, 703 aa, Arabidopsis thaliana; identical to SEQ ID NO: 46524
  peptide (1)..(703): Ceres Seq. ID no. 13592025
  misc_feature (136)..(435): Homolog of NCBI NO: 25287608 NR Description: probable casein kinase I [imported] - Arabidopsis
  misc_feature (112)..(703): Homolog of NCBI NO: 18139937 NR Description: serine/threonine protein kinase [Chlamydomonas
  misc_feature (239)..(702): Homolog of NCBI NO: 6006848 NR Description: unknown protein, 5' partial [Arabidopsis thaliana]
  misc_feature (71)..(703): Homolog of NCBI NO: 34903604 NR Description: casein kinase-like protein
  misc_feature (1)..(702): Homolog of NCBI NO: 34394436 NR Description: putative casein kinase 1, delta isoform 1
  misc_feature (1)..(702): Homolog of NCBI NO: 28269422 NR Description: putative serine/threonine protein kinase
  misc_feature (1)..(702): Homolog of NCBI NO: 15228670 NR Description: casein kinase -related [Arabidopsis thaliana]
  misc_feature (1)..(703): Homolog of NCBI NO: 34909952 NR Description: putative casein kinase [Oryza sativa (japonica
  misc_feature (1)..(702): Homolog of NCBI NO: 15238765 NR Description: casein kinase-related protein [Arabidopsis
  misc_feature (37)..(703): Homolog of NCBI NO: 30682888 NR Description: protein kinase family [Arabidopsis thaliana]
  misc_feature (136)..(435): Homolog of NCBI NO: 25287608 NR Description: probable casein kinase I [imported] - Arabidopsis
  misc_feature (112)..(703): Homolog of NCBI NO: 18139937 NR Description: serine/threonine protein kinase [Chlamydomonas
  misc_feature (239)..(702): Homolog of NCBI NO: 6006848 NR Description: unknown protein, 5' partial [Arabidopsis thaliana]
  misc_feature (71)..(703): Homolog of NCBI NO: 34903604 NR Description: casein kinase-like protein
  misc_feature (1)..(702): Homolog of NCBI NO: 34394436 NR Description: putative casein kinase 1, delta isoform 1
  misc_feature (1)..(702): Homolog of NCBI NO: 28269422 NR Description: putative serine/threonine protein kinase
  misc_feature (1)..(702): Homolog of NCBI NO: 15228670 NR Description: casein kinase -related [Arabidopsis thaliana]
  misc_feature (1)..(703): Homolog of NCBI NO: 34909952 NR Description: putative casein kinase [Oryza sativa (japonica
  misc_feature (1)..(702): Homolog of NCBI NO: 15238765 NR Description: casein kinase-related protein [Arabidopsis
  misc_feature (37)..(703): Homolog of NCBI NO: 30682888 NR Description: protein kinase family [Arabidopsis thaliana]
  misc_feature (136)..(435): Homolog of NCBI NO: 25287608 NR Description: probable casein kinase I [imported] - Arabidopsis
  misc_feature (112)..(703): Homolog of NCBI NO: 18139937 NR Description: serine/threonine protein kinase [Chlamydomonas
  misc_feature (239)..(702): Homolog of NCBI NO: 6006848 NR Description: unknown protein, 5' partial [Arabidopsis thaliana]
  misc_feature (71)..(703): Homolog of NCBI NO: 34903604 NR Description: casein kinase-like protein
  misc_feature (1)..(702): Homolog of NCBI NO: 34394436 NR Description: putative casein kinase 1, delta isoform 1
  misc_feature (1)..(702): Homolog of NCBI NO: 28269422 NR Description: putative serine/threonine protein kinase
  misc_feature (1)..(702): Homolog of NCBI NO: 15228670 NR Description: casein kinase -related [Arabidopsis thaliana]
  misc_feature (1)..(703): Homolog of NCBI NO: 34909952 NR Description: putative casein kinase [Oryza sativa (japonica
  misc_feature (1)..(702): Homolog of NCBI NO: 15238765 NR Description: casein kinase-related protein [Arabidopsis
  misc_feature (37)..(703): Homolog of NCBI NO: 30682888 NR Description: protein kinase family [Arabidopsis thaliana]

SEQ ID NO: 47609 - protein, 603 aa, Arabidopsis thaliana; identical to SEQ ID NO: 46525
  peptide (1)..(603): Ceres Seq. ID no. 13592026
  misc_feature (36)..(335): Homolog of NCBI NO: 25287608 NR Description: probable casein kinase I [imported] - Arabidopsis
  misc_feature (12)..(603): Homolog of NCBI NO: 18139937 NR Description: serine/threonine protein kinase [Chlamydomonas
  misc_feature (139)..(602): Homolog of NCBI NO: 6006848 NR Description: unknown protein, 5' partial [Arabidopsis thaliana]
  misc_feature (1)..(603): Homolog of NCBI NO: 34903604 NR Description: casein kinase-like protein
  misc_feature (1)..(602): Homolog of NCBI NO: 34394436 NR Description: putative casein kinase 1, delta isoform 1
  misc_feature (1)..(602): Homolog of NCBI NO: 28269422 NR Description: putative serine/threonine protein kinase
  misc_feature (1)..(602): Homolog of NCBI NO: 15228670 NR Description: casein kinase -related [Arabidopsis thaliana]
  misc_feature (1)..(603): Homolog of NCBI NO: 34909952 NR Description: putative casein kinase [Oryza sativa (japonica
  misc_feature (1)..(602): Homolog of NCBI NO: 15238765 NR Description: casein kinase-related protein [Arabidopsis
  misc_feature (1)..(603): Homolog of NCBI NO: 30682888 NR Description: protein kinase family [Arabidopsis thaliana]
  misc_feature (36)..(335): Homolog of NCBI NO: 25287608 NR Description: probable casein kinase I [imported] - Arabidopsis
  misc_feature (12)..(603): Homolog of NCBI NO: 18139937 NR Description: serine/threonine protein kinase [Chlamydomonas
  misc_feature (139)..(602): Homolog of NCBI NO: 6006848 NR Description: unknown protein, 5' partial [Arabidopsis thaliana]
  misc_feature (1)..(603): Homolog of NCBI NO: 34903604 NR Description: casein kinase-like protein
  misc_feature (1)..(602): Homolog of NCBI NO: 34394436 NR Description: putative casein kinase 1, delta isoform 1
  misc_feature (1)..(602): Homolog of NCBI NO: 28269422 NR Description: putative serine/threonine protein kinase
  misc_feature (1)..(602): Homolog of NCBI NO: 15228670 NR Description: casein kinase -related [Arabidopsis thaliana]
  misc_feature (1)..(603): Homolog of NCBI NO: 34909952 NR Description: putative casein kinase [Oryza sativa (japonica
  misc_feature (1)..(602): Homolog of NCBI NO: 15238765 NR Description: casein kinase-related protein [Arabidopsis
  misc_feature (1)..(603): Homolog of NCBI NO: 30682888 NR Description: protein kinase family [Arabidopsis thaliana]
  misc_feature (36)..(335): Homolog of NCBI NO: 25287608 NR Description: probable casein kinase I [imported] - Arabidopsis
  misc_feature (12)..(603): Homolog of NCBI NO: 18139937 NR Description: serine/threonine protein kinase [Chlamydomonas
  misc_feature (139)..(602): Homolog of NCBI NO: 6006848 NR Description: unknown protein, 5' partial [Arabidopsis thaliana]
  misc_feature (1)..(603): Homolog of NCBI NO: 34903604 NR Description: casein kinase-like protein
  misc_feature (1)..(602): Homolog of NCBI NO: 34394436 NR Description: putative casein kinase 1, delta isoform 1
  misc_feature (1)..(602): Homolog of NCBI NO: 28269422 NR Description: putative serine/threonine protein kinase
  misc_feature (1)..(602): Homolog of NCBI NO: 15228670 NR Description: casein kinase -related [Arabidopsis thaliana]
  misc_feature (1)..(603): Homolog of NCBI NO: 34909952 NR Description: putative casein kinase [Oryza sativa (japonica
  misc_feature (1)..(602): Homolog of NCBI NO: 15238765 NR Description: casein kinase-related protein [Arabidopsis
  misc_feature (1)..(603): Homolog of NCBI NO: 30682888 NR Description: protein kinase family [Arabidopsis thaliana]

SEQ ID NO: 47610 - protein, 485 aa, Arabidopsis thaliana; identical to SEQ ID NO: 46526
  peptide (1)..(485): Ceres Seq. ID no. 13592027
  misc_feature (1)..(217): Homolog of NCBI NO: 25287608 NR Description: probable casein kinase I [imported] - Arabidopsis
  misc_feature (1)..(485): Homolog of NCBI NO: 18139937 NR Description: serine/threonine protein kinase [Chlamydomonas
  misc_feature (21)..(484): Homolog of NCBI NO: 6006848 NR Description: unknown protein, 5' partial [Arabidopsis thaliana]
  misc_feature (1)..(485): Homolog of NCBI NO: 34903604 NR Description: casein kinase-like protein
  misc_feature (1)..(484): Homolog of NCBI NO: 34394436 NR Description: putative casein kinase 1, delta isoform 1
  misc_feature (1)..(484): Homolog of NCBI NO: 28269422 NR Description: putative serine/threonine protein kinase
  misc_feature (1)..(484): Homolog of NCBI NO: 15228670 NR Description: casein kinase -related [Arabidopsis thaliana]
  misc_feature (1)..(485): Homolog of NCBI NO: 34909952 NR Description: putative casein kinase [Oryza sativa (japonica
  misc_feature (1)..(484): Homolog of NCBI NO: 15238765 NR Description: casein kinase-related protein [Arabidopsis
  misc_feature (1)..(485): Homolog of NCBI NO: 30682888 NR Description: protein kinase family [Arabidopsis thaliana]
  misc_feature (1)..(217): Homolog of NCBI NO: 25287608 NR Description: probable casein kinase I [imported] - Arabidopsis
  misc_feature (1)..(485): Homolog of NCBI NO: 18139937 NR Description: serine/threonine protein kinase [Chlamydomonas
  misc_feature (21)..(484): Homolog of NCBI NO: 6006848 NR Description: unknown protein, 5' partial [Arabidopsis thaliana]
  misc_feature (1)..(485): Homolog of NCBI NO: 34903604 NR Description: casein kinase-like protein
  misc_feature (1)..(484): Homolog of NCBI NO: 34394436 NR Description: putative casein kinase 1, delta isoform 1
  misc_feature (1)..(484): Homolog of NCBI NO: 28269422 NR Description: putative serine/threonine protein kinase
  misc_feature (1)..(484): Homolog of NCBI NO: 15228670 NR Description: casein kinase -related [Arabidopsis thaliana]
  misc_feature (1)..(485): Homolog of NCBI NO: 34909952 NR Description: putative casein kinase [Oryza sativa (japonica
  misc_feature (1)..(484): Homolog of NCBI NO: 15238765 NR Description: casein kinase-related protein [Arabidopsis
  misc_feature (1)..(485): Homolog of NCBI NO: 30682888 NR Description: protein kinase family [Arabidopsis thaliana]
  misc_feature (1)..(217): Homolog of NCBI NO: 25287608 NR Description: probable casein kinase I [imported] - Arabidopsis
  misc_feature (1)..(485): Homolog of NCBI NO: 18139937 NR Description: serine/threonine protein kinase [Chlamydomonas
  misc_feature (21)..(484): Homolog of NCBI NO: 6006848 NR Description: unknown protein, 5' partial [Arabidopsis thaliana]
  misc_feature (1)..(485): Homolog of NCBI NO: 34903604 NR Description: casein kinase-like protein
  misc_feature (1)..(484): Homolog of NCBI NO: 34394436 NR Description: putative casein kinase 1, delta isoform 1
  misc_feature (1)..(484): Homolog of NCBI NO: 28269422 NR Description: putative serine/threonine protein kinase
  misc_feature (1)..(484): Homolog of NCBI NO: 15228670 NR Description: casein kinase -related [Arabidopsis thaliana]
  misc_feature (1)..(485): Homolog of NCBI NO: 34909952 NR Description: putative casein kinase [Oryza sativa (japonica
  misc_feature (1)..(484): Homolog of NCBI NO: 15238765 NR Description: casein kinase-related protein [Arabidopsis
  misc_feature (1)..(485): Homolog of NCBI NO: 30682888 NR Description: protein kinase family [Arabidopsis thaliana]

SEQ ID NO: 47611 - DNA, 2050 bp, Arabidopsis thaliana
  misc_feature (1)..(2050): Ceres Seq. ID no. 13592370
  misc_feature: MA Experiment ID: 108595 Result: Down-regulated in Transcription
  misc_feature: MA Experiment 108595 PARAMETER Experiment Name: At_Ler-pi_Ovule_cDNA_P Parameter: Plant Line Value: null
  misc_feature: MA Experiment ID: 20000185 Result: Down-regulated in Transcription
  misc_feature: MA Experiment 20000185 PARAMETER Experiment Name: At_Roots__P Parameter: Age (day) Value: 7 vs. 21
  misc_feature: MA Experiment 20000185 PARAMETER Experiment Name: At_Roots__P Parameter: Organism Value: A. thaliana
  misc_feature: MA Experiment 20000185 PARAMETER Experiment Name: At_Roots__P Parameter: Tissue Value: Roots vs. Whole Plant
  misc_feature: MA Experiment ID: 20000286 Result: Down-regulated in Transcription
  misc_feature: MA Experiment 20000286 PARAMETER Experiment Name: At_Open_Flower_P Parameter: Age (day) Value: 21
  misc_feature: MA Experiment 20000286 PARAMETER Experiment Name: At_Open_Flower_P Parameter: Plant Line Value: WS
  misc_feature: MA Experiment 20000286 PARAMETER Experiment Name: At_Open_Flower_P Parameter: Tissue Value: Half Open vs. Whole Plant
  misc_feature: MA Experiment ID: 20001451 Result: Up-regulated in Transcription
  misc_feature: MA Experiment 20001451 PARAMETER Experiment Name: At_Far-red-induction_P Parameter: Age (day) Value: 7
  misc_feature: MA Experiment 20001451 PARAMETER Experiment Name: At_Far-red-induction_P Parameter: Light Value: Far-red vs. White
  misc_feature: MA Experiment 20001451 PARAMETER Experiment Name: At_Far-red-induction_P Parameter: Organism Value: A. thaliana
  misc_feature: MA Experiment 20001451 PARAMETER Experiment Name: At_Far-red-induction_P Parameter: Plant Line Value: Columbia
  misc_feature: MA Experiment 20001451 PARAMETER Experiment Name: At_Far-red-induction_P Parameter: Timepoint (hr) Value: 24
  misc_feature: MA Experiment 20001451 PARAMETER Experiment Name: At_Far-red-induction_P Parameter: Tissue Value: Whole Plant
  misc_feature: MA Experiment ID: 20001911 Result: Up-regulated in Transcription
  misc_feature: MA Experiment 20001911 PARAMETER Experiment Name: At_Drought_Reproduction_P Parameter: Age (day) Value: 40
  misc_feature: MA Experiment 20001911 PARAMETER Experiment Name: At_Drought_Reproduction_P Parameter: Organism Value: A. thaliana
  misc_feature: MA Experiment 20001911 PARAMETER Experiment Name: At_Drought_Reproduction_P Parameter: Plant Line Value: WS
  misc_feature: MA Experiment 20001911 PARAMETER Experiment Name: At_Drought_Reproduction_P Parameter: Timepoint (day) Value: 10
  misc_feature: MA Experiment 20001911 PARAMETER Experiment Name: At_Drought_Reproduction_P Parameter: Tissue Value: Flowers
  misc_feature: MA Experiment 20001911 PARAMETER Experiment Name: At_Drought_Reproduction_P Parameter: Treatment Value: Drought vs. No Drought
tctcttccttctcatctctcttttcctctctttctttctctctctcagccctaagagagaagaaataggctctgctctgcgccttttctacaagaaattcaccaaaaaagcttgaatatttatcggaatcaaagcttgggtttttaatcctggtaaagccatgtcacatatggtgtttcagagcgttgtcgctcccaaacccttatctcctctcaaaccctgtttacctatccctcgtccactcgttactctgccttgtaagctccgtcgtggcttcgttagagcttcttcgtcctcgtttcttgtcgatgattcagtttcaggactcgagcgttgcttacagttaccttctggagttgagttaggcacatcttcctctggctctttctctgcaagtactcagatgtgtcctgtgatgaaaggcaaatttggttcggtaggagctgttactttggaaaaagggaagcttgatatgacccagaagatttctgagactagccctgagattgcaactggaggagggggtggaaacattggaaagagtatcaataatggtggtggcgatggaggtgacgataatggtgatgatgatgattactttgatgaattcgatgatggtgatgagggagatgatgatggactttttaggcgtaggatgtttctcgcagagatttttgataggaaattcgttgatgctgtgttgaatgaatggcaaaaaacaatgatggatttacctgccggtctccgtcaagcatatgaaatgggtttggtcagctcagctcaaatggtgaaattccttgccataaatgcccgtcctacaacgactagaatgatctcccgtgcccttcctcagggattatcgagggcctttgttggcaggatgttggcggatcctgcatttctctataaacttcttttggagcaagctgccacggttggatgctcagtttggtgggaggtgaagaatcgtaagaatagactaaaagaggaatgggatcttgcacttataaatgttcttactgtatcagcatgcaatgcagctgctgtttggttactagctccatgtcgttcctatggaaacacattccggtttgacctgcaaaatacattacaaaagctaccaaataatttatttgaaatgagctatcctcttagagagttcgacttgcaaaagagatttcattctcttttctacaaggctgcagagttgtccattcttggactcgcagcaggaacactccagggttcgttgtcaaacgttctagcaggaaagaagaagaacagagtatctgtgacggtcccatctatcagcacaaatgctcttggttatggtgcatttcttggaatatatgccaacttgagatatcagctgttatgtggatttgaaagaggagtgagcagtcactttgacgtcataggagtagcactcttcttcggcactgccttgaggattatgaatgtgcaattaggggaaaagtcaagacaagtatggctaggtgtagaggcagacccactggcgcagtcagatgatctgctggcaaaagcatacaaccgaccctcagaggaagcagtagcaaagccatcttcaaaatggttcatctcaaagaatgcaattgtctcagggctactcgggaagaagcaagaagattcagtttcagattctccacctccaaaggctcggcgaaaaaggatagtgaggaagaaggtggctgcatctgcctcttaaataaccaacaaaacctctaaaatgtcacaattttcagagtccatggaagaacaacagtgaggttttgttgttcatttgaggcacacatgaaaaaggttttgttgccagaggaaggaagaagggatcaccaaacttggaggaattgaaaaaaagctctatagcttctttttttttttttttactttatgactcgttctctctagttttaagtgcttttggaaagacatttctatttttaggtgtggtgataaagatgcttatctctggttaaaattctgtattttctcaatgtttctaataaatagccacatcttatacgttcgt

SEQ ID NO: 47612 - protein, 521 aa, Arabidopsis thaliana
  peptide (1)..(521): Ceres Seq. ID no. 13592371
  misc_feature (172)..(407): Homolog of NCBI NO: 22331818 NR Description: chloroplast lumen common protein family
  misc_feature (172)..(407): Homolog of NCBI NO: 34907912 NR Description: B1088C09.1 [Oryza sativa (japonica
  misc_feature (240)..(433): Homolog of NCBI NO: 6934300 NR Description: unknown [Euphorbia esula]
  misc_feature (130)..(433): Homolog of NCBI NO: 30687286 NR Description: expressed protein [Arabidopsis thaliana]
  misc_feature (115)..(433): Homolog of NCBI NO: 34900644 NR Description: hypothetical protein~similar to Arabidopsis
  misc_feature (115)..(433): Homolog of NCBI NO: 34395170 NR Description: chloroplast lumen common protein family-like
  misc_feature (107)..(433): Homolog of NCBI NO: 15242979 NR Description: expressed protein [Arabidopsis thaliana]
  misc_feature (1)..(117): Homolog of NCBI NO: 9759210 NR Description: gene_id:MXC17.9~unknown protein [Arabidopsis
  misc_feature (166)..(521): Homolog of NCBI NO: 9759209 NR Description: gb|AAD25674.1~gene_id:MXC17.8~similar to unknown
  misc_feature (1)..(521): Homolog of NCBI NO: 22327037 NR Description: expressed protein [Arabidopsis thaliana]
  misc_feature (172)..(407): Homolog of NCBI NO: 22331818 NR Description: chloroplast lumen common protein family
  misc_feature (172)..(407): Homolog of NCBI NO: 34907912 NR Description: B1088C09.1 [Oryza sativa (japonica
  misc_feature (240)..(433): Homolog of NCBI NO: 6934300 NR Description: unknown [Euphorbia esula]
  misc_feature (130)..(433): Homolog of NCBI NO: 30687286 NR Description: expressed protein [Arabidopsis thaliana]
  misc_feature (115)..(433): Homolog of NCBI NO: 34900644 NR Description: hypothetical protein~similar to Arabidopsis
  misc_feature (115)..(433): Homolog of NCBI NO: 34395170 NR Description: chloroplast lumen common protein family-like
  misc_feature (107)..(433): Homolog of NCBI NO: 15242979 NR Description: expressed protein [Arabidopsis thaliana]
  misc_feature (1)..(117): Homolog of NCBI NO: 9759210 NR Description: gene_id:MXC17.9~unknown protein [Arabidopsis
  misc_feature (166)..(521): Homolog of NCBI NO: 9759209 NR Description: gb|AAD25674.1~gene_id:MXC17.8~similar to unknown
  misc_feature (1)..(521): Homolog of NCBI NO: 22327037 NR Description: expressed protein [Arabidopsis thaliana]
MSHMVFQSVVAPKPLSPLKPCLPIPRPLVTLPCKLRRGFVRASSSSFLVDDSVSGLERCLQLPSGVELGTSSSGSFSASTQMCPVMKGKFGSVGAVTLEKGKLDMTQKISETSPEIATGGGGGNIGKSINNGGGDGGDDNGDDDDYFDEFDDGDEGDDDGLFRRRMFLAEIFDRKFVDAVLNEWQKTMMDLPAGLRQAYEMGLVSSAQMVKFLAINARPTTTRMISRALPQGLSRAFVGRMLADPAFLYKLLLEQAATVGCSVWWEVKNRKNRLKEEWDLALINVLTVSACNAAAVWLLAPCRSYGNTFRFDLQNTLQKLPNNLFEMSYPLREFDLQKRFHSLFYKAAELSILGLAAGTLQGSLSNVLAGKKKNRVSVTVPSISTNALGYGAFLGIYANLRYQLLCGFERGVSSHFDVIGVALFFGTALRIMNVQLGEKSRQVWLGVEADPLAQSDDLLAKAYNRPSEEAVAKPSSKWFISKNAIVSGLLGKKQEDSVSDSPPPKARRKRIVRKKVAASAS

SEQ ID NO: 47613 - protein, 518 aa, Arabidopsis thaliana
  peptide (1)..(518): Ceres Seq. ID no. 13592372
  misc_feature (169)..(404): Homolog of NCBI NO: 22331818 NR Description: chloroplast lumen common protein family
  misc_feature (169)..(404): Homolog of NCBI NO: 34907912 NR Description: B1088C09.1 [Oryza sativa (japonica
  misc_feature (237)..(430): Homolog of NCBI NO: 6934300 NR Description: unknown [Euphorbia esula]
  misc_feature (127)..(430): Homolog of NCBI NO: 30687286 NR Description: expressed protein [Arabidopsis thaliana]
  misc_feature (112)..(430): Homolog of NCBI NO: 34900644 NR Description: hypothetical protein~similar to Arabidopsis
  misc_feature (112)..(430): Homolog of NCBI NO: 34395170 NR Description: chloroplast lumen common protein family-like
  misc_feature (104)..(430): Homolog of NCBI NO: 15242979 NR Description: expressed protein [Arabidopsis thaliana]
  misc_feature (1)..(114): Homolog of NCBI NO: 9759210 NR Description: gene_id:MXC17.9~unknown protein [Arabidopsis
  misc_feature (163)..(518): Homolog of NCBI NO: 9759209 NR Description: gb|AAD25674.1~gene_id:MXC17.8~similar to unknown
  misc_feature (1)..(518): Homolog of NCBI NO: 22327037 NR Description: expressed protein [Arabidopsis thaliana]
  misc_feature (169)..(404): Homolog of NCBI NO: 22331818 NR Description: chloroplast lumen common protein family
  misc_feature (169)..(404): Homolog of NCBI NO: 34907912 NR Description: B1088C09.1 [Oryza sativa (japonica
  misc_feature (237)..(430): Homolog of NCBI NO: 6934300 NR Description: unknown [Euphorbia esula]
  misc_feature (127)..(430): Homolog of NCBI NO: 30687286 NR Description: expressed protein [Arabidopsis thaliana]
  misc_feature (112)..(430): Homolog of NCBI NO: 34900644 NR Description: hypothetical protein~similar to Arabidopsis
  misc_feature (112)..(430): Homolog of NCBI NO: 34395170 NR Description: chloroplast lumen common protein family-like
  misc_feature (104)..(430): Homolog of NCBI NO: 15242979 NR Description: expressed protein [Arabidopsis thaliana]
  misc_feature (1)..(114): Homolog of NCBI NO: 9759210 NR Description: gene_id:MXC17.9~unknown protein [Arabidopsis
  misc_feature (163)..(518): Homolog of NCBI NO: 9759209 NR Description: gb|AAD25674.1~gene_id:MXC17.8~similar to unknown
  misc_feature (1)..(518): Homolog of NCBI NO: 22327037 NR Description: expressed protein [Arabidopsis thaliana]
MVFQSVVAPKPLSPLKPCLPIPRPLVTLPCKLRRGFVRASSSSFLVDDSVSGLERCLQLPSGVELGTSSSGSFSASTQMCPVMKGKFGSVGAVTLEKGKLDMTQKISETSPEIATGGGGGNIGKSINNGGGDGGDDNGDDDDYFDEFDDGDEGDDDGLFRRRMFLAEIFDRKFVDAVLNEWQKTMMDLPAGLRQAYEMGLVSSAQMVKFLAINARPTTTRMISRALPQGLSRAFVGRMLADPAFLYKLLLEQAATVGCSVWWEVKNRKNRLKEEWDLALINVLTVSACNAAAVWLLAPCRSYGNTFRFDLQNTLQKLPNNLFEMSYPLREFDLQKRFHSLFYKAAELSILGLAAGTLQGSLSNVLAGKKKNRVSVTVPSISTNALGYGAFLGIYANLRYQLLCGFERGVSSHFDVIGVALFFGTALRIMNVQLGEKSRQVWLGVEADPLAQSDDLLAKAYNRPSEEAVAKPSSKWFISKNAIVSGLLGKKQEDSVSDSPPPKARRKRIVRKKVAASAS

SEQ ID NO: 47614 - protein, 440 aa, Arabidopsis thaliana
  peptide (1)..(440): Ceres Seq. ID no. 13592373
  misc_feature (91)..(326): Homolog of NCBI NO: 22331818 NR Description: chloroplast lumen common protein family
  misc_feature (91)..(326): Homolog of NCBI NO: 34907912 NR Description: B1088C09.1 [Oryza sativa (japonica
  misc_feature (159)..(352): Homolog of NCBI NO: 6934300 NR Description: unknown [Euphorbia esula]
  misc_feature (49)..(352): Homolog of NCBI NO: 30687286 NR Description: expressed protein [Arabidopsis thaliana]
  misc_feature (34)..(352): Homolog of NCBI NO: 34900644 NR Description: hypothetical protein~similar to Arabidopsis
  misc_feature (34)..(352): Homolog of NCBI NO: 34395170 NR Description: chloroplast lumen common protein family-like
  misc_feature (26)..(352): Homolog of NCBI NO: 15242979 NR Description: expressed protein [Arabidopsis thaliana]
  misc_feature (1)..(36): Homolog of NCBI NO: 9759210 NR Description: gene_id:MXC17.9~unknown protein [Arabidopsis
  misc_feature (85)..(440): Homolog of NCBI NO: 9759209 NR Description: gb|AAD25674.1~gene_id:MXC17.8~similar to unknown
  misc_feature (1)..(440): Homolog of NCBI NO: 22327037 NR Description: expressed protein [Arabidopsis thaliana]
  misc_feature (91)..(326): Homolog of NCBI NO: 22331818 NR Description: chloroplast lumen common protein family
  misc_feature (91)..(326): Homolog of NCBI NO: 34907912 NR Description: B1088C09.1 [Oryza sativa (japonica
  misc_feature (159)..(352): Homolog of NCBI NO: 6934300 NR Description: unknown [Euphorbia esula]
  misc_feature (49)..(352): Homolog of NCBI NO: 30687286 NR Description: expressed protein [Arabidopsis thaliana]
  misc_feature (34)..(352): Homolog of NCBI NO: 34900644 NR Description: hypothetical protein~similar to Arabidopsis
  misc_feature (34)..(352): Homolog of NCBI NO: 34395170 NR Description: chloroplast lumen common protein family-like
  misc_feature (26)..(352): Homolog of NCBI NO: 15242979 NR Description: expressed protein [Arabidopsis thaliana]
  misc_feature (1)..(36): Homolog of NCBI NO: 9759210 NR Description: gene_id:MXC17.9~unknown protein [Arabidopsis
  misc_feature (85)..(440): Homolog of NCBI NO: 9759209 NR Description: gb|AAD25674.1~gene_id:MXC17.8~similar to unknown
  misc_feature (1)..(440): Homolog of NCBI NO: 22327037 NR Description: expressed protein [Arabidopsis thaliana]
MCPVMKGKFGSVGAVTLEKGKLDMTQKISETSPEIATGGGGGNIGKSINNGGGDGGDDNGDDDDYFDEFDDGDEGDDDGLFRRRMFLAEIFDRKFVDAVLNEWQKTMMDLPAGLRQAYEMGLVSSAQMVKFLAINARPTTTRMISRALPQGLSRAFVGRMLADPAFLYKLLLEQAATVGCSVWWEVKNRKNRLKEEWDLALINVLTVSACNAAAVWLLAPCRSYGNTFRFDLQNTLQKLPNNLFEMSYPLREFDLQKRFHSLFYKAAELSILGLAAGTLQGSLSNVLAGKKKNRVSVTVPSISTNALGYGAFLGIYANLRYQLLCGFERGVSSHFDVIGVALFFGTALRIMNVQLGEKSRQVWLGVEADPLAQSDDLLAKAYNRPSEEAVAKPSSKWFISKNAIVSGLLGKKQEDSVSDSPPPKARRKRIVRKKVAASAS

SEQ ID NO: 47615 - DNA, 821 bp, Arabidopsis thaliana
  misc_feature (1)..(821): Ceres Seq. ID no. 13647965
  misc_feature: MA Experiment ID: 20000227 Result: Up-regulated in Transcription
  misc_feature: MA Experiment 20000227 PARAMETER Experiment Name: At_Root-Tips-vs-Tops_P Parameter: Tissue Value: Root Tips vs. Root Tops
  misc_feature: MA Experiment ID: 20001451 Result: Up-regulated in Transcription
  misc_feature: MA Experiment 20001451 PARAMETER Experiment Name: At_Far-red-induction_P Parameter: Age (day) Value: 7
  misc_feature: MA Experiment 20001451 PARAMETER Experiment Name: At_Far-red-induction_P Parameter: Light Value: Far-red vs. White
  misc_feature: MA Experiment 20001451 PARAMETER Experiment Name: At_Far-red-induction_P Parameter: Organism Value: A. thaliana
  misc_feature: MA Experiment 20001451 PARAMETER Experiment Name: At_Far-red-induction_P Parameter: Plant Line Value: Columbia
  misc_feature: MA Experiment 20001451 PARAMETER Experiment Name: At_Far-red-induction_P Parameter: Timepoint (hr) Value: 24
  misc_feature: MA Experiment 20001451 PARAMETER Experiment Name: At_Far-red-induction_P Parameter: Tissue Value: Whole Plant
  misc_feature: MA Experiment ID: 20001905 Result: Down-regulated in Transcription
  misc_feature: MA Experiment 20001905 PARAMETER Experiment Name: At_Drought_Reproduction_P Parameter: Age (day) Value: 40
  misc_feature: MA Experiment 20001905 PARAMETER Experiment Name: At_Drought_Reproduction_P Parameter: Organism Value: A. thaliana
  misc_feature: MA Experiment 20001905 PARAMETER Experiment Name: At_Drought_Reproduction_P Parameter: Plant Line Value: WS
  misc_feature: MA Experiment 20001905 PARAMETER Experiment Name: At_Drought_Reproduction_P Parameter: Timepoint (day) Value: 10
  misc_feature: MA Experiment 20001905 PARAMETER Experiment Name: At_Drought_Reproduction_P Parameter: Tissue Value: Rosettes
  misc_feature: MA Experiment 20001905 PARAMETER Experiment Name: At_Drought_Reproduction_P Parameter: Treatment Value: Drought vs. No Drought
accttcacttaacacagcagaaaccctttcttcagtcttctccggcgttctccttcttcacttcccaactaaatctcgccggacgatcgtaaccggagagcttccgtcgaccggtaaagtgtttgatatctaaagaagatgttgaagtttctatcaaaagtaagaattgagttcaacacattagatccaagacttgcgtcttgtgttgaattcttagctcaatgcaatgcaaggaaggccaaagaatcgaatcccaattgtcaggttttggtgaaacgtagaaccgatgagcagccgccgcagatcactgtcacgtttgttaatggtgttgaggaagcttttgatgcagctgcaacctcggctcagtcgattagaaagatgattcttgataaaggtcagtatcttgagacagagcaaatgtttcgtgaagctggagaacaatggcctgtgattatccctgatgaagaacttctccaagaggctcctggtgttaagccgagaaaagcagaagacaagaagtgatgctgcaccaagcacgatcaatatctcttggtgtaatctcattgatttgacaaatctagcttttgggaatgtaagatcgtttgcagtgtgcaactcgatatgtgtctcaagcttagggtttcgacagatagatttgtattgttttcttgtttatgtgaaccgcaatggatgaacttttggtcaggaaccgggactatgacactgttatggaagctattgaagctctgggaataaaaaccaatttttataggcaaaaaaaaaaaaaaaaaaaactcgagggggggcccggtacccaattc

SEQ ID NO: 47616 - protein, 127 aa, Arabidopsis thaliana
  peptide (1)..(127): Ceres Seq. ID no. 15219512
  misc_feature (1)..(127): Homolog of NCBI NO: 27450530 NR Description: hypothetical protein [Prunus persica]
  misc_feature (1)..(119): Homolog of NCBI NO: 9758335 NR Description: gene_id:MIJ24.9~unknown protein [Arabidopsis
  misc_feature (1)..(127): Homolog of NCBI NO: 15241817 NR Description: expressed protein [Arabidopsis thaliana]
MLKFLSKVRIEFNTLDPRLASCVEFLAQCNARKAKESNPNCQVLVKRRTDEQPPQITVTFVNGVEEAFDAAATSAQSIRKMILDKGQYLETEQMFREAGEQWPVIIPDEELLQEAPGVKPRKAEDKK

SEQ ID NO: 47617 - protein, 77 aa, Arabidopsis thaliana
  peptide (1)..(77): Ceres Seq. ID no. 15219513
MKNFSKRLLVLSREKQKTRSDAAPSTINISWCNLIDLTNLAFGNVRSFAVCNSICVSSLGFRQIDLYCFLVYVNRNG

SEQ ID NO: 47618 - DNA, 1350 bp, Arabidopsis thaliana
  misc_feature (1)..(1350): Ceres Seq. ID no. 12602083
  misc_feature: MA Experiment ID: 20000179 Result: Up-regulated in Transcription
  misc_feature: MA Experiment 20000179 PARAMETER Experiment Name: At_Germinating_Seeds_P Parameter: Age (hr) Value: 6 vs. 0
  misc_feature: MA Experiment 20000179 PARAMETER Experiment Name: At_Germinating_Seeds_P Parameter: Tissue Value: Germinating Seeds
  misc_feature: MA Experiment ID: 20000180 Result: Up-regulated in Transcription
  misc_feature: MA Experiment 20000180 PARAMETER Experiment Name: At_Germinating_Seeds_P Parameter: Age (hr) Value: 24 vs. 0
  misc_feature: MA Experiment 20000180 PARAMETER Experiment Name: At_Germinating_Seeds_P Parameter: Tissue Value: Germinating Seeds
  misc_feature: MA Experiment ID: 20000182 Result: Up-regulated in Transcription
  misc_feature: MA Experiment 20000182 PARAMETER Experiment Name: At_2mM_SA_P Parameter: Age (day) Value: 14
  misc_feature: MA Experiment 20000182 PARAMETER Experiment Name: At_2mM_SA_P Parameter: Organism Value: A. thaliana
  misc_feature: MA Experiment 20000182 PARAMETER Experiment Name: At_2mM_SA_P Parameter: Plant Line Value: WS
  misc_feature: MA Experiment 20000182 PARAMETER Experiment Name: At_2mM_SA_P Parameter: Timepoint (hr) Value: 6
  misc_feature: MA Experiment 20000182 PARAMETER Experiment Name: At_2mM_SA_P Parameter: Tissue Value: Aerial
  misc_feature: MA Experiment 20000182 PARAMETER Experiment Name: At_2mM_SA_P Parameter: Treatment Value: 2mM SA vs. No Treatment
  misc_feature: MA Experiment ID: 20000185 Result: Up-regulated in Transcription
  misc_feature: MA Experiment 20000185 PARAMETER Experiment Name: At_Roots__P Parameter: Age (day) Value: 7 vs. 21
  misc_feature: MA Experiment 20000185 PARAMETER Experiment Name: At_Roots__P Parameter: Organism Value: A. thaliana
  misc_feature: MA Experiment 20000185 PARAMETER Experiment Name: At_Roots__P Parameter: Tissue Value: Roots vs. Whole Plant
  misc_feature: MA Experiment ID: 20000235 Result: Up-regulated in Transcription
  misc_feature: MA Experiment 20000235 PARAMETER Experiment Name: At_Siliques_P Parameter: Age (day) Value: 21
  misc_feature: MA Experiment 20000235 PARAMETER Experiment Name: At_Siliques_P Parameter: Organism Value: A. thaliana
  misc_feature: MA Experiment 20000235 PARAMETER Experiment Name: At_Siliques_P Parameter: Plant Line Value: WS
  misc_feature: MA Experiment 20000235 PARAMETER Experiment Name: At_Siliques_P Parameter: Tissue Value: 5-10mm Siliques vs. Whole Plant
  misc_feature: MA Experiment ID: 20000439 Result: Up-regulated in Transcription
  misc_feature: MA Experiment 20000439 PARAMETER Experiment Name: At_Roots__P Parameter: Age (day) Value: 14 vs. 21
  misc_feature: MA Experiment 20000439 PARAMETER Experiment Name: At_Roots__P Parameter: Organism Value: A. thaliana
  misc_feature: MA Experiment 20000439 PARAMETER Experiment Name: At_Roots__P Parameter: Tissue Value: Roots vs. Whole Plant
  misc_feature: MA Experiment ID: 20000573 Result: Down-regulated in Transcription
  misc_feature: MA Experiment 20000573 PARAMETER Experiment Name: At_100uM_ABA_Mutants__P Parameter: Organism Value: A. thaliana
  misc_feature: MA Experiment 20000573 PARAMETER Experiment Name: At_100uM_ABA_Mutants__P Parameter: Plant Line Value: CS22 vs. Ler wt
  misc_feature: MA Experiment 20000573 PARAMETER Experiment Name: At_100uM_ABA_Mutants__P Parameter: Timepoint (hr) Value: N/A
  misc_feature: MA Experiment 20000573 PARAMETER Experiment Name: At_100uM_ABA_Mutants__P Parameter: Tissue Value: Whole Plant
  misc_feature: MA Experiment 20000573 PARAMETER Experiment Name: At_100uM_ABA_Mutants__P Parameter: Treatment Value: None
  misc_feature: MA Experiment ID: 20000574 Result: Down-regulated in Transcription
  misc_feature: MA Experiment 20000574 PARAMETER Experiment Name: At_100uM_ABA_Mutants__P Parameter: Organism Value: A. thaliana
  misc_feature: MA Experiment 20000574 PARAMETER Experiment Name: At_100uM_ABA_Mutants__P Parameter: Plant Line Value: CS23 vs. Ler wt
  misc_feature: MA Experiment 20000574 PARAMETER Experiment Name: At_100uM_ABA_Mutants__P Parameter: Timepoint (hr) Value: N/A
  misc_feature: MA Experiment 20000574 PARAMETER Experiment Name: At_100uM_ABA_Mutants__P Parameter: Tissue Value: Whole Plant
  misc_feature: MA Experiment 20000574 PARAMETER Experiment Name: At_100uM_ABA_Mutants__P Parameter: Treatment Value: None
  misc_feature: MA Experiment ID: 20001911 Result: Down-regulated in Transcription
  misc_feature: MA Experiment 20001911 PARAMETER Experiment Name: At_Drought_Reproduction_P Parameter: Age (day) Value: 40
  misc_feature: MA Experiment 20001911 PARAMETER Experiment Name: At_Drought_Reproduction_P Parameter: Organism Value: A. thaliana
  misc_feature: MA Experiment 20001911 PARAMETER Experiment Name: At_Drought_Reproduction_P Parameter: Plant Line Value: WS
  misc_feature: MA Experiment 20001911 PARAMETER Experiment Name: At_Drought_Reproduction_P Parameter: Timepoint (day) Value: 10
  misc_feature: MA Experiment 20001911 PARAMETER Experiment Name: At_Drought_Reproduction_P Parameter: Tissue Value: Flowers
  misc_feature: MA Experiment 20001911 PARAMETER Experiment Name: At_Drought_Reproduction_P Parameter: Treatment Value: Drought vs. No Drought
atgggcccaaagatgcccaacacagaaacagaaaatatgaaaatattagtcaccggctctactggttacttaggcgcacgactctgccacgttctcctccgtcgtggccactccgtacgtgcattggtccgccgcaccagcgatctctctgacttacctccagaagttgagctcgcctatggagacgtaacggattaccgttctctaacggatgcttgctccggttgcgatatcgttttccacgccgcagctttagttgagccttggcttcctgacccatctcgattcatctcagtcaacgttggtggactgaagaatgtcttggaagctgtaaaggagacgaagaccgtgcagaagattatctacacttcttccttcttcgctcttggatctaccgatggatctgttgctaatgagaatcaagttcataatgagaggttcttctgcactgagtatgagagatccaaggctgttgctgataagatggctttgaatgctgcttctgaaggtgtgccgataattttgctgtatcctggtgttatttttggtccaggcaagctcacttcagccaatatggttgctagaatgttgatcgagcgctttaacgggaggttgcctggatatattggctctgggacggatagatactccttcagccatgttgatgatgttgtggagggtcatgttgctgcaatggaaaaaggtaggcttggtgaaagatacttactcactggggaaaatgcttctttcaagcttgtctttgacatggctgcactgattactggaaccaaaaagccaaactttagcattccattatgggccatcaacgcatacggatggttatctgttttaatctctcgggttacaggaaagcttccacttatcagtcctccgacagtgacagtgctgagacatcagtggtcatactcttgtgataaggctaagctggaacttggttataaccctcgaagcctaaaggaaggattggaggagatgctcccttggttgaagagtctgggcgtcattcactactgaaattcaaatttcccatctttcaggtatttcgaagaataatattcccttgaattcagtcactatgatgagtgatgactacatttttacttctcccgttacacttttaacccaatcgatttttatcttgttacaaaactgcttcgttttgatcgtgtatgtcaaataaatgtgaaacattgtgtgcaaatgctgatgatcatattttaagatgttgagctacgtgtgagagtaggaaagagggaatatgtaaatgtgggaaataatcacattttatctgccaagaactatatgattacatctataacatatatgatc

SEQ ID NO: 47619 - protein, 344 aa, Arabidopsis thaliana
  peptide (1)..(344): Ceres Seq. ID no. 12602084
  misc_feature (14)..(337): Pfam Name: 3-beta hydroxysteroid dehydrogenase/isomerase family Pfam Description: 3-beta hydroxysteroid dehydrogenase/isomerase
  misc_feature (13)..(340): Homolog of NCBI NO: 40063226 NR Description: conserved hypothetical protein [uncultured
  misc_feature (13)..(342): Homolog of NCBI NO: 23056056 NR Description: hypothetical protein [Geobacter metallireducens]
  misc_feature (7)..(342): Homolog of NCBI NO: 2598072 NR Description: HpnA protein [Zymomonas mobilis]
  misc_feature (8)..(342): Homolog of NCBI NO: 22985846 NR Description: hypothetical protein [Burkholderia fungorum]
  misc_feature (13)..(342): Homolog of NCBI NO: 22965470 NR Description: hypothetical protein [Rhodospirillum rubrum]
  misc_feature (12)..(342): Homolog of NCBI NO: 22981628 NR Description: hypothetical protein [Ralstonia metallidurans]
  misc_feature (1)..(337): Homolog of NCBI NO: 23103397 NR Description: hypothetical protein [Azotobacter vinelandii]
  misc_feature (13)..(344): Homolog of NCBI NO: 15217277 NR Description: Putative dihydroflavonal-4-reductase [Oryza
  misc_feature (8)..(344): Homolog of NCBI NO: 21450875 NR Description: unknown protein [Arabidopsis thaliana]
  misc_feature (1)..(344): Homolog of NCBI NO: 15234163 NR Description: putative protein
MGPKMPNTETENMKILVTGSTGYLGARLCHVLLRRGHSVRALVRRTSDLSDLPPEVELAYGDVTDYRSLTDACSGCDIVFHAAALVEPWLPDPSRFISVNVGGLKNVLEAVKETKTVQKIIYTSSFFALGSTDGSVANENQVHNERFFCTEYERSKAVADKMALNAASEGVPIILLYPGVIFGPGKLTSANMVARMLIERFNGRLPGYIGSGTDRYSFSHVDDVVEGHVAAMEKGRLGERYLLTGENASFKLVFDMAALITGTKKPNFSIPLWAINAYGWLSVLISRVTGKLPLISPPTVTVLRHQWSYSCDKAKLELGYNPRSLKEGLEEMLPWLKSLGVIHY

SEQ ID NO: 47620 - protein, 340 aa, Arabidopsis thaliana
  peptide (1)..(340): Ceres Seq. ID no. 12602085
  misc_feature (10)..(333): Pfam Name: 3-beta hydroxysteroid dehydrogenase/isomerase family Pfam Description: 3-beta hydroxysteroid dehydrogenase/isomerase
  misc_feature (9)..(336): Homolog of NCBI NO: 40063226 NR Description: conserved hypothetical protein [uncultured
  misc_feature (9)..(338): Homolog of NCBI NO: 23056056 NR Description: hypothetical protein [Geobacter metallireducens]
  misc_feature (3)..(338): Homolog of NCBI NO: 2598072 NR Description: HpnA protein [Zymomonas mobilis]
  misc_feature (4)..(338): Homolog of NCBI NO: 22985846 NR Description: hypothetical protein [Burkholderia fungorum]
  misc_feature (9)..(338): Homolog of NCBI NO: 22965470 NR Description: hypothetical protein [Rhodospirillum rubrum]
  misc_feature (8)..(338): Homolog of NCBI NO: 22981628 NR Description: hypothetical protein [Ralstonia metallidurans]
  misc_feature (1)..(333): Homolog of NCBI NO: 23103397 NR Description: hypothetical protein [Azotobacter vinelandii]
  misc_feature (9)..(340): Homolog of NCBI NO: 15217277 NR Description: Putative dihydroflavonal-4-reductase [Oryza
  misc_feature (4)..(340): Homolog of NCBI NO: 21450875 NR Description: unknown protein [Arabidopsis thaliana]
  misc_feature (1)..(340): Homolog of NCBI NO: 15234163 NR Description: putative protein
MPNTETENMKILVTGSTGYLGARLCHVLLRRGHSVRALVRRTSDLSDLPPEVELAYGDVTDYRSLTDACSGCDIVFHAAALVEPWLPDPSRFISVNVGGLKNVLEAVKETKTVQKIIYTSSFFALGSTDGSVANENQVHNERFFCTEYERSKAVADKMALNAASEGVPIILLYPGVIFGPGKLTSANMVARMLIERFNGRLPGYIGSGTDRYSFSHVDDVVEGHVAAMEKGRLGERYLLTGENASFKLVFDMAALITGTKKPNFSIPLWAINAYGWLSVLISRVTGKLPLISPPTVTVLRHQWSYSCDKAKLELGYNPRSLKEGLEEMLPWLKSLGVIHY

SEQ ID NO: 47621 - protein, 332 aa, Arabidopsis thaliana
  peptide (1)..(332): Ceres Seq. ID no. 12602086
  misc_feature (2)..(325): Pfam Name: 3-beta hydroxysteroid dehydrogenase/isomerase family Pfam Description: 3-beta hydroxysteroid dehydrogenase/isomerase
  misc_feature (1)..(328): Homolog of NCBI NO: 40063226 NR Description: conserved hypothetical protein [uncultured
  misc_feature (1)..(330): Homolog of NCBI NO: 23056056 NR Description: hypothetical protein [Geobacter metallireducens]
  misc_feature (1)..(330): Homolog of NCBI NO: 2598072 NR Description: HpnA protein [Zymomonas mobilis]
  misc_feature (1)..(330): Homolog of NCBI NO: 22985846 NR Description: hypothetical protein [Burkholderia fungorum]
  misc_feature (1)..(330): Homolog of NCBI NO: 22965470 NR Description: hypothetical protein [Rhodospirillum rubrum]
  misc_feature (1)..(330): Homolog of NCBI NO: 22981628 NR Description: hypothetical protein [Ralstonia metallidurans]
  misc_feature (1)..(325): Homolog of NCBI NO: 23103397 NR Description: hypothetical protein [Azotobacter vinelandii]
  misc_feature (1)..(332): Homolog of NCBI NO: 15217277 NR Description: Putative dihydroflavonal-4-reductase [Oryza
  misc_feature (1)..(332): Homolog of NCBI NO: 21450875 NR Description: unknown protein [Arabidopsis thaliana]
  misc_feature (1)..(332): Homolog of NCBI NO: 15234163 NR Description: putative protein
MKILVTGSTGYLGARLCHVLLRRGHSVRALVRRTSDLSDLPPEVELAYGDVTDYRSLTDACSGCDIVFHAAALVEPWLPDPSRFISVNVGGLKNVLEAVKETKTVQKIIYTSSFFALGSTDGSVANENQVHNERFFCTEYERSKAVADKMALNAASEGVPIILLYPGVIFGPGKLTSANMVARMLIERFNGRLPGYIGSGTDRYSFSHVDDVVEGHVAAMEKGRLGERYLLTGENASFKLVFDMAALITGTKKPNFSIPLWAINAYGWLSVLISRVTGKLPLISPPTVTVLRHQWSYSCDKAKLELGYNPRSLKEGLEEMLPWLKSLGVIHY

SEQ ID NO: 47622 - DNA, 1420 bp, Arabidopsis thaliana; identical to SEQ ID NO: 29119
  misc_feature (1)..(1420): Ceres Seq. ID no. 12602555
  misc_feature: MA Experiment ID: 108461 Result: Down-regulated in Transcription
  misc_feature: MA Experiment 108461 PARAMETER Experiment Name: At_Germinating_Seeds_cDNA_P Parameter: Age (day) Value: 1 vs. 0
  misc_feature: MA Experiment 108461 PARAMETER Experiment Name: At_Germinating_Seeds_cDNA_P Parameter: Tissue Value: Germinating Seeds
  misc_feature: MA Experiment ID: 108462 Result: Down-regulated in Transcription
  misc_feature: MA Experiment 108462 PARAMETER Experiment Name: At_Germinating_Seeds_cDNA_P Parameter: Age (day) Value: 2 vs. 0
  misc_feature: MA Experiment 108462 PARAMETER Experiment Name: At_Germinating_Seeds_cDNA_P Parameter: Tissue Value: Germinating Seeds
  misc_feature: MA Experiment ID: 108463 Result: Down-regulated in Transcription
  misc_feature: MA Experiment 108463 PARAMETER Experiment Name: At_Germinating_Seeds_cDNA_P Parameter: Age (day) Value: 3 vs. 0
  misc_feature: MA Experiment 108463 PARAMETER Experiment Name: At_Germinating_Seeds_cDNA_P Parameter: Tissue Value: Germinating Seeds
  misc_feature: MA Experiment ID: 108464 Result: Down-regulated in Transcription
  misc_feature: MA Experiment 108464 PARAMETER Experiment Name: At_Germinating_Seeds_cDNA_P Parameter: Age (day) Value: 4 vs. 0
  misc_feature: MA Experiment 108464 PARAMETER Experiment Name: At_Germinating_Seeds_cDNA_P Parameter: Tissue Value: Germinating Seeds
  misc_feature: MA Experiment ID: 20000113 Result: Up-regulated in Transcription
  misc_feature: MA Experiment 20000113 PARAMETER Experiment Name: At_42deg_Heat_cDNA_P Parameter: Temperature (deg C) Value: 42 vs. 22
  misc_feature: MA Experiment 20000113 PARAMETER Experiment Name: At_42deg_Heat_cDNA_P Parameter: Timepoint (hr) Value: 8
  misc_feature: MA Experiment 20000113 PARAMETER Experiment Name: At_42deg_Heat_cDNA_P Parameter: Tissue Value: Aerial
  misc_feature: MA Experiment ID: 20000180 Result: Down-regulated in Transcription
  misc_feature: MA Experiment 20000180 PARAMETER Experiment Name: At_Germinating_Seeds_P Parameter: Age (hr) Value: 24 vs. 0
  misc_feature: MA Experiment 20000180 PARAMETER Experiment Name: At_Germinating_Seeds_P Parameter: Tissue Value: Germinating Seeds
  misc_feature: MA Experiment ID: 20001911 Result: Up-regulated in Transcription
  misc_feature: MA Experiment 20001911 PARAMETER Experiment Name: At_Drought_Reproduction_P Parameter: Age (day) Value: 40
  misc_feature: MA Experiment 20001911 PARAMETER Experiment Name: At_Drought_Reproduction_P Parameter: Organism Value: A. thaliana
  misc_feature: MA Experiment 20001911 PARAMETER Experiment Name: At_Drought_Reproduction_P Parameter: Plant Line Value: WS
  misc_feature: MA Experiment 20001911 PARAMETER Experiment Name: At_Drought_Reproduction_P Parameter: Timepoint (day) Value: 10
  misc_feature: MA Experiment 20001911 PARAMETER Experiment Name: At_Drought_Reproduction_P Parameter: Tissue Value: Flowers
  misc_feature: MA Experiment 20001911 PARAMETER Experiment Name: At_Drought_Reproduction_P Parameter: Treatment Value: Drought vs. No Drought

SEQ ID NO: 47623 - protein, 341 aa, Arabidopsis thaliana; identical to SEQ ID NO: 29120
  peptide (1)..(341): Ceres Seq. ID no. 12602556
  misc_feature (1)..(341): Homolog of NCBI NO: 7433352 NR Description: ribonucleoside-diphosphate reductase (EC
  misc_feature (1)..(341): Homolog of NCBI NO: 15229476 NR Description: ribonucleoside-diphosphate reductase small chain
  misc_feature (1)..(341): Homolog of NCBI NO: 7433352 NR Description: ribonucleoside-diphosphate reductase (EC
  misc_feature (1)..(341): Homolog of NCBI NO: 15229476 NR Description: ribonucleoside-diphosphate reductase small chain
  misc_feature (1)..(341): Homolog of NCBI NO: 7433352 NR Description: ribonucleoside-diphosphate reductase (EC
  misc_feature (1)..(341): Homolog of NCBI NO: 15229476 NR Description: ribonucleoside-diphosphate reductase small chain

SEQ ID NO: 47624 - protein, 330 aa, Arabidopsis thaliana; identical to SEQ ID NO: 29121
  peptide (1)..(330): Ceres Seq. ID no. 12602557
  misc_feature (1)..(330): Homolog of NCBI NO: 7433352 NR Description: ribonucleoside-diphosphate reductase (EC
  misc_feature (1)..(330): Homolog of NCBI NO: 15229476 NR Description: ribonucleoside-diphosphate reductase small chain
  misc_feature (1)..(330): Homolog of NCBI NO: 7433352 NR Description: ribonucleoside-diphosphate reductase (EC
  misc_feature (1)..(330): Homolog of NCBI NO: 15229476 NR Description: ribonucleoside-diphosphate reductase small chain
  misc_feature (1)..(330): Homolog of NCBI NO: 7433352 NR Description: ribonucleoside-diphosphate reductase (EC
  misc_feature (1)..(330): Homolog of NCBI NO: 15229476 NR Description: ribonucleoside-diphosphate reductase small chain

SEQ ID NO: 47625 - protein, 319 aa, Arabidopsis thaliana; identical to SEQ ID NO: 29122
  peptide (1)..(319): Ceres Seq. ID no. 12602558
  misc_feature (1)..(319): Homolog of NCBI NO: 7433352 NR Description: ribonucleoside-diphosphate reductase (EC
  misc_feature (1)..(319): Homolog of NCBI NO: 15229476 NR Description: ribonucleoside-diphosphate reductase small chain
  misc_feature (1)..(319): Homolog of NCBI NO: 7433352 NR Description: ribonucleoside-diphosphate reductase (EC
  misc_feature (1)..(319): Homolog of NCBI NO: 15229476 NR Description: ribonucleoside-diphosphate reductase small chain
  misc_feature (1)..(319): Homolog of NCBI NO: 7433352 NR Description: ribonucleoside-diphosphate reductase (EC
  misc_feature (1)..(319): Homolog of NCBI NO: 15229476 NR Description: ribonucleoside-diphosphate reductase small chain

SEQ ID NO: 47626 - DNA, 1163 bp, Arabidopsis thaliana
  misc_feature (1)..(1163): Ceres Seq. ID no. 12605703
  misc_feature: MA Experiment ID: 108434 Result: Up-regulated in Transcription
  misc_feature: MA Experiment 108434 PARAMETER Experiment Name: At_Root_Tips_cDNA_P Parameter: Tissue Value: Root Tips
  misc_feature: MA Experiment ID: 108461 Result: Down-regulated in Transcription
  misc_feature: MA Experiment 108461 PARAMETER Experiment Name: At_Germinating_Seeds_cDNA_P Parameter: Age (day) Value: 1 vs. 0
  misc_feature: MA Experiment 108461 PARAMETER Experiment Name: At_Germinating_Seeds_cDNA_P Parameter: Tissue Value: Germinating Seeds
  misc_feature: MA Experiment ID: 108462 Result: Down-regulated in Transcription
  misc_feature: MA Experiment 108462 PARAMETER Experiment Name: At_Germinating_Seeds_cDNA_P Parameter: Age (day) Value: 2 vs. 0
  misc_feature: MA Experiment 108462 PARAMETER Experiment Name: At_Germinating_Seeds_cDNA_P Parameter: Tissue Value: Germinating Seeds
  misc_feature: MA Experiment ID: 108463 Result: Down-regulated in Transcription
  misc_feature: MA Experiment 108463 PARAMETER Experiment Name: At_Germinating_Seeds_cDNA_P Parameter: Age (day) Value: 3 vs. 0
  misc_feature: MA Experiment 108463 PARAMETER Experiment Name: At_Germinating_Seeds_cDNA_P Parameter: Tissue Value: Germinating Seeds
  misc_feature: MA Experiment ID: 108464 Result: Down-regulated in Transcription
  misc_feature: MA Experiment 108464 PARAMETER Experiment Name: At_Germinating_Seeds_cDNA_P Parameter: Age (day) Value: 4 vs. 0
  misc_feature: MA Experiment 108464 PARAMETER Experiment Name: At_Germinating_Seeds_cDNA_P Parameter: Tissue Value: Germinating Seeds
  misc_feature: MA Experiment ID: 108569 Result: Up-regulated in Transcription
  misc_feature: MA Experiment 108569 PARAMETER Experiment Name: At_0.001%_MeJA__cDNA_P Parameter: Timepoint (hr) Value: 6
  misc_feature: MA Experiment 108569 PARAMETER Experiment Name: At_0.001%_MeJA__cDNA_P Parameter: Tissue Value: Aerial
  misc_feature: MA Experiment 108569 PARAMETER Experiment Name: At_0.001%_MeJA__cDNA_P Parameter: Treatment Value: 0.001% MeJA vs. No Treatment
  misc_feature: MA Experiment ID: 108573 Result: Up-regulated in Transcription
  misc_feature: MA Experiment 108573 PARAMETER Experiment Name: At_Drought_cDNA_P Parameter: Timepoint (hr) Value: 6
  misc_feature: MA Experiment 108573 PARAMETER Experiment Name: At_Drought_cDNA_P Parameter: Tissue Value: Aerial
  misc_feature: MA Experiment 108573 PARAMETER Experiment Name: At_Drought_cDNA_P Parameter: Treatment Value: Drought vs. No Drought
  misc_feature: MA Experiment ID: 20000173 Result: Up-regulated in Transcription
  misc_feature: MA Experiment 20000173 PARAMETER Experiment Name: At_42deg_Heat_P Parameter: Age (day) Value: 14
  misc_feature: MA Experiment 20000173 PARAMETER Experiment Name: At_42deg_Heat_P Parameter: Organism Value: A. thaliana
  misc_feature: MA Experiment 20000173 PARAMETER Experiment Name: At_42deg_Heat_P Parameter: Plant Line Value: WS
  misc_feature: MA Experiment 20000173 PARAMETER Experiment Name: At_42deg_Heat_P Parameter: Temperature (deg C) Value: 42 vs. 22
  misc_feature: MA Experiment 20000173 PARAMETER Experiment Name: At_42deg_Heat_P Parameter: Timepoint (hr) Value: 6
  misc_feature: MA Experiment 20000173 PARAMETER Experiment Name: At_42deg_Heat_P Parameter: Tissue Value: Aerial
  misc_feature: MA Experiment ID: 20000235 Result: Down-regulated in Transcription
  misc_feature: MA Experiment 20000235 PARAMETER Experiment Name: At_Siliques_P Parameter: Age (day) Value: 21
  misc_feature: MA Experiment 20000235 PARAMETER Experiment Name: At_Siliques_P Parameter: Organism Value: A. thaliana
  misc_feature: MA Experiment 20000235 PARAMETER Experiment Name: At_Siliques_P Parameter: Plant Line Value: WS
  misc_feature: MA Experiment 20000235 PARAMETER Experiment Name: At_Siliques_P Parameter: Tissue Value: 5-10mm Siliques vs. Whole Plant
  misc_feature: MA Experiment ID: 20000264 Result: Down-regulated in Transcription
  misc_feature: MA Experiment 20000264 PARAMETER Experiment Name: At_Open_Flower_P Parameter: Age (day) Value: 21
  misc_feature: MA Experiment 20000264 PARAMETER Experiment Name: At_Open_Flower_P Parameter: Plant Line Value: WS
  misc_feature: MA Experiment 20000264 PARAMETER Experiment Name: At_Open_Flower_P Parameter: Tissue Value: Open Flower vs. Whole Plant
  misc_feature: MA Experiment ID: 20000265 Result: Down-regulated in Transcription
  misc_feature: MA Experiment 20000265 PARAMETER Experiment Name: At_Open_Flower_P Parameter: Age (day) Value: 21
  misc_feature: MA Experiment 20000265 PARAMETER Experiment Name: At_Open_Flower_P Parameter: Plant Line Value: WS
  misc_feature: MA Experiment 20000265 PARAMETER Experiment Name: At_Open_Flower_P Parameter: Tissue Value: Closed Flower vs. Whole Plant
  misc_feature: MA Experiment ID: 20000794 Result: Down-regulated in Transcription
  misc_feature: MA Experiment 20000794 PARAMETER Experiment Name: At_Petals_P Parameter: Age (day) Value: 23-25 days
  misc_feature: MA Experiment 20000794 PARAMETER Experiment Name: At_Petals_P Parameter: Plant Line Value: WS
  misc_feature: MA Experiment 20000794 PARAMETER Experiment Name: At_Petals_P Parameter: Tissue Value: Petals vs. Whole plant
  misc_feature: MA Experiment ID: 20001911 Result: Up-regulated in Transcription
  misc_feature: MA Experiment 20001911 PARAMETER Experiment Name: At_Drought_Reproduction_P Parameter: Age (day) Value: 40
  misc_feature: MA Experiment 20001911 PARAMETER Experiment Name: At_Drought_Reproduction_P Parameter: Organism Value: A. thaliana
  misc_feature: MA Experiment 20001911 PARAMETER Experiment Name: At_Drought_Reproduction_P Parameter: Plant Line Value: WS
  misc_feature: MA Experiment 20001911 PARAMETER Experiment Name: At_Drought_Reproduction_P Parameter: Timepoint (day) Value: 10
  misc_feature: MA Experiment 20001911 PARAMETER Experiment Name: At_Drought_Reproduction_P Parameter: Tissue Value: Flowers
  misc_feature: MA Experiment 20001911 PARAMETER Experiment Name: At_Drought_Reproduction_P Parameter: Treatment Value: Drought vs. No Drought
ggacgccgtttcttcttttaccttccttctctcgctcaccgtcgcacctccttcattttttctctctctctcaaactcgtctctaaaactcgtccgtcgattaattcctcgttagtctcaggtttgatagaatcattgcctgaggcatctaataatgggaacaccagagacatctcgggagccttgccctgatcgtatactcgatgatatcggtggtgcttttggtatgggagctgttggaggatctgcctttcatttcattaaagggacttacaattctcctaaaggtagtcgctttgttggaggaacacaatcggtgagcatgaacgcacctcgtactggaggcagttttgctgtttggggaggtttattctcgacatttgactgtaccatggtgtacctaaggcaaaaggaggatccttggaactctatcattgctggtgctgcaactggagggtttctgtctatgcggcaaggggctggtgctgcttcgagatcagctatttttggaggggttttgcttgctttgattgaaggagctgggatcatgttgaacaaggtactggctcagcctcagaatatgatgatggaggaccctggaatgcaaggaatgcctgggatgcagggaatgcagggaatgcctgggatgcccggaatgcaaggaatgcctgggatgcaaggaatgcagatggggcagatgcagagtcaagcacagataaggtcagagagtcaaaaccagaatacagcttcatcatcatcatcatcatcatggtttggagggctttttgataagaaaaaggaggaggtgcaaccaggcagtgaaagtaaaacagaggtgttggagagttttgatgctcctccggtgccatcatttgagttcaagtaagctttgtggacatctatttctctgtcatccaatggtttacctactgcctcaactatcaattccatttcgtcgtctttttgtctatcctaagttctcagctgaattcttcttgttcatggaagaatcagcatgctatgttctctctcttttcacttatggttatgtttcaatgagcttatgcactcaatctaggaatattctctttgtgaaaccattccacagatattgttggttcttaaataatgtagttatagattttaacaatattcgccagtgg

SEQ ID NO: 47627 - protein, 243 aa, Arabidopsis thaliana
  peptide (1)..(243): Ceres Seq. ID no. 12605704
  misc_feature (5)..(169): Homolog of NCBI NO: 34933423 NR Description: similar to mitochondrial inner membrane
  misc_feature (5)..(169): Homolog of NCBI NO: 33468937 NR Description: translocator of inner mitochondrial membrane b
  misc_feature (5)..(169): Homolog of NCBI NO: 5032181 NR Description: translocase of inner mitochondrial membrane 17
  misc_feature (5)..(155): Homolog of NCBI NO: 30923567 NR Description: CG40451-PA [Drosophila melanogaster]
  misc_feature (1)..(225): Homolog of NCBI NO: 34394571 NR Description: translocase inner membrane-like protein
  misc_feature (179)..(243): Homolog of NCBI NO: 15217923 NR Description: mitochondrial inner membrane translocase
  misc_feature (1)..(161): Homolog of NCBI NO: 15217923 NR Description: mitochondrial inner membrane translocase
  misc_feature (1)..(243): Homolog of NCBI NO: 6103722 NR Description: TIM17 [Arabidopsis thaliana]
  misc_feature (1)..(243): Homolog of NCBI NO: 38678772 NR Description: mitochondrial inner membrane translocase TM17-2
  misc_feature (1)..(243): Homolog of NCBI NO: 15228131 NR Description: putative protein translocase
MGTPETSREPCPDRILDDIGGAFGMGAVGGSAFHFIKGTYNSPKGSRFVGGTQSVSMNAPRTGGSFAVWGGLFSTFDCTMVYLRQKEDPWNSIIAGAATGGFLSMRQGAGAASRSAIFGGVLLALIEGAGIMLNKVLAQPQNMMMEDPGMQGMPGMQGMQGMPGMPGMQGMPGMQGMQMGQMQSQAQIRSESQNQNTASSSSSSSWFGGLFDKKKEEVQPGSESKTEVLESFDAPPVPSFEFK

SEQ ID NO: 47628 - protein, 219 aa, Arabidopsis thaliana
  peptide (1)..(219): Ceres Seq. ID no. 12605705
  misc_feature (1)..(145): Homolog of NCBI NO: 34933423 NR Description: similar to mitochondrial inner membrane
  misc_feature (1)..(145): Homolog of NCBI NO: 33468937 NR Description: translocator of inner mitochondrial membrane b
  misc_feature (1)..(145): Homolog of NCBI NO: 5032181 NR Description: translocase of inner mitochondrial membrane 17
  misc_feature (1)..(131): Homolog of NCBI NO: 30923567 NR Description: CG40451-PA [Drosophila melanogaster]
  misc_feature (1)..(201): Homolog of NCBI NO: 34394571 NR Description: translocase inner membrane-like protein
  misc_feature (155)..(219): Homolog of NCBI NO: 15217923 NR Description: mitochondrial inner membrane translocase
  misc_feature (1)..(137): Homolog of NCBI NO: 15217923 NR Description: mitochondrial inner membrane translocase
  misc_feature (1)..(219): Homolog of NCBI NO: 6103722 NR Description: TIM17 [Arabidopsis thaliana]
  misc_feature (1)..(219): Homolog of NCBI NO: 38678772 NR Description: mitochondrial inner membrane translocase TM17-2
  misc_feature (1)..(219): Homolog of NCBI NO: 15228131 NR Description: putative protein translocase
MGAVGGSAFHFIKGTYNSPKGSRFVGGTQSVSMNAPRTGGSFAVWGGLFSTFDCTMVYLRQKEDPWNSIIAGAATGGFLSMRQGAGAASRSAIFGGVLLALIEGAGIMLNKVLAQPQNMMMEDPGMQGMPGMQGMQGMPGMPGMQGMPGMQGMQMGQMQSQAQIRSESQNQNTASSSSSSSWFGGLFDKKKEEVQPGSESKTEVLESFDAPPVPSFEFK

SEQ ID NO: 47629 - protein, 187 aa, Arabidopsis thaliana
  peptide (1)..(187): Ceres Seq. ID no. 12605706
  misc_feature (1)..(113): Homolog of NCBI NO: 34933423 NR Description: similar to mitochondrial inner membrane
  misc_feature (1)..(113): Homolog of NCBI NO: 33468937 NR Description: translocator of inner mitochondrial membrane b
  misc_feature (1)..(113): Homolog of NCBI NO: 5032181 NR Description: translocase of inner mitochondrial membrane 17
  misc_feature (1)..(99): Homolog of NCBI NO: 30923567 NR Description: CG40451-PA [Drosophila melanogaster]
  misc_feature (1)..(169): Homolog of NCBI NO: 34394571 NR Description: translocase inner membrane-like protein
  misc_feature (123)..(187): Homolog of NCBI NO: 15217923 NR Description: mitochondrial inner membrane translocase
  misc_feature (1)..(105): Homolog of NCBI NO: 15217923 NR Description: mitochondrial inner membrane translocase
  misc_feature (1)..(187): Homolog of NCBI NO: 6103722 NR Description: TIM17 [Arabidopsis thaliana]
  misc_feature (1)..(187): Homolog of NCBI NO: 38678772 NR Description: mitochondrial inner membrane translocase TM17-2
  misc_feature (1)..(187): Homolog of NCBI NO: 15228131 NR Description: putative protein translocase
MNAPRTGGSFAVWGGLFSTFDCTMVYLRQKEDPWNSIIAGAATGGFLSMRQGAGAASRSAIFGGVLLALIEGAGIMLNKVLAQPQNMMMEDPGMQGMPGMQGMQGMPGMPGMQGMPGMQGMQMGQMQSQAQIRSESQNQNTASSSSSSSWFGGLFDKKKEEVQPGSESKTEVLESFDAPPVPSFEFK

SEQ ID NO: 47630 - DNA, 724 bp, Arabidopsis thaliana
  misc_feature (1)..(724): Ceres Seq. ID no. 13647263
  misc_feature: MA Experiment ID: 20000306 Result: Up-regulated in Transcription
  misc_feature: MA Experiment 20000306 PARAMETER Experiment Name: At_Germinating_Seeds_Sub_P Parameter: Age (hr) Value: 6 vs. 0
  misc_feature: MA Experiment 20000306 PARAMETER Experiment Name: At_Germinating_Seeds_Sub_P Parameter: Organism Value: A. thaliana
  misc_feature: MA Experiment 20000306 PARAMETER Experiment Name: At_Germinating_Seeds_Sub_P Parameter: Plant Line Value: WS
  misc_feature: MA Experiment 20000306 PARAMETER Experiment Name: At_Germinating_Seeds_Sub_P Parameter: Tissue Value: Germinating Seeds
  misc_feature: MA Experiment ID: 20000307 Result: Up-regulated in Transcription
  misc_feature: MA Experiment 20000307 PARAMETER Experiment Name: At_Germinating_Seeds_Sub_P Parameter: Age (hr) Value: 24 vs. 0
  misc_feature: MA Experiment 20000307 PARAMETER Experiment Name: At_Germinating_Seeds_Sub_P Parameter: Organism Value: A. thaliana
  misc_feature: MA Experiment 20000307 PARAMETER Experiment Name: At_Germinating_Seeds_Sub_P Parameter: Plant Line Value: WS
  misc_feature: MA Experiment 20000307 PARAMETER Experiment Name: At_Germinating_Seeds_Sub_P Parameter: Tissue Value: Germinating Seeds
  misc_feature: MA Experiment ID: 20000355 Result: Up-regulated in Transcription
  misc_feature: MA Experiment 20000355 PARAMETER Experiment Name: At_Siliques_Sub_P Parameter: Age (day) Value: 21
  misc_feature: MA Experiment 20000355 PARAMETER Experiment Name: At_Siliques_Sub_P Parameter: Organism Value: A. thaliana
  misc_feature: MA Experiment 20000355 PARAMETER Experiment Name: At_Siliques_Sub_P Parameter: Plant Line Value: WS
  misc_feature: MA Experiment 20000355 PARAMETER Experiment Name: At_Siliques_Sub_P Parameter: Tissue Value: Less Than 5mm Siliques vs. Whole Plant
gggagcaaaagatctggccaccacaacacaacgatcgacgaatacaatcggaaaatttgaaatctcgtcgatgaagatgactgctaagatgcgccgtgaattcccgacggcgttccttctcttgtttctggttccggtgatgattccggtcggtgaggctgtatggctagatgtgcctcccaccggaacaaagtgtgtatctgaagaaatccagagcaatgtcgtcgttttggctgattacctcatcatctccgaggatcacgaggtcatgcccactatatccgtcaaggtgacatccccatatggcaacaatctgcacaatatggaaaacgtaacgcatggccaatttgcatttacaacccaagaatcagggaactacttggcgtgcttttgggcagatgaaaagagtcacggaaacaaaaatgttagcatcaacattgactggagaactggaatcgctgctaaggattgggcctctattgctaagaaagagaagatcgagggtgtggagctggagatcaggaaactcgaaggcgcagtcgaagccatccatgaaaatatactctacctaagaaacagagaagcagacatgaggacaatgagtgagaaaacgaactcgcgggtggcttggtacagtataatgtcactaggtgtttgcattgctgtctctggtttccaggtactctacttgaagcagtactttgagaagaagaagcttatatag

SEQ ID NO: 47631 - protein, 240 aa, Arabidopsis thaliana
  peptide (1)..(240): Ceres Seq. ID no. 13647264
  misc_feature (39)..(240): Pfam Name: emp24/gp25L/p24 family Pfam Description: emp24/gp25L/p24 family
  misc_feature (40)..(240): Homolog of NCBI NO: 12597802 NR Description: unknown protein [Arabidopsis thaliana]
  misc_feature (38)..(167): Homolog of NCBI NO: 25402945 NR Description: protein T26F17.12 [imported] - Arabidopsis
  misc_feature (39)..(240): Homolog of NCBI NO: 18396016 NR Description: emp24/gp25L/p24 family [Arabidopsis thaliana]
  misc_feature (39)..(240): Homolog of NCBI NO: 21618241 NR Description: unknown [Arabidopsis thaliana]
  misc_feature (37)..(240): Homolog of NCBI NO: 33146897 NR Description: putative transmembrane protein
  misc_feature (91)..(217): Homolog of NCBI NO: 40641597 NR Description: putative transmembrane protein-like protein
  misc_feature (35)..(240): Homolog of NCBI NO: 15228372 NR Description: emp24/gp25L/p24 family [Arabidopsis thaliana]
  misc_feature (38)..(240): Homolog of NCBI NO: 15219136 NR Description: emp24/gp25L/p24 family [Arabidopsis thaliana]
  misc_feature (31)..(240): Homolog of NCBI NO: 15223626 NR Description: emp24/gp25L/p24 family [Arabidopsis thaliana]
  misc_feature (24)..(240): Homolog of NCBI NO: 15217563 NR Description: emp24/gp25L/p24 family [Arabidopsis thaliana]
GAKDLATTTQRSTNTIGKFEISSMKMTAKMRREFPTAFLLLFLVPVMIPVGEAVWLDVPPTGTKCVSEEIQSNVVVLADYLIISEDHEVMPTISVKVTSPYGNNLHNMENVTHGQFAFTTQESGNYLACFWADEKSHGNKNVSINIDWRTGIAAKDWASIAKKEKIEGVELEIRKLEGAVEAIHENILYLRNREADMRTMSEKTNSRVAWYSIMSLGVCIAVSGFQVLYLKQYFEKKKLI

SEQ ID NO: 47632 - protein, 217 aa, Arabidopsis thaliana
  peptide (1)..(217): Ceres Seq. ID no. 13647265
  misc_feature (16)..(217): Pfam Name: emp24/gp25L/p24 family Pfam Description: emp24/gp25L/p24 family
  misc_feature (17)..(217): Homolog of NCBI NO: 12597802 NR Description: unknown protein [Arabidopsis thaliana]
  misc_feature (15)..(144): Homolog of NCBI NO: 25402945 NR Description: protein T26F17.12 [imported] - Arabidopsis
  misc_feature (16)..(217): Homolog of NCBI NO: 18396016 NR Description: emp24/gp25L/p24 family [Arabidopsis thaliana]
  misc_feature (16)..(217): Homolog of NCBI NO: 21618241 NR Description: unknown [Arabidopsis thaliana]
  misc_feature (14)..(217): Homolog of NCBI NO: 33146897 NR Description: putative transmembrane protein
  misc_feature (68)..(194): Homolog of NCBI NO: 40641597 NR Description: putative transmembrane protein-like protein
  misc_feature (12)..(217): Homolog of NCBI NO: 15228372 NR Description: emp24/gp25L/p24 family [Arabidopsis thaliana]
  misc_feature (15)..(217): Homolog of NCBI NO: 15219136 NR Description: emp24/gp25L/p24 family [Arabidopsis thaliana]
  misc_feature (8)..(217): Homolog of NCBI NO: 15223626 NR Description: emp24/gp25L/p24 family [Arabidopsis thaliana]
  misc_feature (1)..(217): Homolog of NCBI NO: 15217563 NR Description: emp24/gp25L/p24 family [Arabidopsis thaliana]
MKMTAKMRREFPTAFLLLFLVPVMIPVGEAVWLDVPPTGTKCVSEEIQSNVVVLADYLIISEDHEVMPTISVKVTSPYGNNLHNMENVTHGQFAFTTQESGNYLACFWADEKSHGNKNVSINIDWRTGIAAKDWASIAKKEKIEGVELEIRKLEGAVEAIHENILYLRNREADMRTMSEKTNSRVAWYSIMSLGVCIAVSGFQVLYLKQYFEKKKLI

SEQ ID NO: 47633 - protein, 215 aa, Arabidopsis thaliana
  peptide (1)..(215): Ceres Seq. ID no. 13647266
  misc_feature (14)..(215): Pfam Name: emp24/gp25L/p24 family Pfam Description: emp24/gp25L/p24 family
  misc_feature (15)..(215): Homolog of NCBI NO: 12597802 NR Description: unknown protein [Arabidopsis thaliana]
  misc_feature (13)..(142): Homolog of NCBI NO: 25402945 NR Description: protein T26F17.12 [imported] - Arabidopsis
  misc_feature (14)..(215): Homolog of NCBI NO: 18396016 NR Description: emp24/gp25L/p24 family [Arabidopsis thaliana]
  misc_feature (14)..(215): Homolog of NCBI NO: 21618241 NR Description: unknown [Arabidopsis thaliana]
  misc_feature (12)..(215): Homolog of NCBI NO: 33146897 NR Description: putative transmembrane protein
  misc_feature (66)..(192): Homolog of NCBI NO: 40641597 NR Description: putative transmembrane protein-like protein
  misc_feature (10)..(215): Homolog of NCBI NO: 15228372 NR Description: emp24/gp25L/p24 family [Arabidopsis thaliana]
  misc_feature (13)..(215): Homolog of NCBI NO: 15219136 NR Description: emp24/gp25L/p24 family [Arabidopsis thaliana]
  misc_feature (6)..(215): Homolog of NCBI NO: 15223626 NR Description: emp24/gp25L/p24 family [Arabidopsis thaliana]
  misc_feature (1)..(215): Homolog of NCBI NO: 15217563 NR Description: emp24/gp25L/p24 family [Arabidopsis thaliana]
MTAKMRREFPTAFLLLFLVPVMIPVGEAVWLDVPPTGTKCVSEEIQSNVVVLADYLIISEDHEVMPTISVKVTSPYGNNLHNMENVTHGQFAFTTQESGNYLACFWADEKSHGNKNVSINIDWRTGIAAKDWASIAKKEKIEGVELEIRKLEGAVEAIHENILYLRNREADMRTMSEKTNSRVAWYSIMSLGVCIAVSGFQVLYLKQYFEKKKLI

SEQ ID NO: 47634 - DNA, 1873 bp, Arabidopsis thaliana; identical to SEQ ID NO: 28194
  misc_feature (1)..(1873): Ceres Seq. ID no. 12680413
  misc_feature: MA Experiment ID: 108569 Result: Up-regulated in Transcription
  misc_feature: MA Experiment 108569 PARAMETER Experiment Name: At_0.001%_MeJA__cDNA_P Parameter: Timepoint (hr) Value: 6
  misc_feature: MA Experiment 108569 PARAMETER Experiment Name: At_0.001%_MeJA__cDNA_P Parameter: Tissue Value: Aerial
  misc_feature: MA Experiment 108569 PARAMETER Experiment Name: At_0.001%_MeJA__cDNA_P Parameter: Treatment Value: 0.001% MeJA vs. No Treatment
  misc_feature: MA Experiment ID: 108573 Result: Up-regulated in Transcription
  misc_feature: MA Experiment 108573 PARAMETER Experiment Name: At_Drought_cDNA_P Parameter: Timepoint (hr) Value: 6
  misc_feature: MA Experiment 108573 PARAMETER Experiment Name: At_Drought_cDNA_P Parameter: Tissue Value: Aerial
  misc_feature: MA Experiment 108573 PARAMETER Experiment Name: At_Drought_cDNA_P Parameter: Treatment Value: Drought vs. No Drought
  misc_feature: MA Experiment ID: 20000071 Result: Up-regulated in Transcription
  misc_feature: MA Experiment 20000071 PARAMETER Experiment Name: At_100uM_ABA_Mutants_cDNA_P Parameter: Plant Line Value: CS8104
  misc_feature: MA Experiment 20000071 PARAMETER Experiment Name: At_100uM_ABA_Mutants_cDNA_P Parameter: Timepoint (hr) Value: 6
  misc_feature: MA Experiment 20000071 PARAMETER Experiment Name: At_100uM_ABA_Mutants_cDNA_P Parameter: Tissue Value: Aerial
  misc_feature: MA Experiment 20000071 PARAMETER Experiment Name: At_100uM_ABA_Mutants_cDNA_P Parameter: Treatment Value: 100uM ABA vs. No Treatment
  misc_feature: MA Experiment ID: 20000086 Result: Up-regulated in Transcription
  misc_feature: MA Experiment 20000086 PARAMETER Experiment Name: At_100uM_ABA_Mutants_cDNA_P Parameter: Plant Line Value: CS22
  misc_feature: MA Experiment 20000086 PARAMETER Experiment Name: At_100uM_ABA_Mutants_cDNA_P Parameter: Timepoint (hr) Value: 6
  misc_feature: MA Experiment 20000086 PARAMETER Experiment Name: At_100uM_ABA_Mutants_cDNA_P Parameter: Tissue Value: Aerial
  misc_feature: MA Experiment 20000086 PARAMETER Experiment Name: At_100uM_ABA_Mutants_cDNA_P Parameter: Treatment Value: 100uM ABA vs. No Treatment
  misc_feature: MA Experiment ID: 20000171 Result: Down-regulated in Transcription
  misc_feature: MA Experiment 20000171 PARAMETER Experiment Name: At_42deg_Heat_P Parameter: Age (day) Value: 14
  misc_feature: MA Experiment 20000171 PARAMETER Experiment Name: At_42deg_Heat_P Parameter: Organism Value: A. thaliana
  misc_feature: MA Experiment 20000171 PARAMETER Experiment Name: At_42deg_Heat_P Parameter: Plant Line Value: WS
  misc_feature: MA Experiment 20000171 PARAMETER Experiment Name: At_42deg_Heat_P Parameter: Temperature (deg C) Value: 42 vs. 22
  misc_feature: MA Experiment 20000171 PARAMETER Experiment Name: At_42deg_Heat_P Parameter: Timepoint (hr) Value: 1
  misc_feature: MA Experiment 20000171 PARAMETER Experiment Name: At_42deg_Heat_P Parameter: Tissue Value: Aerial
  misc_feature: MA Experiment ID: 20000234 Result: Down-regulated in Transcription
  misc_feature: MA Experiment 20000234 PARAMETER Experiment Name: At_Siliques_P Parameter: Age (day) Value: 21
  misc_feature: MA Experiment 20000234 PARAMETER Experiment Name: At_Siliques_P Parameter: Organism Value: A. thaliana
  misc_feature: MA Experiment 20000234 PARAMETER Experiment Name: At_Siliques_P Parameter: Plant Line Value: WS
  misc_feature: MA Experiment 20000234 PARAMETER Experiment Name: At_Siliques_P Parameter: Tissue Value: Less Than 5mm Siliques vs. Whole Plant
  misc_feature: MA Experiment ID: 20000265 Result: Down-regulated in Transcription
  misc_feature: MA Experiment 20000265 PARAMETER Experiment Name: At_Open_Flower_P Parameter: Age (day) Value: 21
  misc_feature: MA Experiment 20000265 PARAMETER Experiment Name: At_Open_Flower_P Parameter: Plant Line Value: WS
  misc_feature: MA Experiment 20000265 PARAMETER Experiment Name: At_Open_Flower_P Parameter: Tissue Value: Closed Flower vs. Whole Plant
  misc_feature: MA Experiment ID: 20000794 Result: Up-regulated in Transcription
  misc_feature: MA Experiment 20000794 PARAMETER Experiment Name: At_Petals_P Parameter: Age (day) Value: 23-25 days
  misc_feature: MA Experiment 20000794 PARAMETER Experiment Name: At_Petals_P Parameter: Plant Line Value: WS
  misc_feature: MA Experiment 20000794 PARAMETER Experiment Name: At_Petals_P Parameter: Tissue Value: Petals vs. Whole plant

SEQ ID NO: 47635 - protein, 522 aa, Arabidopsis thaliana; identical to SEQ ID NO: 28195
  peptide (1)..(522): Ceres Seq. ID no. 12680414
  misc_feature (46)..(372): Pfam Name: Eukaryotic aspartyl protease Pfam Description: Eukaryotic aspartyl protease
  misc_feature (46)..(372): Pfam Name: Eukaryotic aspartyl protease Pfam Description: Eukaryotic aspartyl protease
  misc_feature (24)..(522): Homolog of NCBI NO: 7435837 NR Description: aspartic proteinase (EC 3.4.23.-) - cowpea
  misc_feature (24)..(522): Homolog of NCBI NO: 20800441 NR Description: aspartic proteinase [Vigna unguiculata]
  misc_feature (28)..(522): Homolog of NCBI NO: 2811025 NR Description: Aspartic proteinase precursor
  misc_feature (22)..(522): Homolog of NCBI NO: 21616053 NR Description: aspartic proteinase [Theobroma cacao]
  misc_feature (24)..(522): Homolog of NCBI NO: 7435837 NR Description: aspartic proteinase (EC 3.4.23.-) - cowpea
  misc_feature (28)..(522): Homolog of NCBI NO: 2811025 NR Description: Aspartic proteinase precursor
  misc_feature (17)..(521): Homolog of NCBI NO: 22330379 NR Description: aspartic protease, putative
  misc_feature (39)..(522): Homolog of NCBI NO: 1354272 NR Description: aspartic proteinase [Arabidopsis thaliana]
  misc_feature (17)..(522): Homolog of NCBI NO: 15221141 NR Description: putative aspartic proteinase
  misc_feature (17)..(522): Homolog of NCBI NO: 7435838 NR Description: probable aspartic proteinase (EC 3.4.23.-) 1 -
  misc_feature (22)..(522): Homolog of NCBI NO: 21616053 NR Description: aspartic proteinase [Theobroma cacao]
  misc_feature (24)..(522): Homolog of NCBI NO: 20800441 NR Description: aspartic proteinase [Vigna unguiculata]
  misc_feature (17)..(521): Homolog of NCBI NO: 22330379 NR Description: aspartic protease, putative
  misc_feature (17)..(522): Homolog of NCBI NO: 7435838 NR Description: probable aspartic proteinase (EC 3.4.23.-) 1 -
  misc_feature (39)..(522): Homolog of NCBI NO: 1354272 NR Description: aspartic proteinase [Arabidopsis thaliana]
  misc_feature (17)..(522): Homolog of NCBI NO: 15221141 NR Description: putative aspartic proteinase

SEQ ID NO: 47636 - protein, 506 aa, Arabidopsis thaliana; identical to SEQ ID NO: 28196
  peptide (1)..(506): Ceres Seq. ID no. 12680415
  misc_feature (30)..(356): Pfam Name: Eukaryotic aspartyl protease Pfam Description: Eukaryotic aspartyl protease
  misc_feature (30)..(356): Pfam Name: Eukaryotic aspartyl protease Pfam Description: Eukaryotic aspartyl protease
  misc_feature (8)..(506): Homolog of NCBI NO: 7435837 NR Description: aspartic proteinase (EC 3.4.23.-) - cowpea
  misc_feature (8)..(506): Homolog of NCBI NO: 20800441 NR Description: aspartic proteinase [Vigna unguiculata]
  misc_feature (12)..(506): Homolog of NCBI NO: 2811025 NR Description: Aspartic proteinase precursor
  misc_feature (6)..(506): Homolog of NCBI NO: 21616053 NR Description: aspartic proteinase [Theobroma cacao]
  misc_feature (8)..(506): Homolog of NCBI NO: 7435837 NR Description: aspartic proteinase (EC 3.4.23.-) - cowpea
  misc_feature (12)..(506): Homolog of NCBI NO: 2811025 NR Description: Aspartic proteinase precursor
  misc_feature (1)..(505): Homolog of NCBI NO: 22330379 NR Description: aspartic protease, putative
  misc_feature (23)..(506): Homolog of NCBI NO: 1354272 NR Description: aspartic proteinase [Arabidopsis thaliana]
  misc_feature (1)..(506): Homolog of NCBI NO: 15221141 NR Description: putative aspartic proteinase
  misc_feature (1)..(506): Homolog of NCBI NO: 7435838 NR Description: probable aspartic proteinase (EC 3.4.23.-) 1 -
  misc_feature (6)..(506): Homolog of NCBI NO: 21616053 NR Description: aspartic proteinase [Theobroma cacao]
  misc_feature (8)..(506): Homolog of NCBI NO: 20800441 NR Description: aspartic proteinase [Vigna unguiculata]
  misc_feature (1)..(505): Homolog of NCBI NO: 22330379 NR Description: aspartic protease, putative
  misc_feature (1)..(506): Homolog of NCBI NO: 7435838 NR Description: probable aspartic proteinase (EC 3.4.23.-) 1 -
  misc_feature (23)..(506): Homolog of NCBI NO: 1354272 NR Description: aspartic proteinase [Arabidopsis thaliana]
  misc_feature (1)..(506): Homolog of NCBI NO: 15221141 NR Description: putative aspartic proteinase

SEQ ID NO: 47637 - protein, 298 aa, Arabidopsis thaliana; identical to SEQ ID NO: 28197
  peptide (1)..(298): Ceres Seq. ID no. 12680416
  misc_feature (1)..(148): Pfam Name: Eukaryotic aspartyl protease Pfam Description: Eukaryotic aspartyl protease
  misc_feature (1)..(148): Pfam Name: Eukaryotic aspartyl protease Pfam Description: Eukaryotic aspartyl protease
  misc_feature (1)..(298): Homolog of NCBI NO: 7435837 NR Description: aspartic proteinase (EC 3.4.23.-) - cowpea
  misc_feature (1)..(298): Homolog of NCBI NO: 20800441 NR Description: aspartic proteinase [Vigna unguiculata]
  misc_feature (1)..(298): Homolog of NCBI NO: 2811025 NR Description: Aspartic proteinase precursor
  misc_feature (1)..(298): Homolog of NCBI NO: 21616053 NR Description: aspartic proteinase [Theobroma cacao]
  misc_feature (1)..(298): Homolog of NCBI NO: 7435837 NR Description: aspartic proteinase (EC 3.4.23.-) - cowpea
  misc_feature (1)..(298): Homolog of NCBI NO: 2811025 NR Description: Aspartic proteinase precursor
  misc_feature (1)..(297): Homolog of NCBI NO: 22330379 NR Description: aspartic protease, putative
  misc_feature (1)..(298): Homolog of NCBI NO: 1354272 NR Description: aspartic proteinase [Arabidopsis thaliana]
  misc_feature (1)..(298): Homolog of NCBI NO: 15221141 NR Description: putative aspartic proteinase
  misc_feature (1)..(298): Homolog of NCBI NO: 7435838 NR Description: probable aspartic proteinase (EC 3.4.23.-) 1 -
  misc_feature (1)..(298): Homolog of NCBI NO: 21616053 NR Description: aspartic proteinase [Theobroma cacao]
  misc_feature (1)..(298): Homolog of NCBI NO: 20800441 NR Description: aspartic proteinase [Vigna unguiculata]
  misc_feature (1)..(297): Homolog of NCBI NO: 22330379 NR Description: aspartic protease, putative
  misc_feature (1)..(298): Homolog of NCBI NO: 7435838 NR Description: probable aspartic proteinase (EC 3.4.23.-) 1 -
  misc_feature (1)..(298): Homolog of NCBI NO: 1354272 NR Description: aspartic proteinase [Arabidopsis thaliana]
  misc_feature (1)..(298): Homolog of NCBI NO: 15221141 NR Description: putative aspartic proteinase

SEQ ID NO: 47638 - DNA, 1537 bp, Arabidopsis thaliana
  misc_feature (1)..(1537): Ceres Seq. ID no. 13647286
  misc_feature: MA Experiment ID: 20000180 Result: Down-regulated in Transcription
  misc_feature: MA Experiment 20000180 PARAMETER Experiment Name: At_Germinating_Seeds_P Parameter: Age (hr) Value: 24 vs. 0
  misc_feature: MA Experiment 20000180 PARAMETER Experiment Name: At_Germinating_Seeds_P Parameter: Tissue Value: Germinating Seeds
  misc_feature: MA Experiment ID: 20000496 Result: Up-regulated in Transcription
  misc_feature: MA Experiment 20000496 PARAMETER Experiment Name: At_Guard_Cells_P Parameter: Harvest Date Value: 7/19/2002
  misc_feature: MA Experiment 20000496 PARAMETER Experiment Name: At_Guard_Cells_P Parameter: Organism Value: Canola
  misc_feature: MA Experiment 20000496 PARAMETER Experiment Name: At_Guard_Cells_P Parameter: Tissue Value: Guard Cells vs. Leaves
  misc_feature: MA Experiment ID: 20000794 Result: Down-regulated in Transcription
  misc_feature: MA Experiment 20000794 PARAMETER Experiment Name: At_Petals_P Parameter: Age (day) Value: 23-25 days
  misc_feature: MA Experiment 20000794 PARAMETER Experiment Name: At_Petals_P Parameter: Plant Line Value: WS
  misc_feature: MA Experiment 20000794 PARAMETER Experiment Name: At_Petals_P Parameter: Tissue Value: Petals vs. Whole plant
attcacacacacacactcacacaaaaaccaaaaactaattttcacgaaatccgaagcttaaaaattattcctctactgtttcaatttcatctcttcttcctcttgagttggcaatttctagggttttctcattttcctttttttccatttctggaaactggtaaaaggctttttctttgtctgtgggggagaaacaaaaatggagacagacgaagcataccaaaagaaagagcgagctgcattagtagccatcgttgtccttgcttgtcttgctttatcttctttgttcgtcgcctttagctactactgctatattcgtaacaaggtttctaagcgtcacagaattagcaagaggtttgattgtgaggaaaaaggcgattgtcagaaagtacaagatgttactgacaatgggttgcaaattttcacctttaagcaattgcattcagcaactggtggatttagcaagtctaatgtggttgggaatggtgggtttggcttggtttatcgtggtgtgcttaacgatggcagaaaagttgctatcaagctcatggatcatgcaggaaagcaaggggaagaagaattcaagatggaggttgagttactgagccgtctgcgttcaccatacttgttggcacttcttggttattgctcagacaatagtcataagctgcttgtgtatgagttcatggcaaatggtggtctgcaggaacacctgtatcttcccaacaggtctggttctgtcccaccaagattagattgggaaactaggatgagaatagctgtggaagctgcaaaaggcttggaatatctccatgaacaagtatcacccccggtgattcatagagactttaagagcagcaatattctgctggacagaaacttcaatgccaaagtttcagattttggattggctaaagtcggatcagataaagctggtggacacgtttctacccgtgtattaggcacacaaggatatgtagctcctgagtacgctttaactggtcacttgacaacaaagtcggatgtctatagctacggtgttgtcctgttagagttactaaccggtagagttccagtagatatgaagagagctacaggagaaggtgttcttgtctcttgggctttgcctcaattggctgatagagacaaagtagtagacataatggatccaacactcgaaggacaatactctacgaaagaagttgttcaagttgcagcaatagcagcaatgtgtgttcaagcagaagctgactacagacccttaatggcagatgtggtgcagtcactggttccattagtgagaaaccgtaggtcagcttcaaagcttagtggctgctctagtagctttagcttggctcggtctcctaactctccgggtaaagcaagcataggttctcaatgaataaatcaatcagagaagacgaaatgtgaggcttttattatgtaacggtatttactaaaacagacaatgatgtaaacacttgagtgatcaaacatggagtcatagagataatcatcaaataaactttttcgaacc

SEQ ID NO: 47639 - protein, 400 aa, Arabidopsis thaliana
  peptide (1)..(400): Ceres Seq. ID no. 13647287
  misc_feature (87)..(292): Pfam Name: Protein kinase domain Pfam Description: Protein kinase domain
  misc_feature (10)..(369): Homolog of NCBI NO: 34902828 NR Description: unnamed protein product [Oryza sativa (japonica
  misc_feature (48)..(363): Homolog of NCBI NO: 30696629 NR Description: protein kinase, putative [Arabidopsis thaliana]
  misc_feature (73)..(363): Homolog of NCBI NO: 30679031 NR Description: protein kinase family [Arabidopsis thaliana]
  misc_feature (73)..(363): Homolog of NCBI NO: 7488203 NR Description: probable serine/threonine-specific protein kinase
  misc_feature (71)..(368): Homolog of NCBI NO: 25405773 NR Description: hypothetical protein T22H22.21 [imported] -
  misc_feature (71)..(368): Homolog of NCBI NO: 15221910 NR Description: protein kinase family [Arabidopsis thaliana]
  misc_feature (71)..(368): Homolog of NCBI NO: 12322155 NR Description: protein kinase, putative [Arabidopsis thaliana]
  misc_feature (130)..(400): Homolog of NCBI NO: 26449989 NR Description: putative serine/threonine-specific protein kinase
  misc_feature (130)..(400): Homolog of NCBI NO: 30694859 NR Description: protein kinase family [Arabidopsis thaliana]
  misc_feature (1)..(400): Homolog of NCBI NO: 11358842 NR Description: serine/threonine-specific protein kinase-like
METDEAYQKKERAALVAIVVLACLALSSLFVAFSYYCYIRNKVSKRHRISKRFDCEEKGDCQKVQDVTDNGLQIFTFKQLHSATGGFSKSNVVGNGGFGLVYRGVLNDGRKVAIKLMDHAGKQGEEEFKMEVELLSRLRSPYLLALLGYCSDNSHKLLVYEFMANGGLQEHLYLPNRSGSVPPRLDWETRMRIAVEAAKGLEYLHEQVSPPVIHRDFKSSNILLDRNFNAKVSDFGLAKVGSDKAGGHVSTRVLGTQGYVAPEYALTGHLTTKSDVYSYGVVLLELLTGRVPVDMKRATGEGVLVSWALPQLADRDKVVDIMDPTLEGQYSTKEVVQVAAIAAMCVQAEADYRPLMADVVQSLVPLVRNRRSASKLSGCSSSFSLARSPNSPGKASIGSQ

SEQ ID NO: 47640 - protein, 284 aa, Arabidopsis thaliana
  peptide (1)..(284): Ceres Seq. ID no. 13647288
  misc_feature (1)..(176): Pfam Name: Protein kinase domain Pfam Description: Protein kinase domain
  misc_feature (1)..(253): Homolog of NCBI NO: 34902828 NR Description: unnamed protein product [Oryza sativa (japonica
  misc_feature (1)..(247): Homolog of NCBI NO: 30696629 NR Description: protein kinase, putative [Arabidopsis thaliana]
  misc_feature (1)..(247): Homolog of NCBI NO: 30679031 NR Description: protein kinase family [Arabidopsis thaliana]
  misc_feature (1)..(247): Homolog of NCBI NO: 7488203 NR Description: probable serine/threonine-specific protein kinase
  misc_feature (1)..(252): Homolog of NCBI NO: 15221910 NR Description: protein kinase family [Arabidopsis thaliana]
  misc_feature (1)..(252): Homolog of NCBI NO: 25405773 NR Description: hypothetical protein T22H22.21 [imported] -
  misc_feature (1)..(252): Homolog of NCBI NO: 12322155 NR Description: protein kinase, putative [Arabidopsis thaliana]
  misc_feature (14)..(284): Homolog of NCBI NO: 26449989 NR Description: putative serine/threonine-specific protein kinase
  misc_feature (14)..(284): Homolog of NCBI NO: 30694859 NR Description: protein kinase family [Arabidopsis thaliana]
  misc_feature (1)..(284): Homolog of NCBI NO: 11358842 NR Description: serine/threonine-specific protein kinase-like
MDHAGKQGEEEFKMEVELLSRLRSPYLLALLGYCSDNSHKLLVYEFMANGGLQEHLYLPNRSGSVPPRLDWETRMRIAVEAAKGLEYLHEQVSPPVIHRDFKSSNILLDRNFNAKVSDFGLAKVGSDKAGGHVSTRVLGTQGYVAPEYALTGHLTTKSDVYSYGVVLLELLTGRVPVDMKRATGEGVLVSWALPQLADRDKVVDIMDPTLEGQYSTKEVVQVAAIAAMCVQAEADYRPLMADVVQSLVPLVRNRRSASKLSGCSSSFSLARSPNSPGKASIGSQ

SEQ ID NO: 47641 - protein, 271 aa, Arabidopsis thaliana
  peptide (1)..(271): Ceres Seq. ID no. 13647289
  misc_feature (1)..(163): Pfam Name: Protein kinase domain Pfam Description: Protein kinase domain
  misc_feature (1)..(240): Homolog of NCBI NO: 34902828 NR Description: unnamed protein product [Oryza sativa (japonica
  misc_feature (1)..(234): Homolog of NCBI NO: 30696629 NR Description: protein kinase, putative [Arabidopsis thaliana]
  misc_feature (1)..(234): Homolog of NCBI NO: 30679031 NR Description: protein kinase family [Arabidopsis thaliana]
  misc_feature (1)..(234): Homolog of NCBI NO: 7488203 NR Description: probable serine/threonine-specific protein kinase
  misc_feature (1)..(239): Homolog of NCBI NO: 15221910 NR Description: protein kinase family [Arabidopsis thaliana]
  misc_feature (1)..(239): Homolog of NCBI NO: 25405773 NR Description: hypothetical protein T22H22.21 [imported] -
  misc_feature (1)..(239): Homolog of NCBI NO: 12322155 NR Description: protein kinase, putative [Arabidopsis thaliana]
  misc_feature (1)..(271): Homolog of NCBI NO: 26449989 NR Description: putative serine/threonine-specific protein kinase
  misc_feature (1)..(271): Homolog of NCBI NO: 30694859 NR Description: protein kinase family [Arabidopsis thaliana]
  misc_feature (1)..(271): Homolog of NCBI NO: 11358842 NR Description: serine/threonine-specific protein kinase-like
MEVELLSRLRSPYLLALLGYCSDNSHKLLVYEFMANGGLQEHLYLPNRSGSVPPRLDWETRMRIAVEAAKGLEYLHEQVSPPVIHRDFKSSNILLDRNFNAKVSDFGLAKVGSDKAGGHVSTRVLGTQGYVAPEYALTGHLTTKSDVYSYGVVLLELLTGRVPVDMKRATGEGVLVSWALPQLADRDKVVDIMDPTLEGQYSTKEVVQVAAIAAMCVQAEADYRPLMADVVQSLVPLVRNRRSASKLSGCSSSFSLARSPNSPGKASIGSQ

SEQ ID NO: 47642 - DNA, 782 bp, Arabidopsis thaliana
  misc_feature (1)..(782): Ceres Seq. ID no. 12672750
  misc_feature: MA Experiment ID: 20000171 Result: Down-regulated in Transcription
  misc_feature: MA Experiment 20000171 PARAMETER Experiment Name: At_42deg_Heat_P Parameter: Age (day) Value: 14
  misc_feature: MA Experiment 20000171 PARAMETER Experiment Name: At_42deg_Heat_P Parameter: Organism Value: A. thaliana
  misc_feature: MA Experiment 20000171 PARAMETER Experiment Name: At_42deg_Heat_P Parameter: Plant Line Value: WS
  misc_feature: MA Experiment 20000171 PARAMETER Experiment Name: At_42deg_Heat_P Parameter: Temperature (deg C) Value: 42 vs. 22
  misc_feature: MA Experiment 20000171 PARAMETER Experiment Name: At_42deg_Heat_P Parameter: Timepoint (hr) Value: 1
  misc_feature: MA Experiment 20000171 PARAMETER Experiment Name: At_42deg_Heat_P Parameter: Tissue Value: Aerial
  misc_feature: MA Experiment ID: 20000173 Result: Down-regulated in Transcription
  misc_feature: MA Experiment 20000173 PARAMETER Experiment Name: At_42deg_Heat_P Parameter: Age (day) Value: 14
  misc_feature: MA Experiment 20000173 PARAMETER Experiment Name: At_42deg_Heat_P Parameter: Organism Value: A. thaliana
  misc_feature: MA Experiment 20000173 PARAMETER Experiment Name: At_42deg_Heat_P Parameter: Plant Line Value: WS
  misc_feature: MA Experiment 20000173 PARAMETER Experiment Name: At_42deg_Heat_P Parameter: Temperature (deg C) Value: 42 vs. 22
  misc_feature: MA Experiment 20000173 PARAMETER Experiment Name: At_42deg_Heat_P Parameter: Timepoint (hr) Value: 6
  misc_feature: MA Experiment 20000173 PARAMETER Experiment Name: At_42deg_Heat_P Parameter: Tissue Value: Aerial
  misc_feature: MA Experiment ID: 20000179 Result: Down-regulated in Transcription
  misc_feature: MA Experiment 20000179 PARAMETER Experiment Name: At_Germinating_Seeds_P Parameter: Age (hr) Value: 6 vs. 0
  misc_feature: MA Experiment 20000179 PARAMETER Experiment Name: At_Germinating_Seeds_P Parameter: Tissue Value: Germinating Seeds
  misc_feature: MA Experiment ID: 20000180 Result: Down-regulated in Transcription
  misc_feature: MA Experiment 20000180 PARAMETER Experiment Name: At_Germinating_Seeds_P Parameter: Age (hr) Value: 24 vs. 0
  misc_feature: MA Experiment 20000180 PARAMETER Experiment Name: At_Germinating_Seeds_P Parameter: Tissue Value: Germinating Seeds
  misc_feature: MA Experiment ID: 20000184 Result: Up-regulated in Transcription
  misc_feature: MA Experiment 20000184 PARAMETER Experiment Name: At_Shoots__P Parameter: Age (day) Value: 7
  misc_feature: MA Experiment 20000184 PARAMETER Experiment Name: At_Shoots__P Parameter: Tissue Value: Shoots vs. Whole Plant
  misc_feature: MA Experiment ID: 20000185 Result: Up-regulated in Transcription
  misc_feature: MA Experiment 20000185 PARAMETER Experiment Name: At_Roots__P Parameter: Age (day) Value: 7 vs. 21
  misc_feature: MA Experiment 20000185 PARAMETER Experiment Name: At_Roots__P Parameter: Organism Value: A. thaliana
  misc_feature: MA Experiment 20000185 PARAMETER Experiment Name: At_Roots__P Parameter: Tissue Value: Roots vs. Whole Plant
  misc_feature: MA Experiment ID: 20000214 Result: Down-regulated in Transcription
  misc_feature: MA Experiment 20000214 PARAMETER Experiment Name: At_4deg_Cold_P Parameter: Timepoint (hr) Value: 6
  misc_feature: MA Experiment ID: 20000227 Result: Up-regulated in Transcription
  misc_feature: MA Experiment 20000227 PARAMETER Experiment Name: At_Root-Tips-vs-Tops_P Parameter: Tissue Value: Root Tips vs. Root Tops
  misc_feature: MA Experiment ID: 20000436 Result: Down-regulated in Transcription
  misc_feature: MA Experiment 20000436 PARAMETER Experiment Name: At_Drought_P Parameter: Age (day) Value: 7
  misc_feature: MA Experiment 20000436 PARAMETER Experiment Name: At_Drought_P Parameter: Organism Value: A. thaliana
  misc_feature: MA Experiment 20000436 PARAMETER Experiment Name: At_Drought_P Parameter: Plant Line Value: WS
  misc_feature: MA Experiment 20000436 PARAMETER Experiment Name: At_Drought_P Parameter: Timepoint (hr) Value: 12
  misc_feature: MA Experiment 20000436 PARAMETER Experiment Name: At_Drought_P Parameter: Tissue Value: Whole Plant
  misc_feature: MA Experiment 20000436 PARAMETER Experiment Name: At_Drought_P Parameter: Treatment Value: Drought vs. No Drought
  misc_feature: MA Experiment ID: 20000437 Result: Down-regulated in Transcription
  misc_feature: MA Experiment 20000437 PARAMETER Experiment Name: At_Drought_P Parameter: Age (day) Value: 8
  misc_feature: MA Experiment 20000437 PARAMETER Experiment Name: At_Drought_P Parameter: Organism Value: A. thaliana
  misc_feature: MA Experiment 20000437 PARAMETER Experiment Name: At_Drought_P Parameter: Plant Line Value: WS
  misc_feature: MA Experiment 20000437 PARAMETER Experiment Name: At_Drought_P Parameter: Timepoint (hr) Value: 24
  misc_feature: MA Experiment 20000437 PARAMETER Experiment Name: At_Drought_P Parameter: Tissue Value: Whole Plant
  misc_feature: MA Experiment 20000437 PARAMETER Experiment Name: At_Drought_P Parameter: Treatment Value: Drought vs. No Drought
  misc_feature: MA Experiment ID: 20000438 Result: Up-regulated in Transcription
  misc_feature: MA Experiment 20000438 PARAMETER Experiment Name: At_Shoots__P Parameter: Age (day) Value: 14
  misc_feature: MA Experiment 20000438 PARAMETER Experiment Name: At_Shoots__P Parameter: Tissue Value: Shoots vs. Whole Plant
  misc_feature: MA Experiment ID: 20000794 Result: Down-regulated in Transcription
  misc_feature: MA Experiment 20000794 PARAMETER Experiment Name: At_Petals_P Parameter: Age (day) Value: 23-25 days
  misc_feature: MA Experiment 20000794 PARAMETER Experiment Name: At_Petals_P Parameter: Plant Line Value: WS
  misc_feature: MA Experiment 20000794 PARAMETER Experiment Name: At_Petals_P Parameter: Tissue Value: Petals vs. Whole plant
  misc_feature: MA Experiment ID: 20001247 Result: Up-regulated in Transcription
  misc_feature: MA Experiment 20001247 PARAMETER Experiment Name: At_Far-red-induction_P Parameter: Age (day) Value: 7
  misc_feature: MA Experiment 20001247 PARAMETER Experiment Name: At_Far-red-induction_P Parameter: Light Value: Far-red vs. White
  misc_feature: MA Experiment 20001247 PARAMETER Experiment Name: At_Far-red-induction_P Parameter: Organism Value: A. thaliana
  misc_feature: MA Experiment 20001247 PARAMETER Experiment Name: At_Far-red-induction_P Parameter: Plant Line Value: Columbia
  misc_feature: MA Experiment 20001247 PARAMETER Experiment Name: At_Far-red-induction_P Parameter: Timepoint (hr) Value: 1
  misc_feature: MA Experiment 20001247 PARAMETER Experiment Name: At_Far-red-induction_P Parameter: Tissue Value: Whole Plant
  misc_feature: MA Experiment ID: 20001248 Result: Up-regulated in Transcription
  misc_feature: MA Experiment 20001248 PARAMETER Experiment Name: At_Far-red-induction_P Parameter: Age (day) Value: 7
  misc_feature: MA Experiment 20001248 PARAMETER Experiment Name: At_Far-red-induction_P Parameter: Light Value: Far-red vs. White
  misc_feature: MA Experiment 20001248 PARAMETER Experiment Name: At_Far-red-induction_P Parameter: Organism Value: A. thaliana
  misc_feature: MA Experiment 20001248 PARAMETER Experiment Name: At_Far-red-induction_P Parameter: Plant Line Value: Columbia
  misc_feature: MA Experiment 20001248 PARAMETER Experiment Name: At_Far-red-induction_P Parameter: Timepoint (hr) Value: 4
  misc_feature: MA Experiment 20001248 PARAMETER Experiment Name: At_Far-red-induction_P Parameter: Tissue Value: Whole Plant
  misc_feature: MA Experiment ID: 20001450 Result: Up-regulated in Transcription
  misc_feature: MA Experiment 20001450 PARAMETER Experiment Name: At_Far-red-induction_P Parameter: Age (day) Value: 7
  misc_feature: MA Experiment 20001450 PARAMETER Experiment Name: At_Far-red-induction_P Parameter: Light Value: Far-red vs. White
  misc_feature: MA Experiment 20001450 PARAMETER Experiment Name: At_Far-red-induction_P Parameter: Organism Value: A. thaliana
  misc_feature: MA Experiment 20001450 PARAMETER Experiment Name: At_Far-red-induction_P Parameter: Plant Line Value: Columbia
  misc_feature: MA Experiment 20001450 PARAMETER Experiment Name: At_Far-red-induction_P Parameter: Timepoint (hr) Value: 8
  misc_feature: MA Experiment 20001450 PARAMETER Experiment Name: At_Far-red-induction_P Parameter: Tissue Value: Whole Plant
  misc_feature: MA Experiment ID: 20001451 Result: Up-regulated in Transcription
  misc_feature: MA Experiment 20001451 PARAMETER Experiment Name: At_Far-red-induction_P Parameter: Age (day) Value: 7
  misc_feature: MA Experiment 20001451 PARAMETER Experiment Name: At_Far-red-induction_P Parameter: Light Value: Far-red vs. White
  misc_feature: MA Experiment 20001451 PARAMETER Experiment Name: At_Far-red-induction_P Parameter: Organism Value: A. thaliana
  misc_feature: MA Experiment 20001451 PARAMETER Experiment Name: At_Far-red-induction_P Parameter: Plant Line Value: Columbia
  misc_feature: MA Experiment 20001451 PARAMETER Experiment Name: At_Far-red-induction_P Parameter: Timepoint (hr) Value: 24
  misc_feature: MA Experiment 20001451 PARAMETER Experiment Name: At_Far-red-induction_P Parameter: Tissue Value: Whole Plant
  misc_feature: MA Experiment ID: 20001555 Result: Down-regulated in Transcription
  misc_feature: MA Experiment 20001555 PARAMETER Experiment Name: At_Drought_Soil_Dry_P Parameter: Age (day) Value: 24
  misc_feature: MA Experiment 20001555 PARAMETER Experiment Name: At_Drought_Soil_Dry_P Parameter: Organism Value: A. thaliana
  misc_feature: MA Experiment 20001555 PARAMETER Experiment Name: At_Drought_Soil_Dry_P Parameter: Plant Line Value: WS
  misc_feature: MA Experiment 20001555 PARAMETER Experiment Name: At_Drought_Soil_Dry_P Parameter: Post Timepoint (hr) Value: None
  misc_feature: MA Experiment 20001555 PARAMETER Experiment Name: At_Drought_Soil_Dry_P Parameter: Post-Treatment Value: None
  misc_feature: MA Experiment 20001555 PARAMETER Experiment Name: At_Drought_Soil_Dry_P Parameter: Timepoint (day) Value: 10
  misc_feature: MA Experiment 20001555 PARAMETER Experiment Name: At_Drought_Soil_Dry_P Parameter: Treatment Value: Drought vs. No Drought
  misc_feature: MA Experiment ID: 20001560 Result: Up-regulated in Transcription
  misc_feature: MA Experiment 20001560 PARAMETER Experiment Name: At_Drought_Soil_Dry_P Parameter: Age (day) Value: 28
  misc_feature: MA Experiment 20001560 PARAMETER Experiment Name: At_Drought_Soil_Dry_P Parameter: Organism Value: A. thaliana
  misc_feature: MA Experiment 20001560 PARAMETER Experiment Name: At_Drought_Soil_Dry_P Parameter: Plant Line Value: WS
  misc_feature: MA Experiment 20001560 PARAMETER Experiment Name: At_Drought_Soil_Dry_P Parameter: Post Timepoint (hr) Value: None
  misc_feature: MA Experiment 20001560 PARAMETER Experiment Name: At_Drought_Soil_Dry_P Parameter: Post-Treatment Value: None
  misc_feature: MA Experiment 20001560 PARAMETER Experiment Name: At_Drought_Soil_Dry_P Parameter: Timepoint (day) Value: 14
  misc_feature: MA Experiment 20001560 PARAMETER Experiment Name: At_Drought_Soil_Dry_P Parameter: Treatment Value: Drought vs. No Drought
  misc_feature: MA Experiment ID: 20001769 Result: Up-regulated in Transcription
  misc_feature: MA Experiment 20001769 PARAMETER Experiment Name: At_Far-red-enriched-adult_P Parameter: Age (day) Value: 28
  misc_feature: MA Experiment 20001769 PARAMETER Experiment Name: At_Far-red-enriched-adult_P Parameter: Light Value: Far-red enriched vs. White
  misc_feature: MA Experiment 20001769 PARAMETER Experiment Name: At_Far-red-enriched-adult_P Parameter: Organism Value: A. thaliana
  misc_feature: MA Experiment 20001769 PARAMETER Experiment Name: At_Far-red-enriched-adult_P Parameter: Plant Line Value: Columbia
  misc_feature: MA Experiment 20001769 PARAMETER Experiment Name: At_Far-red-enriched-adult_P Parameter: Timepoint (hr) Value: 4
  misc_feature: MA Experiment 20001769 PARAMETER Experiment Name: At_Far-red-enriched-adult_P Parameter: Tissue Value: Aerial
  misc_feature: MA Experiment ID: 20001770 Result: Up-regulated in Transcription
  misc_feature: MA Experiment 20001770 PARAMETER Experiment Name: At_Far-red-enriched-adult_P Parameter: Age (day) Value: 28
  misc_feature: MA Experiment 20001770 PARAMETER Experiment Name: At_Far-red-enriched-adult_P Parameter: Light Value: Far-red enriched vs. White
  misc_feature: MA Experiment 20001770 PARAMETER Experiment Name: At_Far-red-enriched-adult_P Parameter: Organism Value: A. thaliana
  misc_feature: MA Experiment 20001770 PARAMETER Experiment Name: At_Far-red-enriched-adult_P Parameter: Plant Line Value: Columbia
  misc_feature: MA Experiment 20001770 PARAMETER Experiment Name: At_Far-red-enriched-adult_P Parameter: Timepoint (hr) Value: 8
  misc_feature: MA Experiment 20001770 PARAMETER Experiment Name: At_Far-red-enriched-adult_P Parameter: Tissue Value: Aerial
atttgtagttgttaaactaaaataacccatttgtgttttaaatctaaaatggctagaaatttcgagctttctttgattctctttgttctgtatctgtccactgcagcaatagtcatggctagaaaccttgaagaggaatcaagtggtgatacagagttcattaaagcctcttgtgagacgacgtcgtacccagaccgatgcttccagtctctgtcttcatatgcaagcgagatcaagaagcagccacgtaagcttgctgagaccgcgcttgccgttagcatagcccgagcaaagtcagccaaaacctatgtatcagagatgactgattataaaggaatcacaaagaggcagcacgaggctgtagcggactgtctagaggagatgggagacactgttgacaggttgagcaattcgctgaaggaactgaagcatctggaggaaggtgacagcggagaagacttttggttctgtctgagcaatgtccggacgtggacaagcgcagcactgacagatgagaccgcgtgtatggatgggtttggagggaaggccatggctggggagctgaaaagtttaatcagaacacacattgtgagtgttgcggaagagacgagcaatgccttggctttgatcaatgactttgcttccaagcattgaaatcatttcaaaggggtttagtctttgggacaagagtttttctcgtattcaacactgcttgtgtttttttttctctctttaaagtttctactttatcttaacttatcatttttcatattatgcataaa

SEQ ID NO: 47643 - protein, 201 aa, Arabidopsis thaliana
  peptide (1)..(201): Ceres Seq. ID no. 12672751
  misc_feature (1)..(201): Homolog of NCBI NO: 15234547 NR Description: putative protein
  misc_feature (1)..(201): Homolog of NCBI NO: 15232790 NR Description: putative protein; protein id: At3g47380.1
  misc_feature (6)..(200): Homolog of NCBI NO: 21618013 NR Description: putative ripening-related protein [Arabidopsis
  misc_feature (6)..(200): Homolog of NCBI NO: 18407657 NR Description: expressed protein
  misc_feature (18)..(201): Homolog of NCBI NO: 7488727 NR Description: 21K protein precursor - alfalfa
  misc_feature (36)..(201): Homolog of NCBI NO: 112717 NR Description: 21 KD PROTEIN PRECURSOR (1.2 PROTEIN)
  misc_feature (1)..(201): Homolog of NCBI NO: 15241799 NR Description: ripening-related protein - like
  misc_feature (1)..(201): Homolog of NCBI NO: 21618088 NR Description: ripening-related protein-like [Arabidopsis
  misc_feature (10)..(201): Homolog of NCBI NO: 7406663 NR Description: putative ripening-related protein [Vitis vinifera]
  misc_feature (1)..(201): Homolog of NCBI NO: 15234982 NR Description: putative protein
MARNFELSLILFVLYLSTAAIVMARNLEEESSGDTEFIKASCETTSYPDRCFQSLSSYASEIKKQPRKLAETALAVSIARAKSAKTYVSEMTDYKGITKRQHEAVADCLEEMGDTVDRLSNSLKELKHLEEGDSGEDFWFCLSNVRTWTSAALTDETACMDGFGGKAMAGELKSLIRTHIVSVAEETSNALALINDFASKH

SEQ ID NO: 47644 - protein, 179 aa, Arabidopsis thaliana
  peptide (1)..(179): Ceres Seq. ID no. 12672752
  misc_feature (1)..(179): Homolog of NCBI NO: 15234547 NR Description: putative protein
  misc_feature (1)..(179): Homolog of NCBI NO: 15232790 NR Description: putative protein; protein id: At3g47380.1
  misc_feature (1)..(178): Homolog of NCBI NO: 21618013 NR Description: putative ripening-related protein [Arabidopsis
  misc_feature (1)..(178): Homolog of NCBI NO: 18407657 NR Description: expressed protein
  misc_feature (1)..(179): Homolog of NCBI NO: 7488727 NR Description: 21K protein precursor - alfalfa
  misc_feature (14)..(179): Homolog of NCBI NO: 112717 NR Description: 21 KD PROTEIN PRECURSOR (1.2 PROTEIN)
  misc_feature (1)..(179): Homolog of NCBI NO: 15241799 NR Description: ripening-related protein - like
  misc_feature (1)..(179): Homolog of NCBI NO: 21618088 NR Description: ripening-related protein-like [Arabidopsis
  misc_feature (1)..(179): Homolog of NCBI NO: 7406663 NR Description: putative ripening-related protein [Vitis vinifera]
  misc_feature (1)..(179): Homolog of NCBI NO: 15234982 NR Description: putative protein
MARNLEEESSGDTEFIKASCETTSYPDRCFQSLSSYASEIKKQPRKLAETALAVSIARAKSAKTYVSEMTDYKGITKRQHEAVADCLEEMGDTVDRLSNSLKELKHLEEGDSGEDFWFCLSNVRTWTSAALTDETACMDGFGGKAMAGELKSLIRTHIVSVAEETSNALALINDFASKH

SEQ ID NO: 47645 - protein, 111 aa, Arabidopsis thaliana
  peptide (1)..(111): Ceres Seq. ID no. 12672753
  misc_feature (1)..(111): Homolog of NCBI NO: 15234547 NR Description: putative protein
  misc_feature (1)..(111): Homolog of NCBI NO: 15232790 NR Description: putative protein; protein id: At3g47380.1
  misc_feature (1)..(110): Homolog of NCBI NO: 21618013 NR Description: putative ripening-related protein [Arabidopsis
  misc_feature (1)..(110): Homolog of NCBI NO: 18407657 NR Description: expressed protein
  misc_feature (1)..(111): Homolog of NCBI NO: 7488727 NR Description: 21K protein precursor - alfalfa
  misc_feature (1)..(111): Homolog of NCBI NO: 112717 NR Description: 21 KD PROTEIN PRECURSOR (1.2 PROTEIN)
  misc_feature (1)..(111): Homolog of NCBI NO: 15241799 NR Description: ripening-related protein - like
  misc_feature (1)..(111): Homolog of NCBI NO: 21618088 NR Description: ripening-related protein-like [Arabidopsis
  misc_feature (1)..(111): Homolog of NCBI NO: 7406663 NR Description: putative ripening-related protein [Vitis vinifera]
  misc_feature (1)..(111): Homolog of NCBI NO: 15234982 NR Description: putative protein
MTDYKGITKRQHEAVADCLEEMGDTVDRLSNSLKELKHLEEGDSGEDFWFCLSNVRTWTSAALTDETACMDGFGGKAMAGELKSLIRTHIVSVAEETSNALALINDFASKH

SEQ ID NO: 47646 - DNA, 776 bp, Arabidopsis thaliana
  misc_feature (1)..(776): Ceres Seq. ID no. 12720774
  misc_feature: MA Experiment ID: 20000438 Result: Up-regulated in Transcription
  misc_feature: MA Experiment 20000438 PARAMETER Experiment Name: At_Shoots__P Parameter: Age (day) Value: 14
  misc_feature: MA Experiment 20000438 PARAMETER Experiment Name: At_Shoots__P Parameter: Tissue Value: Shoots vs. Whole Plant
atggcactgtaccgaccccttctcttgcatcatccaacttctccgtctgtaactacgtttctacgaaattacccctcgaaaccgatcaaattctccagcctgcccttccttcatcgctgccgtaagtctcgggtctcctcctcctccgctcggtgttgttcttccatggaatctcctcctgaaggatacagaagaaatgtcggcgtctgcctcatgaattcttccaaaaagattttcactgcctcgaggttggatattcccagtgcttggcaaatgcctcagggtggaatcgacgaaggtgaagatccaagagttgcagtcatgagagagcttaaagaagagactggagttcactctgctgagattctcgctgaggcacctcactggataacctatgacttccctcctgatgttagggagaagcttaaggtccgatggggatccgattggaagggtcaagcacagaaatggtttcttctgaaatttactgggaaagatgaagaaatcaatcttcttggcgatggtactgagaaacctgagtttggtgaatggtcctggacttctcctgatcaagtcgttgaaaatgcagtggagttcaagaagccagtgtacaaggaagtcatgtcagctttcgcttctcatctccagtagcaaaataaatcgaaaactaaactctctgttttaagtttttcgtaagaaactctgagaataagctcttcttgacatatttgctcttttttgaacaatctttgaatcaaaatacaattcttgttccc

SEQ ID NO: 47647 - protein, 216 aa, Arabidopsis thaliana
  peptide (1)..(216): Ceres Seq. ID no. 12720775
  misc_feature (13)..(210): Pfam Name: NUDIX domain Pfam Description: NUDIX domain
  misc_feature (63)..(211): Homolog of NCBI NO: 23015122 NR Description: hypothetical protein [Magnetospirillum
  misc_feature (63)..(215): Homolog of NCBI NO: 22959957 NR Description: hypothetical protein [Rhodobacter sphaeroides]
  misc_feature (63)..(212): Homolog of NCBI NO: 22967686 NR Description: hypothetical protein [Rhodospirillum rubrum]
  misc_feature (56)..(215): Homolog of NCBI NO: 15220667 NR Description: diadenosine 5,5-P1,P4-tetraphosphate hydrolase,
  misc_feature (23)..(216): Homolog of NCBI NO: 15240003 NR Description: diadenosine 5,5-P1,P4-tetraphosphate
  misc_feature (34)..(216): Homolog of NCBI NO: 7489414 NR Description: probable bis(5'-nucleosyl)-tetraphosphatase
  misc_feature (55)..(215): Homolog of NCBI NO: 14488439 NR Description: Chain A, Solution Structure Of The Nudix Enzyme
  misc_feature (14)..(215): Homolog of NCBI NO: 1888557 NR Description: diadenosine 5',5'''-P1,P4-tetraphosphate
  misc_feature (1)..(216): Homolog of NCBI NO: 8567796 NR Description: diadenosine 5',5'''-P1,P4-tetraphosphate
  misc_feature (1)..(216): Homolog of NCBI NO: 15228345 NR Description: putative diadenosine 5',5'''-P1,P4-tetraphosphate
MALYRPLLLHHPTSPSVTTFLRNYPSKPIKFSSLPFLHRCRKSRVSSSSARCCSSMESPPEGYRRNVGVCLMNSSKKIFTASRLDIPSAWQMPQGGIDEGEDPRVAVMRELKEETGVHSAEILAEAPHWITYDFPPDVREKLKVRWGSDWKGQAQKWFLLKFTGKDEEINLLGDGTEKPEFGEWSWTSPDQVVENAVEFKKPVYKEVMSAFASHLQ

SEQ ID NO: 47648 - protein, 161 aa, Arabidopsis thaliana
  peptide (1)..(161): Ceres Seq. ID no. 12720776
  misc_feature (1)..(155): Pfam Name: NUDIX domain Pfam Description: NUDIX domain
  misc_feature (8)..(156): Homolog of NCBI NO: 23015122 NR Description: hypothetical protein [Magnetospirillum
  misc_feature (8)..(160): Homolog of NCBI NO: 22959957 NR Description: hypothetical protein [Rhodobacter sphaeroides]
  misc_feature (8)..(157): Homolog of NCBI NO: 22967686 NR Description: hypothetical protein [Rhodospirillum rubrum]
  misc_feature (1)..(160): Homolog of NCBI NO: 15220667 NR Description: diadenosine 5,5-P1,P4-tetraphosphate hydrolase,
  misc_feature (1)..(161): Homolog of NCBI NO: 15240003 NR Description: diadenosine 5,5-P1,P4-tetraphosphate
  misc_feature (1)..(161): Homolog of NCBI NO: 7489414 NR Description: probable bis(5'-nucleosyl)-tetraphosphatase
  misc_feature (1)..(160): Homolog of NCBI NO: 14488439 NR Description: Chain A, Solution Structure Of The Nudix Enzyme
  misc_feature (1)..(160): Homolog of NCBI NO: 1888557 NR Description: diadenosine 5',5'''-P1,P4-tetraphosphate
  misc_feature (1)..(161): Homolog of NCBI NO: 8567796 NR Description: diadenosine 5',5'''-P1,P4-tetraphosphate
  misc_feature (1)..(161): Homolog of NCBI NO: 15228345 NR Description: putative diadenosine 5',5'''-P1,P4-tetraphosphate
MESPPEGYRRNVGVCLMNSSKKIFTASRLDIPSAWQMPQGGIDEGEDPRVAVMRELKEETGVHSAEILAEAPHWITYDFPPDVREKLKVRWGSDWKGQAQKWFLLKFTGKDEEINLLGDGTEKPEFGEWSWTSPDQVVENAVEFKKPVYKEVMSAFASHLQ

SEQ ID NO: 47649 - protein, 145 aa, Arabidopsis thaliana
  peptide (1)..(145): Ceres Seq. ID no. 12720777
  misc_feature (1)..(139): Pfam Name: NUDIX domain Pfam Description: NUDIX domain
  misc_feature (1)..(140): Homolog of NCBI NO: 23015122 NR Description: hypothetical protein [Magnetospirillum
  misc_feature (1)..(144): Homolog of NCBI NO: 22959957 NR Description: hypothetical protein [Rhodobacter sphaeroides]
  misc_feature (1)..(141): Homolog of NCBI NO: 22967686 NR Description: hypothetical protein [Rhodospirillum rubrum]
  misc_feature (1)..(144): Homolog of NCBI NO: 15220667 NR Description: diadenosine 5,5-P1,P4-tetraphosphate hydrolase,
  misc_feature (1)..(145): Homolog of NCBI NO: 15240003 NR Description: diadenosine 5,5-P1,P4-tetraphosphate
  misc_feature (1)..(145): Homolog of NCBI NO: 7489414 NR Description: probable bis(5'-nucleosyl)-tetraphosphatase
  misc_feature (1)..(144): Homolog of NCBI NO: 14488439 NR Description: Chain A, Solution Structure Of The Nudix Enzyme
  misc_feature (1)..(144): Homolog of NCBI NO: 1888557 NR Description: diadenosine 5',5'''-P1,P4-tetraphosphate
  misc_feature (1)..(145): Homolog of NCBI NO: 8567796 NR Description: diadenosine 5',5'''-P1,P4-tetraphosphate
  misc_feature (1)..(145): Homolog of NCBI NO: 15228345 NR Description: putative diadenosine 5',5'''-P1,P4-tetraphosphate
MNSSKKIFTASRLDIPSAWQMPQGGIDEGEDPRVAVMRELKEETGVHSAEILAEAPHWITYDFPPDVREKLKVRWGSDWKGQAQKWFLLKFTGKDEEINLLGDGTEKPEFGEWSWTSPDQVVENAVEFKKPVYKEVMSAFASHLQ

SEQ ID NO: 47650 - DNA, 1312 bp, Arabidopsis thaliana
  misc_feature (1)..(1312): Ceres Seq. ID no. 13579070
  misc_feature: MA Experiment ID: 20000265 Result: Up-regulated in Transcription
  misc_feature: MA Experiment 20000265 PARAMETER Experiment Name: At_Open_Flower_P Parameter: Age (day) Value: 21
  misc_feature: MA Experiment 20000265 PARAMETER Experiment Name: At_Open_Flower_P Parameter: Plant Line Value: WS
  misc_feature: MA Experiment 20000265 PARAMETER Experiment Name: At_Open_Flower_P Parameter: Tissue Value: Closed Flower vs. Whole Plant
  misc_feature: MA Experiment ID: 20000286 Result: Up-regulated in Transcription
  misc_feature: MA Experiment 20000286 PARAMETER Experiment Name: At_Open_Flower_P Parameter: Age (day) Value: 21
  misc_feature: MA Experiment 20000286 PARAMETER Experiment Name: At_Open_Flower_P Parameter: Plant Line Value: WS
  misc_feature: MA Experiment 20000286 PARAMETER Experiment Name: At_Open_Flower_P Parameter: Tissue Value: Half Open vs. Whole Plant
  misc_feature: MA Experiment ID: 20000495 Result: Up-regulated in Transcription
  misc_feature: MA Experiment 20000495 PARAMETER Experiment Name: At_Guard_Cells_P Parameter: Harvest Date Value: 8/2/2002
  misc_feature: MA Experiment 20000495 PARAMETER Experiment Name: At_Guard_Cells_P Parameter: Organism Value: A. thaliana
  misc_feature: MA Experiment 20000495 PARAMETER Experiment Name: At_Guard_Cells_P Parameter: Tissue Value: Guard Cells vs. Leaves
  misc_feature: MA Experiment ID: 20001451 Result: Up-regulated in Transcription
  misc_feature: MA Experiment 20001451 PARAMETER Experiment Name: At_Far-red-induction_P Parameter: Age (day) Value: 7
  misc_feature: MA Experiment 20001451 PARAMETER Experiment Name: At_Far-red-induction_P Parameter: Light Value: Far-red vs. White
  misc_feature: MA Experiment 20001451 PARAMETER Experiment Name: At_Far-red-induction_P Parameter: Organism Value: A. thaliana
  misc_feature: MA Experiment 20001451 PARAMETER Experiment Name: At_Far-red-induction_P Parameter: Plant Line Value: Columbia
  misc_feature: MA Experiment 20001451 PARAMETER Experiment Name: At_Far-red-induction_P Parameter: Timepoint (hr) Value: 24
  misc_feature: MA Experiment 20001451 PARAMETER Experiment Name: At_Far-red-induction_P Parameter: Tissue Value: Whole Plant
gcatccaccatctttcttcccaatatctaattgagttttttccttctgcgcttgaaaagaaatgtcgaattctaggatgaatggtgttgagaagctaagcagcaaatccacaaggcgtgtcgcaaatgccggaaaggcaacactgcttgctcttggcaaagccttcccaagccaagtcgttcctcaggagaatctagtggaaggatttctacgagacaccaaatgtgatgacgcgtttatcaaagaaaagctggaacacttgtgcaaaacgacaaccgtgaagacgcgatacactgtgttgacgcgagagatactggctaaataccctgagctaacaacagagggttcaccaacaatcaagcaaagacttgaaattgcaaacgaggcggttgtggaaatggcattggaagccagtttaggttgcatcaaggaatggggaaggccagtggaagacatcactcacattgtctacgtttcctcaagcgagatccgtttacccggtggtgacctttacctctcagcaaagctaggcctgaggaatgacgtgaacagagtgatgctgtattttctgggatgctacggaggtgtgactggcctccgtgtggccaaagacattgctgagaacaaccccggaagccgtgttctgctcacaacctctgaaaccaccattctcggatttcggccaccaaacaaagcgcgtccgtacgacctagttggagctgctctgtttggagatggtgcagctgctgtgatcatcggagctgacccgagagagtgtgaagctcctttcatggagctgcactatgcggttcagcagttcttgccggggacacagaacgtgatcgacgggaggttgactgaggaaggcataaacttcaagcttggacgagacctcccgcagaagatagaggagaacatagaagagttctgcaagaagctgatgggaaaggctggcgatgagtcgatggagttcaatgacatgttctgggctgttcatccaggaggacctgcgattctgaaccgtctggagacaaaactgaagctggagaaagagaagctggagagcagcagaagggcgttggtggattacgggaacgtgagcagcaacacgatactgtatgtgatggagtatatgagagatgagctgaagaagaaaggtgacgcagcacaagagtggggacttggcttagctttcggacctggaatcaccttcgaaggccttctcatccgcagcctcacctcttcctaattgttataatttacatttgggttataaacatattgtaagcatgaaatgagagtattatttgtc

SEQ ID NO: 47651 - protein, 395 aa, Arabidopsis thaliana
  peptide (1)..(395): Ceres Seq. ID no. 13579071
  misc_feature (10)..(236): Pfam Name: Chalcone and stilbene synthases, N-terminal domain Pfam Description: Chalcone and stilbene synthases, N-terminal
  misc_feature (10)..(236): Pfam Name: Chalcone and stilbene synthases, N-terminal domain Pfam Description: Chalcone and stilbene synthases, N-terminal
  misc_feature (12)..(392): Homolog of NCBI NO: 34902722 NR Description: putative chalcone synthase
  misc_feature (13)..(392): Homolog of NCBI NO: 7433785 NR Description: chalcone synthase homolog - rice
  misc_feature (13)..(392): Homolog of NCBI NO: 37535500 NR Description: anther-specific protein YY2
  misc_feature (17)..(392): Homolog of NCBI NO: 7433787 NR Description: anther-specific protein homolog T11I11.90 -
  misc_feature (17)..(392): Homolog of NCBI NO: 18418528 NR Description: chalcone and stilbene synthase family
  misc_feature (12)..(392): Homolog of NCBI NO: 34902722 NR Description: putative chalcone synthase
  misc_feature (13)..(392): Homolog of NCBI NO: 37535500 NR Description: anther-specific protein YY2
  misc_feature (17)..(392): Homolog of NCBI NO: 18418528 NR Description: chalcone and stilbene synthase family
  misc_feature (1)..(395): Homolog of NCBI NO: 15217605 NR Description: chalcone and stilbene synthase family
  misc_feature (18)..(392): Homolog of NCBI NO: 21554288 NR Description: putative chalcone synthase [Arabidopsis thaliana]
  misc_feature (18)..(392): Homolog of NCBI NO: 15236691 NR Description: chalcone and stilbene synthase family
  misc_feature (31)..(392): Homolog of NCBI NO: 7433783 NR Description: anther-specific protein - wood tobacco
  misc_feature (4)..(392): Homolog of NCBI NO: 7433790 NR Description: chalcone synthase homolog ChS1 - Monterey pine
  misc_feature (17)..(392): Homolog of NCBI NO: 7433787 NR Description: anther-specific protein homolog T11I11.90 -
  misc_feature (13)..(392): Homolog of NCBI NO: 7433785 NR Description: chalcone synthase homolog - rice
  misc_feature (4)..(392): Homolog of NCBI NO: 7433790 NR Description: chalcone synthase homolog ChS1 - Monterey pine
  misc_feature (31)..(392): Homolog of NCBI NO: 7433783 NR Description: anther-specific protein - wood tobacco
  misc_feature (18)..(392): Homolog of NCBI NO: 15236691 NR Description: chalcone and stilbene synthase family
  misc_feature (18)..(392): Homolog of NCBI NO: 21554288 NR Description: putative chalcone synthase [Arabidopsis thaliana]
  misc_feature (1)..(395): Homolog of NCBI NO: 15217605 NR Description: chalcone and stilbene synthase family
MSNSRMNGVEKLSSKSTRRVANAGKATLLALGKAFPSQVVPQENLVEGFLRDTKCDDAFIKEKLEHLCKTTTVKTRYTVLTREILAKYPELTTEGSPTIKQRLEIANEAVVEMALEASLGCIKEWGRPVEDITHIVYVSSSEIRLPGGDLYLSAKLGLRNDVNRVMLYFLGCYGGVTGLRVAKDIAENNPGSRVLLTTSETTILGFRPPNKARPYDLVGAALFGDGAAAVIIGADPRECEAPFMELHYAVQQFLPGTQNVIDGRLTEEGINFKLGRDLPQKIEENIEEFCKKLMGKAGDESMEFNDMFWAVHPGGPAILNRLETKLKLEKEKLESSRRALVDYGNVSSNTILYVMEYMRDELKKKGDAAQEWGLGLAFGPGITFEGLLIRSLTSS

SEQ ID NO: 47652 - protein, 390 aa, Arabidopsis thaliana
  peptide (1)..(390): Ceres Seq. ID no. 13579072
  misc_feature (5)..(231): Pfam Name: Chalcone and stilbene synthases, N-terminal domain Pfam Description: Chalcone and stilbene synthases, N-terminal
  misc_feature (5)..(231): Pfam Name: Chalcone and stilbene synthases, N-terminal domain Pfam Description: Chalcone and stilbene synthases, N-terminal
  misc_feature (7)..(387): Homolog of NCBI NO: 34902722 NR Description: putative chalcone synthase
  misc_feature (8)..(387): Homolog of NCBI NO: 7433785 NR Description: chalcone synthase homolog - rice
  misc_feature (8)..(387): Homolog of NCBI NO: 37535500 NR Description: anther-specific protein YY2
  misc_feature (12)..(387): Homolog of NCBI NO: 7433787 NR Description: anther-specific protein homolog T11I11.90 -
  misc_feature (12)..(387): Homolog of NCBI NO: 18418528 NR Description: chalcone and stilbene synthase family
  misc_feature (7)..(387): Homolog of NCBI NO: 34902722 NR Description: putative chalcone synthase
  misc_feature (8)..(387): Homolog of NCBI NO: 37535500 NR Description: anther-specific protein YY2
  misc_feature (12)..(387): Homolog of NCBI NO: 18418528 NR Description: chalcone and stilbene synthase family
  misc_feature (1)..(390): Homolog of NCBI NO: 15217605 NR Description: chalcone and stilbene synthase family
  misc_feature (13)..(387): Homolog of NCBI NO: 21554288 NR Description: putative chalcone synthase [Arabidopsis thaliana]
  misc_feature (13)..(387): Homolog of NCBI NO: 15236691 NR Description: chalcone and stilbene synthase family
  misc_feature (26)..(387): Homolog of NCBI NO: 7433783 NR Description: anther-specific protein - wood tobacco
  misc_feature (1)..(387): Homolog of NCBI NO: 7433790 NR Description: chalcone synthase homolog ChS1 - Monterey pine
  misc_feature (12)..(387): Homolog of NCBI NO: 7433787 NR Description: anther-specific protein homolog T11I11.90 -
  misc_feature (8)..(387): Homolog of NCBI NO: 7433785 NR Description: chalcone synthase homolog - rice
  misc_feature (1)..(387): Homolog of NCBI NO: 7433790 NR Description: chalcone synthase homolog ChS1 - Monterey pine
  misc_feature (26)..(387): Homolog of NCBI NO: 7433783 NR Description: anther-specific protein - wood tobacco
  misc_feature (13)..(387): Homolog of NCBI NO: 15236691 NR Description: chalcone and stilbene synthase family
  misc_feature (13)..(387): Homolog of NCBI NO: 21554288 NR Description: putative chalcone synthase [Arabidopsis thaliana]
  misc_feature (1)..(390): Homolog of NCBI NO: 15217605 NR Description: chalcone and stilbene synthase family
MNGVEKLSSKSTRRVANAGKATLLALGKAFPSQVVPQENLVEGFLRDTKCDDAFIKEKLEHLCKTTTVKTRYTVLTREILAKYPELTTEGSPTIKQRLEIANEAVVEMALEASLGCIKEWGRPVEDITHIVYVSSSEIRLPGGDLYLSAKLGLRNDVNRVMLYFLGCYGGVTGLRVAKDIAENNPGSRVLLTTSETTILGFRPPNKARPYDLVGAALFGDGAAAVIIGADPRECEAPFMELHYAVQQFLPGTQNVIDGRLTEEGINFKLGRDLPQKIEENIEEFCKKLMGKAGDESMEFNDMFWAVHPGGPAILNRLETKLKLEKEKLESSRRALVDYGNVSSNTILYVMEYMRDELKKKGDAAQEWGLGLAFGPGITFEGLLIRSLTSS

SEQ ID NO: 47653 - protein, 283 aa, Arabidopsis thaliana
  peptide (1)..(283): Ceres Seq. ID no. 13579073
  misc_feature (1)..(124): Pfam Name: Chalcone and stilbene synthases, N-terminal domain Pfam Description: Chalcone and stilbene synthases, N-terminal
  misc_feature (1)..(124): Pfam Name: Chalcone and stilbene synthases, N-terminal domain Pfam Description: Chalcone and stilbene synthases, N-terminal
  misc_feature (1)..(280): Homolog of NCBI NO: 34902722 NR Description: putative chalcone synthase
  misc_feature (1)..(280): Homolog of NCBI NO: 7433785 NR Description: chalcone synthase homolog - rice
  misc_feature (1)..(280): Homolog of NCBI NO: 37535500 NR Description: anther-specific protein YY2
  misc_feature (1)..(280): Homolog of NCBI NO: 7433787 NR Description: anther-specific protein homolog T11I11.90 -
  misc_feature (1)..(280): Homolog of NCBI NO: 18418528 NR Description: chalcone and stilbene synthase family
  misc_feature (1)..(280): Homolog of NCBI NO: 34902722 NR Description: putative chalcone synthase
  misc_feature (1)..(280): Homolog of NCBI NO: 37535500 NR Description: anther-specific protein YY2
  misc_feature (1)..(280): Homolog of NCBI NO: 18418528 NR Description: chalcone and stilbene synthase family
  misc_feature (1)..(283): Homolog of NCBI NO: 15217605 NR Description: chalcone and stilbene synthase family
  misc_feature (1)..(280): Homolog of NCBI NO: 21554288 NR Description: putative chalcone synthase [Arabidopsis thaliana]
  misc_feature (1)..(280): Homolog of NCBI NO: 15236691 NR Description: chalcone and stilbene synthase family
  misc_feature (1)..(280): Homolog of NCBI NO: 7433783 NR Description: anther-specific protein - wood tobacco
  misc_feature (1)..(280): Homolog of NCBI NO: 7433790 NR Description: chalcone synthase homolog ChS1 - Monterey pine
  misc_feature (1)..(280): Homolog of NCBI NO: 7433787 NR Description: anther-specific protein homolog T11I11.90 -
  misc_feature (1)..(280): Homolog of NCBI NO: 7433785 NR Description: chalcone synthase homolog - rice
  misc_feature (1)..(280): Homolog of NCBI NO: 7433790 NR Description: chalcone synthase homolog ChS1 - Monterey pine
  misc_feature (1)..(280): Homolog of NCBI NO: 7433783 NR Description: anther-specific protein - wood tobacco
  misc_feature (1)..(280): Homolog of NCBI NO: 15236691 NR Description: chalcone and stilbene synthase family
  misc_feature (1)..(280): Homolog of NCBI NO: 21554288 NR Description: putative chalcone synthase [Arabidopsis thaliana]
  misc_feature (1)..(283): Homolog of NCBI NO: 15217605 NR Description: chalcone and stilbene synthase family
MALEASLGCIKEWGRPVEDITHIVYVSSSEIRLPGGDLYLSAKLGLRNDVNRVMLYFLGCYGGVTGLRVAKDIAENNPGSRVLLTTSETTILGFRPPNKARPYDLVGAALFGDGAAAVIIGADPRECEAPFMELHYAVQQFLPGTQNVIDGRLTEEGINFKLGRDLPQKIEENIEEFCKKLMGKAGDESMEFNDMFWAVHPGGPAILNRLETKLKLEKEKLESSRRALVDYGNVSSNTILYVMEYMRDELKKKGDAAQEWGLGLAFGPGITFEGLLIRSLTSS

SEQ ID NO: 47654 - DNA, 1113 bp, Arabidopsis thaliana
  misc_feature (1)..(1113): Ceres Seq. ID no. 13647305
  misc_feature: MA Experiment ID: 20000184 Result: Down-regulated in Transcription
  misc_feature: MA Experiment 20000184 PARAMETER Experiment Name: At_Shoots__P Parameter: Age (day) Value: 7
  misc_feature: MA Experiment 20000184 PARAMETER Experiment Name: At_Shoots__P Parameter: Tissue Value: Shoots vs. Whole Plant
  misc_feature: MA Experiment ID: 20000286 Result: Up-regulated in Transcription
  misc_feature: MA Experiment 20000286 PARAMETER Experiment Name: At_Open_Flower_P Parameter: Age (day) Value: 21
  misc_feature: MA Experiment 20000286 PARAMETER Experiment Name: At_Open_Flower_P Parameter: Plant Line Value: WS
  misc_feature: MA Experiment 20000286 PARAMETER Experiment Name: At_Open_Flower_P Parameter: Tissue Value: Half Open vs. Whole Plant
  misc_feature: MA Experiment ID: 20000437 Result: Up-regulated in Transcription
  misc_feature: MA Experiment 20000437 PARAMETER Experiment Name: At_Drought_P Parameter: Age (day) Value: 8
  misc_feature: MA Experiment 20000437 PARAMETER Experiment Name: At_Drought_P Parameter: Organism Value: A. thaliana
  misc_feature: MA Experiment 20000437 PARAMETER Experiment Name: At_Drought_P Parameter: Plant Line Value: WS
  misc_feature: MA Experiment 20000437 PARAMETER Experiment Name: At_Drought_P Parameter: Timepoint (hr) Value: 24
  misc_feature: MA Experiment 20000437 PARAMETER Experiment Name: At_Drought_P Parameter: Tissue Value: Whole Plant
  misc_feature: MA Experiment 20000437 PARAMETER Experiment Name: At_Drought_P Parameter: Treatment Value: Drought vs. No Drought
  misc_feature: MA Experiment ID: 20000438 Result: Down-regulated in Transcription
  misc_feature: MA Experiment 20000438 PARAMETER Experiment Name: At_Shoots__P Parameter: Age (day) Value: 14
  misc_feature: MA Experiment 20000438 PARAMETER Experiment Name: At_Shoots__P Parameter: Tissue Value: Shoots vs. Whole Plant
  misc_feature: MA Experiment ID: 20000495 Result: Up-regulated in Transcription
  misc_feature: MA Experiment 20000495 PARAMETER Experiment Name: At_Guard_Cells_P Parameter: Harvest Date Value: 8/2/2002
  misc_feature: MA Experiment 20000495 PARAMETER Experiment Name: At_Guard_Cells_P Parameter: Organism Value: A. thaliana
  misc_feature: MA Experiment 20000495 PARAMETER Experiment Name: At_Guard_Cells_P Parameter: Tissue Value: Guard Cells vs. Leaves
  misc_feature: MA Experiment ID: 20000794 Result: Up-regulated in Transcription
  misc_feature: MA Experiment 20000794 PARAMETER Experiment Name: At_Petals_P Parameter: Age (day) Value: 23-25 days
  misc_feature: MA Experiment 20000794 PARAMETER Experiment Name: At_Petals_P Parameter: Plant Line Value: WS
  misc_feature: MA Experiment 20000794 PARAMETER Experiment Name: At_Petals_P Parameter: Tissue Value: Petals vs. Whole plant
  misc_feature: MA Experiment ID: 20001247 Result: Down-regulated in Transcription
  misc_feature: MA Experiment 20001247 PARAMETER Experiment Name: At_Far-red-induction_P Parameter: Age (day) Value: 7
  misc_feature: MA Experiment 20001247 PARAMETER Experiment Name: At_Far-red-induction_P Parameter: Light Value: Far-red vs. White
  misc_feature: MA Experiment 20001247 PARAMETER Experiment Name: At_Far-red-induction_P Parameter: Organism Value: A. thaliana
  misc_feature: MA Experiment 20001247 PARAMETER Experiment Name: At_Far-red-induction_P Parameter: Plant Line Value: Columbia
  misc_feature: MA Experiment 20001247 PARAMETER Experiment Name: At_Far-red-induction_P Parameter: Timepoint (hr) Value: 1
  misc_feature: MA Experiment 20001247 PARAMETER Experiment Name: At_Far-red-induction_P Parameter: Tissue Value: Whole Plant
  misc_feature: MA Experiment ID: 20001248 Result: Up-regulated in Transcription
  misc_feature: MA Experiment 20001248 PARAMETER Experiment Name: At_Far-red-induction_P Parameter: Age (day) Value: 7
  misc_feature: MA Experiment 20001248 PARAMETER Experiment Name: At_Far-red-induction_P Parameter: Light Value: Far-red vs. White
  misc_feature: MA Experiment 20001248 PARAMETER Experiment Name: At_Far-red-induction_P Parameter: Organism Value: A. thaliana
  misc_feature: MA Experiment 20001248 PARAMETER Experiment Name: At_Far-red-induction_P Parameter: Plant Line Value: Columbia
  misc_feature: MA Experiment 20001248 PARAMETER Experiment Name: At_Far-red-induction_P Parameter: Timepoint (hr) Value: 4
  misc_feature: MA Experiment 20001248 PARAMETER Experiment Name: At_Far-red-induction_P Parameter: Tissue Value: Whole Plant
  misc_feature: MA Experiment ID: 20001451 Result: Down-regulated in Transcription
  misc_feature: MA Experiment 20001451 PARAMETER Experiment Name: At_Far-red-induction_P Parameter: Age (day) Value: 7
  misc_feature: MA Experiment 20001451 PARAMETER Experiment Name: At_Far-red-induction_P Parameter: Light Value: Far-red vs. White
  misc_feature: MA Experiment 20001451 PARAMETER Experiment Name: At_Far-red-induction_P Parameter: Organism Value: A. thaliana
  misc_feature: MA Experiment 20001451 PARAMETER Experiment Name: At_Far-red-induction_P Parameter: Plant Line Value: Columbia
  misc_feature: MA Experiment 20001451 PARAMETER Experiment Name: At_Far-red-induction_P Parameter: Timepoint (hr) Value: 24
  misc_feature: MA Experiment 20001451 PARAMETER Experiment Name: At_Far-red-induction_P Parameter: Tissue Value: Whole Plant
  misc_feature: MA Experiment ID: 20001911 Result: Up-regulated in Transcription
  misc_feature: MA Experiment 20001911 PARAMETER Experiment Name: At_Drought_Reproduction_P Parameter: Age (day) Value: 40
  misc_feature: MA Experiment 20001911 PARAMETER Experiment Name: At_Drought_Reproduction_P Parameter: Organism Value: A. thaliana
  misc_feature: MA Experiment 20001911 PARAMETER Experiment Name: At_Drought_Reproduction_P Parameter: Plant Line Value: WS
  misc_feature: MA Experiment 20001911 PARAMETER Experiment Name: At_Drought_Reproduction_P Parameter: Timepoint (day) Value: 10
  misc_feature: MA Experiment 20001911 PARAMETER Experiment Name: At_Drought_Reproduction_P Parameter: Tissue Value: Flowers
  misc_feature: MA Experiment 20001911 PARAMETER Experiment Name: At_Drought_Reproduction_P Parameter: Treatment Value: Drought vs. No Drought
gctttgtctgattgctatgaagagcatttccttgttccatacaaacgcattgtcatggtgaccaacaagagagtcgtgttattacagtgctctgatctggataagatggataagaaacccagcaagatcatgtgggatgtgccttgggaggaacttatggcgttggaattggcaaaggcaggtagccaaaggccctcgcatctcatactgcatctgaagagttttcggaagtcagagagttttgctcaggttataaaatgcagcgtgccagaagacttaaatggactagaacctcaagctgtccgaatctgttcagtagtgcgcaaaatgtggaaagcatatcagtctaacatgaaaaatcttgtgctcaaggttccttcaagccagagacatgtgtattttgcttggaatgaggctgatggaagagactcaaaaacatacaaaaacaaagctattattaaatcgagagaactttcttcttcaagctctgtctcagatgataaaaagcttgtcaaacatagtatcaacttctcaaaaatctggagtagtgagcgagaatccaaaggtcgatgttctttgtgtaaaaagcaggattctgaagatggaggagtttgcactatctggagacccagttgtccagcgggattcgtgtcagtgggtgatgtagctcacgtgggtagccatcccccaaatgttgctgctgtctacaataacaccaatggagtgtttgcacttcctgtgggttatgacctggtgtggaggaattgcttagatgattacataagtcctgtatcgatctggcatccacgggctcctgagggattcgtctctcctggatgtgttgcagtggctggtttcatcgagccagagctcaacacagtgtattgcatgccaacgtctttggccgagcagactgagtttgaagaacagaaggtttggtctgcacctgactcgtacccatgggcttgtcaaatttaccaagttcgaagtgatgcactccactttatggctctgcgacagaccaaagaggactctgattggaaagcaattagagttcgagatgattacaggtccatagaatctgaatcgggaaagaatttgcgtttagaatga

SEQ ID NO: 47655 - protein, 370 aa, Arabidopsis thaliana
  peptide (1)..(370): Ceres Seq. ID no. 13647306
  misc_feature (1)..(122): Homolog of NCBI NO: 21536529 NR Description: unknown [Arabidopsis thaliana]
  misc_feature (206)..(317): Homolog of NCBI NO: 15235975 NR Description: hypothetical protein [Arabidopsis thaliana]
  misc_feature (29)..(356): Homolog of NCBI NO: 37536928 NR Description: unknown protein [Oryza sativa (japonica
  misc_feature (36)..(370): Homolog of NCBI NO: 15235973 NR Description: hypothetical protein [Arabidopsis thaliana]
ALSDCYEEHFLVPYKRIVMVTNKRVVLLQCSDLDKMDKKPSKIMWDVPWEELMALELAKAGSQRPSHLILHLKSFRKSESFAQVIKCSVPEDLNGLEPQAVRICSVVRKMWKAYQSNMKNLVLKVPSSQRHVYFAWNEADGRDSKTYKNKAIIKSRELSSSSSVSDDKKLVKHSINFSKIWSSERESKGRCSLCKKQDSEDGGVCTIWRPSCPAGFVSVGDVAHVGSHPPNVAAVYNNTNGVFALPVGYDLVWRNCLDDYISPVSIWHPRAPEGFVSPGCVAVAGFIEPELNTVYCMPTSLAEQTEFEEQKVWSAPDSYPWACQIYQVRSDALHFMALRQTKEDSDWKAIRVRDDYRSIESESGKNLRLE

SEQ ID NO: 47656 - protein, 352 aa, Arabidopsis thaliana
  peptide (1)..(352): Ceres Seq. ID no. 13647307
  misc_feature (1)..(104): Homolog of NCBI NO: 21536529 NR Description: unknown [Arabidopsis thaliana]
  misc_feature (188)..(299): Homolog of NCBI NO: 15235975 NR Description: hypothetical protein [Arabidopsis thaliana]
  misc_feature (11)..(338): Homolog of NCBI NO: 37536928 NR Description: unknown protein [Oryza sativa (japonica
  misc_feature (18)..(352): Homolog of NCBI NO: 15235973 NR Description: hypothetical protein [Arabidopsis thaliana]
MVTNKRVVLLQCSDLDKMDKKPSKIMWDVPWEELMALELAKAGSQRPSHLILHLKSFRKSESFAQVIKCSVPEDLNGLEPQAVRICSVVRKMWKAYQSNMKNLVLKVPSSQRHVYFAWNEADGRDSKTYKNKAIIKSRELSSSSSVSDDKKLVKHSINFSKIWSSERESKGRCSLCKKQDSEDGGVCTIWRPSCPAGFVSVGDVAHVGSHPPNVAAVYNNTNGVFALPVGYDLVWRNCLDDYISPVSIWHPRAPEGFVSPGCVAVAGFIEPELNTVYCMPTSLAEQTEFEEQKVWSAPDSYPWACQIYQVRSDALHFMALRQTKEDSDWKAIRVRDDYRSIESESGKNLRLE

SEQ ID NO: 47657 - protein, 335 aa, Arabidopsis thaliana
  peptide (1)..(335): Ceres Seq. ID no. 13647308
  misc_feature (1)..(87): Homolog of NCBI NO: 21536529 NR Description: unknown [Arabidopsis thaliana]
  misc_feature (171)..(282): Homolog of NCBI NO: 15235975 NR Description: hypothetical protein [Arabidopsis thaliana]
  misc_feature (1)..(321): Homolog of NCBI NO: 37536928 NR Description: unknown protein [Oryza sativa (japonica
  misc_feature (1)..(335): Homolog of NCBI NO: 15235973 NR Description: hypothetical protein [Arabidopsis thaliana]
MDKKPSKIMWDVPWEELMALELAKAGSQRPSHLILHLKSFRKSESFAQVIKCSVPEDLNGLEPQAVRICSVVRKMWKAYQSNMKNLVLKVPSSQRHVYFAWNEADGRDSKTYKNKAIIKSRELSSSSSVSDDKKLVKHSINFSKIWSSERESKGRCSLCKKQDSEDGGVCTIWRPSCPAGFVSVGDVAHVGSHPPNVAAVYNNTNGVFALPVGYDLVWRNCLDDYISPVSIWHPRAPEGFVSPGCVAVAGFIEPELNTVYCMPTSLAEQTEFEEQKVWSAPDSYPWACQIYQVRSDALHFMALRQTKEDSDWKAIRVRDDYRSIESESGKNLRLE

SEQ ID NO: 47658 - DNA, 2229 bp, Arabidopsis thaliana
  misc_feature (1)..(2229): Ceres Seq. ID no. 13647309
  misc_feature: MA Experiment ID: 20000327 Result: Up-regulated in Transcription
  misc_feature: MA Experiment 20000327 PARAMETER Experiment Name: At_42deg_Heat_Sub_P Parameter: Age (day) Value: 14
  misc_feature: MA Experiment 20000327 PARAMETER Experiment Name: At_42deg_Heat_Sub_P Parameter: Organism Value: A. thaliana
  misc_feature: MA Experiment 20000327 PARAMETER Experiment Name: At_42deg_Heat_Sub_P Parameter: Plant Line Value: WS
  misc_feature: MA Experiment 20000327 PARAMETER Experiment Name: At_42deg_Heat_Sub_P Parameter: Temperature (deg C) Value: 42 vs. 22
  misc_feature: MA Experiment 20000327 PARAMETER Experiment Name: At_42deg_Heat_Sub_P Parameter: Timepoint (hr) Value: 1
  misc_feature: MA Experiment 20000327 PARAMETER Experiment Name: At_42deg_Heat_Sub_P Parameter: Tissue Value: Aerial
  misc_feature: MA Experiment ID: 20000328 Result: Up-regulated in Transcription
  misc_feature: MA Experiment 20000328 PARAMETER Experiment Name: At_42deg_Heat_Sub_P Parameter: Age (day) Value: 14
  misc_feature: MA Experiment 20000328 PARAMETER Experiment Name: At_42deg_Heat_Sub_P Parameter: Organism Value: A. thaliana
  misc_feature: MA Experiment 20000328 PARAMETER Experiment Name: At_42deg_Heat_Sub_P Parameter: Plant Line Value: WS
  misc_feature: MA Experiment 20000328 PARAMETER Experiment Name: At_42deg_Heat_Sub_P Parameter: Temperature (deg C) Value: 42 vs. 22
  misc_feature: MA Experiment 20000328 PARAMETER Experiment Name: At_42deg_Heat_Sub_P Parameter: Timepoint (hr) Value: 6
  misc_feature: MA Experiment 20000328 PARAMETER Experiment Name: At_42deg_Heat_Sub_P Parameter: Tissue Value: Aerial
  misc_feature: MA Experiment ID: 20000347 Result: Up-regulated in Transcription
  misc_feature: MA Experiment 20000347 PARAMETER Experiment Name: At_2mM_SA_Sub_P Parameter: Age (day) Value: 14
  misc_feature: MA Experiment 20000347 PARAMETER Experiment Name: At_2mM_SA_Sub_P Parameter: Organism Value: A. thaliana
  misc_feature: MA Experiment 20000347 PARAMETER Experiment Name: At_2mM_SA_Sub_P Parameter: Plant Line Value: WS
  misc_feature: MA Experiment 20000347 PARAMETER Experiment Name: At_2mM_SA_Sub_P Parameter: Timepoint (hr) Value: 6
  misc_feature: MA Experiment 20000347 PARAMETER Experiment Name: At_2mM_SA_Sub_P Parameter: Tissue Value: Aerial
  misc_feature: MA Experiment 20000347 PARAMETER Experiment Name: At_2mM_SA_Sub_P Parameter: Treatment Value: 2mM SA vs. No Treatment
acaaacctaaaaacctagctctattctttctctttgctgctcttaaactttttcttagctttttctatcttcgtgtgataatggctggtaaaggagaaggtcctgcgatcggtatcgatcttggtacgacgtactcttgcgtcggagtgtggcaacacgaccgtgttgagatcatcgctaatgatcaaggaaacagaaccactccctcgtacgttgctttcactgactccgagaggttgatcggtgatgctgctaagaaccaagtcgccatgaaccctgttaacactgttttcgatgcaaagaggttgattggtcgtagattcagtgacgcatctgtccaaagtgacagacagttatggcctttcactatcatctccggaactgcagagaaaccaatgattgtcgtcgaatacaagggagaagagaaacagttcgctgctgaagagatctcttccatggttcttattaagatgcgtgagatcgctgaggctttccttggcactacggtcaagaacgctgtcgtcactgttcctgcttacttcaatgactctcaacgtcaggctacaaaggatgctggtgtcatcgctggtttgaatgttttgcgtatcatcaacgagcccactgctgcagccattgcttatggtcttgacaagaaggccacaagtgttggagagaagaatgttttgatctttgatcttggtggtggtacttttgatgtctctcttcttacaatcgaagagggtatctttgaggtgaaggcaacagctggtgatactcatcttggtggggaagattttgacaacagaatggttaaccattttgttcaagagtttaagagaaagaacaagcaggatatcaccggtcaaccgagagccctcaggagattgagaacagcttgtgagagagcaaagaggactctttcttccaccgctcaaacgaccatcgagattgactctttatatggtggagctgacttctattctccaatcacccgtgctagattcgaagagatgaacatggatctctttaggaagtgtatggagcctgttgagaagtgtctccgtgatgctaagatggacaagagcactgttcacgagattgtccttgttggtggatccacccgtatccctaaggttcagcaattgcttcaggacttcttcaacggcaaagagctttgcaagtctatcaaccctgatgaggctgtagcttatggtgcagctgttcaggctgcgatcctaagcggtgaaggaaacgaaaaggtccaagaccttctcttgcttgatgtcacacctctctcccttggtcttgaaactgctggtggtgtcatgaccactttgattcaaagaaacacaaccattccaaccaagaaggaacaggtcttctcaacttattcggacaaccagcctggagtgttgatccaagtttttgaaggtgagagggctaggaccaaggacaacaacctcctcggtaaatttgagctttctggaattccccctgctccacgaggtgtccctcaaatcactgtctgcttcgacattgacgccaatggtatcctcaacgtctctgctgaggacaagaccactggaaagaagaacaagatcacaatcactaatgacaagggtcgtttgtctaaagaggatattgagaagatggttcaagaagcggagaagtacaagtctgaggatgaggagcacaagaagaaggtcgaggccaagaacgctcttgagaactacgcttacaacatgaggaacaccatccgtgatgagaagatcggtgagaagcttccagctgcagacaagaagaaggttgaggactctattgaggaagcaatccaatggctagatggtaaccaattgggtgaagctgacgagtttgaagacaagatgaaggagttggagagtgtttgcaatccgatcatcgctaagatgtaccaaggaggagctggtggtgaagctggtggtcctggagcttctggaatggacgaggatgaagctcctcctgcatcaggtggtgctggtcccaagatcgaggaagtcgactaagtgttctcttagttattttgtctttttatttgaactctctcaatttagtgttggattttatgttctacattttctttgatctaagtactttctctctattgtttggtcattggtgacccctttctcttaacaatgctttagtggtcacttggtagaaagctttgttatgaaaaattctttacatgtc

SEQ ID NO: 47659 - protein, 679 aa, Arabidopsis thaliana
  peptide (1)..(679): Ceres Seq. ID no. 13647310
  misc_feature (34)..(679): Homolog of NCBI NO: 32419617 NR Description: HEAT SHOCK 70 KD PROTEIN (HSP70) [Neurospora
  misc_feature (38)..(679): Homolog of NCBI NO: 32394421 NR Description: muscle-specific heat shock protein Hsc70-1
  misc_feature (35)..(679): Homolog of NCBI NO: 32451998 NR Description: Unknown (protein for MGC:65617) [Mus musculus]
  misc_feature (35)..(679): Homolog of NCBI NO: 32364477 NR Description: heat-shock 70-kilodalton protein 1A [Bos taurus]
  misc_feature (32)..(679): Homolog of NCBI NO: 31241095 NR Description: ENSANGP00000019887 [Anopheles gambiae]
  misc_feature (34)..(679): Homolog of NCBI NO: 31212115 NR Description: ENSANGP00000022257 [Anopheles gambiae]
  misc_feature (32)..(679): Homolog of NCBI NO: 476850 NR Description: dnaK-type molecular chaperone hsc70 - mouse
  misc_feature (35)..(679): Homolog of NCBI NO: 31322197 NR Description: heat shock protein 70 [Crassostrea ariakensis]
  misc_feature (27)..(679): Homolog of NCBI NO: 6969976 NR Description: high molecular weight heat shock protein [Malus x
  misc_feature (27)..(679): Homolog of NCBI NO: 11277117 NR Description: heat shock protein HSC70-1, cytosolic [imported]
KPKNLALFFLFAALKLFLSFFYLRVIMAGKGEGPAIGIDLGTTYSCVGVWQHDRVEIIANDQGNRTTPSYVAFTDSERLIGDAAKNQVAMNPVNTVFDAKRLIGRRFSDASVQSDRQLWPFTIISGTAEKPMIVVEYKGEEKQFAAEEISSMVLIKMREIAEAFLGTTVKNAVVTVPAYFNDSQRQATKDAGVIAGLNVLRIINEPTAAAIAYGLDKKATSVGEKNVLIFDLGGGTFDVSLLTIEEGIFEVKATAGDTHLGGEDFDNRMVNHFVQEFKRKNKQDITGQPRALRRLRTACERAKRTLSSTAQTTIEIDSLYGGADFYSPITRARFEEMNMDLFRKCMEPVEKCLRDAKMDKSTVHEIVLVGGSTRIPKVQQLLQDFFNGKELCKSINPDEAVAYGAAVQAAILSGEGNEKVQDLLLLDVTPLSLGLETAGGVMTTLIQRNTTIPTKKEQVFSTYSDNQPGVLIQVFEGERARTKDNNLLGKFELSGIPPAPRGVPQITVCFDIDANGILNVSAEDKTTGKKNKITITNDKGRLSKEDIEKMVQEAEKYKSEDEEHKKKVEAKNALENYAYNMRNTIRDEKIGEKLPAADKKKVEDSIEEAIQWLDGNQLGEADEFEDKMKELESVCNPIIAKMYQGGAGGEAGGPGASGMDEDEAPPASGGAGPKIEEVD

SEQ ID NO: 47660 - protein, 653 aa, Arabidopsis thaliana
  peptide (1)..(653): Ceres Seq. ID no. 13647311
  misc_feature (8)..(653): Homolog of NCBI NO: 32419617 NR Description: HEAT SHOCK 70 KD PROTEIN (HSP70) [Neurospora
  misc_feature (12)..(653): Homolog of NCBI NO: 32394421 NR Description: muscle-specific heat shock protein Hsc70-1
  misc_feature (9)..(653): Homolog of NCBI NO: 32451998 NR Description: Unknown (protein for MGC:65617) [Mus musculus]
  misc_feature (9)..(653): Homolog of NCBI NO: 32364477 NR Description: heat-shock 70-kilodalton protein 1A [Bos taurus]
  misc_feature (6)..(653): Homolog of NCBI NO: 31241095 NR Description: ENSANGP00000019887 [Anopheles gambiae]
  misc_feature (8)..(653): Homolog of NCBI NO: 31212115 NR Description: ENSANGP00000022257 [Anopheles gambiae]
  misc_feature (6)..(653): Homolog of NCBI NO: 476850 NR Description: dnaK-type molecular chaperone hsc70 - mouse
  misc_feature (9)..(653): Homolog of NCBI NO: 31322197 NR Description: heat shock protein 70 [Crassostrea ariakensis]
  misc_feature (1)..(653): Homolog of NCBI NO: 6969976 NR Description: high molecular weight heat shock protein [Malus x
  misc_feature (1)..(653): Homolog of NCBI NO: 11277117 NR Description: heat shock protein HSC70-1, cytosolic [imported]
MAGKGEGPAIGIDLGTTYSCVGVWQHDRVEIIANDQGNRTTPSYVAFTDSERLIGDAAKNQVAMNPVNTVFDAKRLIGRRFSDASVQSDRQLWPFTIISGTAEKPMIVVEYKGEEKQFAAEEISSMVLIKMREIAEAFLGTTVKNAVVTVPAYFNDSQRQATKDAGVIAGLNVLRIINEPTAAAIAYGLDKKATSVGEKNVLIFDLGGGTFDVSLLTIEEGIFEVKATAGDTHLGGEDFDNRMVNHFVQEFKRKNKQDITGQPRALRRLRTACERAKRTLSSTAQTTIEIDSLYGGADFYSPITRARFEEMNMDLFRKCMEPVEKCLRDAKMDKSTVHEIVLVGGSTRIPKVQQLLQDFFNGKELCKSINPDEAVAYGAAVQAAILSGEGNEKVQDLLLLDVTPLSLGLETAGGVMTTLIQRNTTIPTKKEQVFSTYSDNQPGVLIQVFEGERARTKDNNLLGKFELSGIPPAPRGVPQITVCFDIDANGILNVSAEDKTTGKKNKITITNDKGRLSKEDIEKMVQEAEKYKSEDEEHKKKVEAKNALENYAYNMRNTIRDEKIGEKLPAADKKKVEDSIEEAIQWLDGNQLGEADEFEDKMKELESVCNPIIAKMYQGGAGGEAGGPGASGMDEDEAPPASGGAGPKIEEVD

SEQ ID NO: 47661 - protein, 590 aa, Arabidopsis thaliana
  peptide (1)..(590): Ceres Seq. ID no. 13647312
  misc_feature (1)..(590): Homolog of NCBI NO: 32419617 NR Description: HEAT SHOCK 70 KD PROTEIN (HSP70) [Neurospora
  misc_feature (1)..(590): Homolog of NCBI NO: 32394421 NR Description: muscle-specific heat shock protein Hsc70-1
  misc_feature (1)..(590): Homolog of NCBI NO: 32451998 NR Description: Unknown (protein for MGC:65617) [Mus musculus]
  misc_feature (1)..(590): Homolog of NCBI NO: 32364477 NR Description: heat-shock 70-kilodalton protein 1A [Bos taurus]
  misc_feature (1)..(590): Homolog of NCBI NO: 31241095 NR Description: ENSANGP00000019887 [Anopheles gambiae]
  misc_feature (1)..(590): Homolog of NCBI NO: 31212115 NR Description: ENSANGP00000022257 [Anopheles gambiae]
  misc_feature (1)..(590): Homolog of NCBI NO: 476850 NR Description: dnaK-type molecular chaperone hsc70 - mouse
  misc_feature (1)..(590): Homolog of NCBI NO: 31322197 NR Description: heat shock protein 70 [Crassostrea ariakensis]
  misc_feature (1)..(590): Homolog of NCBI NO: 6969976 NR Description: high molecular weight heat shock protein [Malus x
  misc_feature (1)..(590): Homolog of NCBI NO: 11277117 NR Description: heat shock protein HSC70-1, cytosolic [imported]
MNPVNTVFDAKRLIGRRFSDASVQSDRQLWPFTIISGTAEKPMIVVEYKGEEKQFAAEEISSMVLIKMREIAEAFLGTTVKNAVVTVPAYFNDSQRQATKDAGVIAGLNVLRIINEPTAAAIAYGLDKKATSVGEKNVLIFDLGGGTFDVSLLTIEEGIFEVKATAGDTHLGGEDFDNRMVNHFVQEFKRKNKQDITGQPRALRRLRTACERAKRTLSSTAQTTIEIDSLYGGADFYSPITRARFEEMNMDLFRKCMEPVEKCLRDAKMDKSTVHEIVLVGGSTRIPKVQQLLQDFFNGKELCKSINPDEAVAYGAAVQAAILSGEGNEKVQDLLLLDVTPLSLGLETAGGVMTTLIQRNTTIPTKKEQVFSTYSDNQPGVLIQVFEGERARTKDNNLLGKFELSGIPPAPRGVPQITVCFDIDANGILNVSAEDKTTGKKNKITITNDKGRLSKEDIEKMVQEAEKYKSEDEEHKKKVEAKNALENYAYNMRNTIRDEKIGEKLPAADKKKVEDSIEEAIQWLDGNQLGEADEFEDKMKELESVCNPIIAKMYQGGAGGEAGGPGASGMDEDEAPPASGGAGPKIEEVD

SEQ ID NO: 47662 - DNA, 496 bp, Arabidopsis thaliana
  misc_feature (1)..(496): Ceres Seq. ID no. 13647325
  misc_feature: MA Experiment ID: 20000307 Result: Up-regulated in Transcription
  misc_feature: MA Experiment 20000307 PARAMETER Experiment Name: At_Germinating_Seeds_Sub_P Parameter: Age (hr) Value: 24 vs. 0
  misc_feature: MA Experiment 20000307 PARAMETER Experiment Name: At_Germinating_Seeds_Sub_P Parameter: Organism Value: A. thaliana
  misc_feature: MA Experiment 20000307 PARAMETER Experiment Name: At_Germinating_Seeds_Sub_P Parameter: Plant Line Value: WS
  misc_feature: MA Experiment 20000307 PARAMETER Experiment Name: At_Germinating_Seeds_Sub_P Parameter: Tissue Value: Germinating Seeds
  misc_feature: MA Experiment ID: 20000314 Result: Down-regulated in Transcription
  misc_feature: MA Experiment 20000314 PARAMETER Experiment Name: At_14day_Shoots-Roots_Sub_P Parameter: Age (day) Value: 14
  misc_feature: MA Experiment 20000314 PARAMETER Experiment Name: At_14day_Shoots-Roots_Sub_P Parameter: Organism Value: A. thaliana
  misc_feature: MA Experiment 20000314 PARAMETER Experiment Name: At_14day_Shoots-Roots_Sub_P Parameter: Plant Line Value: WS
  misc_feature: MA Experiment 20000314 PARAMETER Experiment Name: At_14day_Shoots-Roots_Sub_P Parameter: Tissue Value: Roots vs. Whole Plant
  misc_feature: MA Experiment ID: 20000327 Result: Up-regulated in Transcription
  misc_feature: MA Experiment 20000327 PARAMETER Experiment Name: At_42deg_Heat_Sub_P Parameter: Age (day) Value: 14
  misc_feature: MA Experiment 20000327 PARAMETER Experiment Name: At_42deg_Heat_Sub_P Parameter: Organism Value: A. thaliana
  misc_feature: MA Experiment 20000327 PARAMETER Experiment Name: At_42deg_Heat_Sub_P Parameter: Plant Line Value: WS
  misc_feature: MA Experiment 20000327 PARAMETER Experiment Name: At_42deg_Heat_Sub_P Parameter: Temperature (deg C) Value: 42 vs. 22
  misc_feature: MA Experiment 20000327 PARAMETER Experiment Name: At_42deg_Heat_Sub_P Parameter: Timepoint (hr) Value: 1
  misc_feature: MA Experiment 20000327 PARAMETER Experiment Name: At_42deg_Heat_Sub_P Parameter: Tissue Value: Aerial
  misc_feature: MA Experiment ID: 20000328 Result: Up-regulated in Transcription
  misc_feature: MA Experiment 20000328 PARAMETER Experiment Name: At_42deg_Heat_Sub_P Parameter: Age (day) Value: 14
  misc_feature: MA Experiment 20000328 PARAMETER Experiment Name: At_42deg_Heat_Sub_P Parameter: Organism Value: A. thaliana
  misc_feature: MA Experiment 20000328 PARAMETER Experiment Name: At_42deg_Heat_Sub_P Parameter: Plant Line Value: WS
  misc_feature: MA Experiment 20000328 PARAMETER Experiment Name: At_42deg_Heat_Sub_P Parameter: Temperature (deg C) Value: 42 vs. 22
  misc_feature: MA Experiment 20000328 PARAMETER Experiment Name: At_42deg_Heat_Sub_P Parameter: Timepoint (hr) Value: 6
  misc_feature: MA Experiment 20000328 PARAMETER Experiment Name: At_42deg_Heat_Sub_P Parameter: Tissue Value: Aerial
  misc_feature: MA Experiment ID: 20000355 Result: Down-regulated in Transcription
  misc_feature: MA Experiment 20000355 PARAMETER Experiment Name: At_Siliques_Sub_P Parameter: Age (day) Value: 21
  misc_feature: MA Experiment 20000355 PARAMETER Experiment Name: At_Siliques_Sub_P Parameter: Organism Value: A. thaliana
  misc_feature: MA Experiment 20000355 PARAMETER Experiment Name: At_Siliques_Sub_P Parameter: Plant Line Value: WS
  misc_feature: MA Experiment 20000355 PARAMETER Experiment Name: At_Siliques_Sub_P Parameter: Tissue Value: Less Than 5mm Siliques vs. Whole Plant
  misc_feature: MA Experiment ID: 20000440 Result: Down-regulated in Transcription
  misc_feature: MA Experiment 20000440 PARAMETER Experiment Name: At_Closed-Flower__Sub_P Parameter: Tissue Value: Closed Flower vs. Whole Plant
ttttgtataaacagaatttcttatacctcgcagtttgtgtttacgtaaaaaaaaaaaaaaaaaaaaaaaaaaaaattgatatggatcgaagtgttagtggtcggctacattgagttccaacgaaacgctgagctggactcggagaagcgtttgtatccaggaggcaagttctttgacccgttaggattagcgtctgatccggagaagaaggctcagcttcagctagctgagatcaaacatgctcgtttagccatggttgggttcttgggttttgcggttcaggcggctgcaaccggtaaaggaccactcaacaactgggcgactcaccttagtgacccacttcacaccaccattatcgataccttctcttcctcttgatgtggtggctcttagcttctataggtgtcatgtaatgatgtactgtcgttattttaaagaaaatttggcaccttttgtataaacagaatttcttatacctcgcagtttgtgtttacgc

SEQ ID NO: 47663 - protein, 41 aa, Arabidopsis thaliana
  peptide (1)..(41): Ceres Seq. ID no. 13647326
  misc_feature (1)..(41): Homolog of NCBI NO: 7443232 NR Description: chlorophyll a/b-binding protein - barley
  misc_feature (1)..(41): Homolog of NCBI NO: 445116 NR Description: light-harvesting complex IIa protein;
  misc_feature (1)..(41): Homolog of NCBI NO: 7443231 NR Description: chlorophyll a/b-binding protein CP29 precursor -
  misc_feature (1)..(41): Homolog of NCBI NO: 7443230 NR Description: probable chlorophyll a/b-binding protein - rice
  misc_feature (1)..(41): Homolog of NCBI NO: 15081739 NR Description: AT5g01530/F7A7_50 [Arabidopsis thaliana]
  misc_feature (1)..(41): Homolog of NCBI NO: 13877547 NR Description: chlorophyll a/b-binding protein CP29 [Arabidopsis
  misc_feature (1)..(41): Homolog of NCBI NO: 4689382 NR Description: chlorophyll a/b binding protein CP29 [Vigna
  misc_feature (1)..(41): Homolog of NCBI NO: 20260162 NR Description: chlorophyll a/b-binding protein CP29 [Arabidopsis
  misc_feature (1)..(41): Homolog of NCBI NO: 15241005 NR Description: light-harvesting chlorophyll a/b binding protein
  misc_feature (1)..(41): Homolog of NCBI NO: 15231990 NR Description: chlorophyll a/b-binding protein -related
MVGFLGFAVQAAATGKGPLNNWATHLSDPLHTTIIDTFSSS

SEQ ID NO: 47664 - protein, 36 aa, Arabidopsis thaliana
  peptide (1)..(36): Ceres Seq. ID no. 13647327
LYKQNFLYLAVCVYVKKKKKKKKKIDMDRSVSGRLH

SEQ ID NO: 47665 - DNA, 4304 bp, Arabidopsis thaliana
  misc_feature (1)..(4304): Ceres Seq. ID no. 13647333
  misc_feature: MA Experiment ID: 20000184 Result: Down-regulated in Transcription
  misc_feature: MA Experiment 20000184 PARAMETER Experiment Name: At_Shoots__P Parameter: Age (day) Value: 7
  misc_feature: MA Experiment 20000184 PARAMETER Experiment Name: At_Shoots__P Parameter: Tissue Value: Shoots vs. Whole Plant
  misc_feature: MA Experiment ID: 20000495 Result: Up-regulated in Transcription
  misc_feature: MA Experiment 20000495 PARAMETER Experiment Name: At_Guard_Cells_P Parameter: Harvest Date Value: 8/2/2002
  misc_feature: MA Experiment 20000495 PARAMETER Experiment Name: At_Guard_Cells_P Parameter: Organism Value: A. thaliana
  misc_feature: MA Experiment 20000495 PARAMETER Experiment Name: At_Guard_Cells_P Parameter: Tissue Value: Guard Cells vs. Leaves
  misc_feature: MA Experiment ID: 20000794 Result: Up-regulated in Transcription
  misc_feature: MA Experiment 20000794 PARAMETER Experiment Name: At_Petals_P Parameter: Age (day) Value: 23-25 days
  misc_feature: MA Experiment 20000794 PARAMETER Experiment Name: At_Petals_P Parameter: Plant Line Value: WS
  misc_feature: MA Experiment 20000794 PARAMETER Experiment Name: At_Petals_P Parameter: Tissue Value: Petals vs. Whole plant
  misc_feature: MA Experiment ID: 20001911 Result: Up-regulated in Transcription
  misc_feature: MA Experiment 20001911 PARAMETER Experiment Name: At_Drought_Reproduction_P Parameter: Age (day) Value: 40
  misc_feature: MA Experiment 20001911 PARAMETER Experiment Name: At_Drought_Reproduction_P Parameter: Organism Value: A. thaliana
  misc_feature: MA Experiment 20001911 PARAMETER Experiment Name: At_Drought_Reproduction_P Parameter: Plant Line Value: WS
  misc_feature: MA Experiment 20001911 PARAMETER Experiment Name: At_Drought_Reproduction_P Parameter: Timepoint (day) Value: 10
  misc_feature: MA Experiment 20001911 PARAMETER Experiment Name: At_Drought_Reproduction_P Parameter: Tissue Value: Flowers
  misc_feature: MA Experiment 20001911 PARAMETER Experiment Name: At_Drought_Reproduction_P Parameter: Treatment Value: Drought vs. No Drought
gaaaaaaggaacatggccaaggctcgaaagccgaagaacgaggaagctcctggcgcgaagacttcagagaacactggagctaaagttcttcaccagaaactctttctctctattgacttcaaaaaacgccaaatctacggttacacagagttagaagtgagtgtgccagatattggtattgtgggactacacgcagagaacttgggaattgagagtgttttggtagatggggaacctactgtatttgagtactatccgcaccatcagaactctgaaactgaaagtaactggaactcggtctctgacccagcttcagcagctgatgctgcggccatggaatatgtcggggttcttaagagagaagacactgcaaatttactgatcaactgttgcaagccttctaaggatttatctgaacagctggacagtgtgactttagaaaacggttcccaatcttcaggggaggcaaaacagaatgttaaattgattcggattaactactgggtagagaaaatagagtcaggaattcattttgatgggaacattgtacatactgataaccagatgagacgtgctcgttgttggtttccttgtattgatgatgagtaccatcgttgcagtttcgatttggaattcactgttccgcacaactttgtggctgttagtgttgggaaattactctaccaggttatgtgcaaagaagatactactcaaaaaacgtatgtttatgaactagctattcctattgcaccgcggtgggtgtctttagttgcaggaccattggaaatccttccagatcagaccaactttctcatatctaacttgtgtttgccgcatgatctctcgaggcttcgtaatacaatggaatttttccatgaagcttatagctactatgaggattatttaagtgcgaactttccatttggattctacaagcaagtatttttacctcctgaaatggttgttacttcgtcgacttcgggagcttccttgagtatctttagctcccacatactatatgatgagagggttattgatcagacaatagatacacgcattaaacttgcttctgcgttagcaaaacagtggtttggagtttatattactcctgaatcaccaaatgatgattggctccttgatggtcttgctggtttcttaacggatatgtttatcaagcagtttttgggaaataatgaagcacgatatcggagatacaaggcaaattgtgctgtctgtaaagctgatgatagtggtgcaatgtgcttgagctcatctccttcttgcagggacctatttggaactcattctattggaatgcatgggaagatacgatcatggaaatcaggagcagtccttcagatgttggagaagcaaatgggctcagactcgtttcgtaaaatattgcagaaaattatttctcgagccaaggatccatctaattctatacggtctcttagcacgaaggagttccggcaatttgctaataagattggaaatcttgagcgtccatttcttaaagaattttttcagcgatgggttgcatcttatggttgtcccgtgctaaggattgggttgtcttacaacaaaaggaaaaacaatgttgaaatggctgctctgcgagaatgcacggctgcactggatgcaagattatcagttataggggctacttctgattcagaaagccgggatgtggatgctggctggccgggtattatgagtataagggtttatgaactcgatggaatgtctgatcatccaaagttgcctatggctggagatagatggcagctactggaattaccatgtcattctaaacttgctgctaaacgctatcaaaaaccaaagaagggagggaaacctgatggggctgaagacaatgttgatgctatagcaccgttagaaaataaaacgagcattgaatctcccttggcttggattaaagctgaccctgagatggaatatattgctgagattcaccttcatcagcccctacaaatgtgggtcaatcaactagagaaggacggagatgttgttgctcaggcacaagcaattgcgtcacttgaagccttaaaacaacactccttttccattgtgaatgcactcaaaaatgtcctcactgactccaaggtcttctggagaatacgtattgcggcagcgtttgcattggctaaaacagcatcagaggagtctgactgggcgggtttgcaacatctaataaagttttataagagtagaagatttgatgcagagattggactccccaagccgaatgacttccgcgatttcccagaatattttgtgcttgaggccattccacatgccattgcaatagttaggggtgctgaggggaaaagccctagagaagctgttgaatttatcttacagcttctgaagtacaatgacaacagtgggaattcgtattctgatgtattctggcttgctgtgcttgttcagtcagttggtgatctcgaattctgtcagcagagtctaacgtttttggcccctcttctgaagcgcattgacagactcttgcagtttgacaggttgatgccaagctacaatggcatcttgacaattagctgcatccgaacattggcacagactgctctcaagctttctgattccatcagtttcgatcacatctgtaaacttattgaacctttccggaattcggatacaatattgcaaattcgtatagaaggaagtagggcacttcttgacatcgagtaccaatccaaaggcataagttccgcacttttgttgtttatgaaatatttggtagaagaatcatctttgagagggcaggtaaaattgtgtgtacacacaatgcggttatgtcaaatagcagttggatgtgactcagacgattgtgtcgacactgttactcttctggatttgctgcatctattcaagagccatgtagtatttaacaatgaacttcttcgctactacttgttctgcatttttcaaatcctcgctggaagacccccaacgttgttcggagttcccaaagaaaaacctttgcagcttgttgatgtggaggcctgcattgaaccgaaaaatgtatttttggttcccggagcagaggcaggggagccttcactttcggcacttggagatgccaaaggacaatcgctggatgttgctccttatggtgttccaataataccacaggaaatgttcatgcctattgttcctgaactgatgttgccagaacctgttgcagcgtatgatgagacacagcatcttgaacctcgcatggaaagtcaaaaccaaccttcacatgaaaatcccatcgttcatgagattccatcagatgttgaaggtccaacagaagaattagctcatagggaagcaaaccctccaacaaaggaacctcaaaaagaacctgatgtggtttctgtgtctgttagtcatgaggtgaagaagtctgttatacggatcaaggtcagaccatctggggcaaccagcagagcggaaggatcagcacgaactatagaaagatctcaagggattgtggtacgccatgatatagaccgaggtcaaactagttcagcttcagtggacgccccacagagaatctcaactgacgctgtgagcataagcaatcagaatcacgtggaggaagtaaattcgtgtcacgatgttggttctcgcatgactgcaagcatcggcagtgtaaaatttgcaagcgaaggcgatatttttgggaaagagttgcaatgcactgctgagtctgggaaaccttcgacaagccagaaagcagataataacaaccgaactgtaccacctagcttcttaccactagaccacagtatggaaaacgaggcgcagcagaaatacgcgagcctccaaacactttcgattggtaaagaaaaggaaaagaagaaagacaaggaaaagaaagagaagaagaggaaaagagaagatcccgtttatctagagaagaaacggttaaagaaagagaagaaacgaaaggagaaggaaatggcgaagctcgtgagcagcactacggatccagctaaaaagaagatagagagtgttgcggaggttaaagaagaagaaccaagtgatggtgccatgttgattaaggttgaaccaaagactgaaccatcaacagcagaagctagaccgcttcccaaattccgaatcaaactgaaaagcaaagcgttcaacaactcataaggttagatccgagccagtccctccccgccaaaatctgagtagtaacttttatttccaaaagctttgttgttacaacttgcaaggtgttgtgattatatgtcaatgtaatctgtttattc

SEQ ID NO: 47666 - protein, 1394 aa, Arabidopsis thaliana
  peptide (1)..(1394): Ceres Seq. ID no. 13647334
  misc_feature (28)..(402): Pfam Name: Peptidase family M1 Pfam Description: Peptidase family M1
  misc_feature (570)..(907): Homolog of NCBI NO: 24662032 NR Description: TBP-associated factor 2 CG6711-PA [Drosophila
  misc_feature (28)..(401): Homolog of NCBI NO: 24662032 NR Description: TBP-associated factor 2 CG6711-PA [Drosophila
  misc_feature (570)..(907): Homolog of NCBI NO: 17647989 NR Description: TBP-associated factor 2; TBP-associated factor
  misc_feature (28)..(401): Homolog of NCBI NO: 17647989 NR Description: TBP-associated factor 2; TBP-associated factor
  misc_feature (570)..(907): Homolog of NCBI NO: 2739087 NR Description: cofactor of initiator function [Homo sapiens]
  misc_feature (28)..(480): Homolog of NCBI NO: 2739087 NR Description: cofactor of initiator function [Homo sapiens]
  misc_feature (570)..(907): Homolog of NCBI NO: 4507347 NR Description: TBP-associated factor 2
  misc_feature (28)..(480): Homolog of NCBI NO: 4507347 NR Description: TBP-associated factor 2
  misc_feature (570)..(907): Homolog of NCBI NO: 2827282 NR Description: TATA binding protein associated factor [Homo
  misc_feature (28)..(480): Homolog of NCBI NO: 2827282 NR Description: TATA binding protein associated factor [Homo
EKRNMAKARKPKNEEAPGAKTSENTGAKVLHQKLFLSIDFKKRQIYGYTELEVSVPDIGIVGLHAENLGIESVLVDGEPTVFEYYPHHQNSETESNWNSVSDPASAADAAAMEYVGVLKREDTANLLINCCKPSKDLSEQLDSVTLENGSQSSGEAKQNVKLIRINYWVEKIESGIHFDGNIVHTDNQMRRARCWFPCIDDEYHRCSFDLEFTVPHNFVAVSVGKLLYQVMCKEDTTQKTYVYELAIPIAPRWVSLVAGPLEILPDQTNFLISNLCLPHDLSRLRNTMEFFHEAYSYYEDYLSANFPFGFYKQVFLPPEMVVTSSTSGASLSIFSSHILYDERVIDQTIDTRIKLASALAKQWFGVYITPESPNDDWLLDGLAGFLTDMFIKQFLGNNEARYRRYKANCAVCKADDSGAMCLSSSPSCRDLFGTHSIGMHGKIRSWKSGAVLQMLEKQMGSDSFRKILQKIISRAKDPSNSIRSLSTKEFRQFANKIGNLERPFLKEFFQRWVASYGCPVLRIGLSYNKRKNNVEMAALRECTAALDARLSVIGATSDSESRDVDAGWPGIMSIRVYELDGMSDHPKLPMAGDRWQLLELPCHSKLAAKRYQKPKKGGKPDGAEDNVDAIAPLENKTSIESPLAWIKADPEMEYIAEIHLHQPLQMWVNQLEKDGDVVAQAQAIASLEALKQHSFSIVNALKNVLTDSKVFWRIRIAAAFALAKTASEESDWAGLQHLIKFYKSRRFDAEIGLPKPNDFRDFPEYFVLEAIPHAIAIVRGAEGKSPREAVEFILQLLKYNDNSGNSYSDVFWLAVLVQSVGDLEFCQQSLTFLAPLLKRIDRLLQFDRLMPSYNGILTISCIRTLAQTALKLSDSISFDHICKLIEPFRNSDTILQIRIEGSRALLDIEYQSKGISSALLLFMKYLVEESSLRGQVKLCVHTMRLCQIAVGCDSDDCVDTVTLLDLLHLFKSHVVFNNELLRYYLFCIFQILAGRPPTLFGVPKEKPLQLVDVEACIEPKNVFLVPGAEAGEPSLSALGDAKGQSLDVAPYGVPIIPQEMFMPIVPELMLPEPVAAYDETQHLEPRMESQNQPSHENPIVHEIPSDVEGPTEELAHREANPPTKEPQKEPDVVSVSVSHEVKKSVIRIKVRPSGATSRAEGSARTIERSQGIVVRHDIDRGQTSSASVDAPQRISTDAVSISNQNHVEEVNSCHDVGSRMTASIGSVKFASEGDIFGKELQCTAESGKPSTSQKADNNNRTVPPSFLPLDHSMENEAQQKYASLQTLSIGKEKEKKKDKEKKEKKRKREDPVYLEKKRLKKEKKRKEKEMAKLVSSTTDPAKKKIESVAEVKEEEPSDGAMLIKVEPKTEPSTAEARPLPKFRIKLKSKAFNNS

SEQ ID NO: 47667 - protein, 1390 aa, Arabidopsis thaliana
  peptide (1)..(1390): Ceres Seq. ID no. 13647335
  misc_feature (24)..(398): Pfam Name: Peptidase family M1 Pfam Description: Peptidase family M1
  misc_feature (566)..(903): Homolog of NCBI NO: 24662032 NR Description: TBP-associated factor 2 CG6711-PA [Drosophila
  misc_feature (24)..(397): Homolog of NCBI NO: 24662032 NR Description: TBP-associated factor 2 CG6711-PA [Drosophila
  misc_feature (566)..(903): Homolog of NCBI NO: 17647989 NR Description: TBP-associated factor 2; TBP-associated factor
  misc_feature (24)..(397): Homolog of NCBI NO: 17647989 NR Description: TBP-associated factor 2; TBP-associated factor
  misc_feature (566)..(903): Homolog of NCBI NO: 2739087 NR Description: cofactor of initiator function [Homo sapiens]
  misc_feature (24)..(476): Homolog of NCBI NO: 2739087 NR Description: cofactor of initiator function [Homo sapiens]
  misc_feature (566)..(903): Homolog of NCBI NO: 4507347 NR Description: TBP-associated factor 2
  misc_feature (24)..(476): Homolog of NCBI NO: 4507347 NR Description: TBP-associated factor 2
  misc_feature (566)..(903): Homolog of NCBI NO: 2827282 NR Description: TATA binding protein associated factor [Homo
  misc_feature (24)..(476): Homolog of NCBI NO: 2827282 NR Description: TATA binding protein associated factor [Homo
MAKARKPKNEEAPGAKTSENTGAKVLHQKLFLSIDFKKRQIYGYTELEVSVPDIGIVGLHAENLGIESVLVDGEPTVFEYYPHHQNSETESNWNSVSDPASAADAAAMEYVGVLKREDTANLLINCCKPSKDLSEQLDSVTLENGSQSSGEAKQNVKLIRINYWVEKIESGIHFDGNIVHTDNQMRRARCWFPCIDDEYHRCSFDLEFTVPHNFVAVSVGKLLYQVMCKEDTTQKTYVYELAIPIAPRWVSLVAGPLEILPDQTNFLISNLCLPHDLSRLRNTMEFFHEAYSYYEDYLSANFPFGFYKQVFLPPEMVVTSSTSGASLSIFSSHILYDERVIDQTIDTRIKLASALAKQWFGVYITPESPNDDWLLDGLAGFLTDMFIKQFLGNNEARYRRYKANCAVCKADDSGAMCLSSSPSCRDLFGTHSIGMHGKIRSWKSGAVLQMLEKQMGSDSFRKILQKIISRAKDPSNSIRSLSTKEFRQFANKIGNLERPFLKEFFQRWVASYGCPVLRIGLSYNKRKNNVEMAALRECTAALDARLSVIGATSDSESRDVDAGWPGIMSIRVYELDGMSDHPKLPMAGDRWQLLELPCHSKLAAKRYQKPKKGGKPDGAEDNVDAIAPLENKTSIESPLAWIKADPEMEYIAEIHLHQPLQMWVNQLEKDGDVVAQAQAIASLEALKQHSFSIVNALKNVLTDSKVFWRIRIAAAFALAKTASEESDWAGLQHLIKFYKSRRFDAEIGLPKPNDFRDFPEYFVLEAIPHAIAIVRGAEGKSPREAVEFILQLLKYNDNSGNSYSDVFWLAVLVQSVGDLEFCQQSLTFLAPLLKRIDRLLQFDRLMPSYNGILTISCIRTLAQTALKLSDSISFDHICKLIEPFRNSDTILQIRIEGSRALLDIEYQSKGISSALLLFMKYLVEESSLRGQVKLCVHTMRLCQIAVGCDSDDCVDTVTLLDLLHLFKSHVVFNNELLRYYLFCIFQILAGRPPTLFGVPKEKPLQLVDVEACIEPKNVFLVPGAEAGEPSLSALGDAKGQSLDVAPYGVPIIPQEMFMPIVPELMLPEPVAAYDETQHLEPRMESQNQPSHENPIVHEIPSDVEGPTEELAHREANPPTKEPQKEPDVVSVSVSHEVKKSVIRIKVRPSGATSRAEGSARTIERSQGIVVRHDIDRGQTSSASVDAPQRISTDAVSISNQNHVEEVNSCHDVGSRMTASIGSVKFASEGDIFGKELQCTAESGKPSTSQKADNNNRTVPPSFLPLDHSMENEAQQKYASLQTLSIGKEKEKKKDKEKKEKKRKREDPVYLEKKRLKKEKKRKEKEMAKLVSSTTDPAKKKIESVAEVKEEEPSDGAMLIKVEPKTEPSTAEARPLPKFRIKLKSKAFNNS

SEQ ID NO: 47668 - protein, 1283 aa, Arabidopsis thaliana
  peptide (1)..(1283): Ceres Seq. ID no. 13647336
  misc_feature (1)..(291): Pfam Name: Peptidase family M1 Pfam Description: Peptidase family M1
  misc_feature (459)..(796): Homolog of NCBI NO: 24662032 NR Description: TBP-associated factor 2 CG6711-PA [Drosophila
  misc_feature (1)..(290): Homolog of NCBI NO: 24662032 NR Description: TBP-associated factor 2 CG6711-PA [Drosophila
  misc_feature (459)..(796): Homolog of NCBI NO: 17647989 NR Description: TBP-associated factor 2; TBP-associated factor
  misc_feature (1)..(290): Homolog of NCBI NO: 17647989 NR Description: TBP-associated factor 2; TBP-associated factor
  misc_feature (459)..(796): Homolog of NCBI NO: 2739087 NR Description: cofactor of initiator function [Homo sapiens]
  misc_feature (1)..(369): Homolog of NCBI NO: 2739087 NR Description: cofactor of initiator function [Homo sapiens]
  misc_feature (459)..(796): Homolog of NCBI NO: 4507347 NR Description: TBP-associated factor 2
  misc_feature (1)..(369): Homolog of NCBI NO: 4507347 NR Description: TBP-associated factor 2
  misc_feature (459)..(796): Homolog of NCBI NO: 2827282 NR Description: TATA binding protein associated factor [Homo
  misc_feature (1)..(369): Homolog of NCBI NO: 2827282 NR Description: TATA binding protein associated factor [Homo
MEYVGVLKREDTANLLINCCKPSKDLSEQLDSVTLENGSQSSGEAKQNVKLIRINYWVEKIESGIHFDGNIVHTDNQMRRARCWFPCIDDEYHRCSFDLEFTVPHNFVAVSVGKLLYQVMCKEDTTQKTYVYELAIPIAPRWVSLVAGPLEILPDQTNFLISNLCLPHDLSRLRNTMEFFHEAYSYYEDYLSANFPFGFYKQVFLPPEMVVTSSTSGASLSIFSSHILYDERVIDQTIDTRIKLASALAKQWFGVYITPESPNDDWLLDGLAGFLTDMFIKQFLGNNEARYRRYKANCAVCKADDSGAMCLSSSPSCRDLFGTHSIGMHGKIRSWKSGAVLQMLEKQMGSDSFRKILQKIISRAKDPSNSIRSLSTKEFRQFANKIGNLERPFLKEFFQRWVASYGCPVLRIGLSYNKRKNNVEMAALRECTAALDARLSVIGATSDSESRDVDAGWPGIMSIRVYELDGMSDHPKLPMAGDRWQLLELPCHSKLAAKRYQKPKKGGKPDGAEDNVDAIAPLENKTSIESPLAWIKADPEMEYIAEIHLHQPLQMWVNQLEKDGDVVAQAQAIASLEALKQHSFSIVNALKNVLTDSKVFWRIRIAAAFALAKTASEESDWAGLQHLIKFYKSRRFDAEIGLPKPNDFRDFPEYFVLEAIPHAIAIVRGAEGKSPREAVEFILQLLKYNDNSGNSYSDVFWLAVLVQSVGDLEFCQQSLTFLAPLLKRIDRLLQFDRLMPSYNGILTISCIRTLAQTALKLSDSISFDHICKLIEPFRNSDTILQIRIEGSRALLDIEYQSKGISSALLLFMKYLVEESSLRGQVKLCVHTMRLCQIAVGCDSDDCVDTVTLLDLLHLFKSHVVFNNELLRYYLFCIFQILAGRPPTLFGVPKEKPLQLVDVEACIEPKNVFLVPGAEAGEPSLSALGDAKGQSLDVAPYGVPIIPQEMFMPIVPELMLPEPVAAYDETQHLEPRMESQNQPSHENPIVHEIPSDVEGPTEELAHREANPPTKEPQKEPDVVSVSVSHEVKKSVIRIKVRPSGATSRAEGSARTIERSQGIVVRHDIDRGQTSSASVDAPQRISTDAVSISNQNHVEEVNSCHDVGSRMTASIGSVKFASEGDIFGKELQCTAESGKPSTSQKADNNNRTVPPSFLPLDHSMENEAQQKYASLQTLSIGKEKEKKKDKEKKEKKRKREDPVYLEKKRLKKEKKRKEKEMAKLVSSTTDPAKKKIESVAEVKEEEPSDGAMLIKVEPKTEPSTAEARPLPKFRIKLKSKAFNNS

SEQ ID NO: 47669 - DNA, 1525 bp, Arabidopsis thaliana; identical to SEQ ID NO: 41191
  misc_feature (1)..(1525): Ceres Seq. ID no. 12323934
  misc_feature: MA Experiment ID: 20000180 Result: Up-regulated in Transcription
  misc_feature: MA Experiment 20000180 PARAMETER Experiment Name: At_Germinating_Seeds_P Parameter: Age (hr) Value: 24 vs. 0
  misc_feature: MA Experiment 20000180 PARAMETER Experiment Name: At_Germinating_Seeds_P Parameter: Tissue Value: Germinating Seeds
  misc_feature: MA Experiment ID: 20000185 Result: Up-regulated in Transcription
  misc_feature: MA Experiment 20000185 PARAMETER Experiment Name: At_Roots__P Parameter: Age (day) Value: 7 vs. 21
  misc_feature: MA Experiment 20000185 PARAMETER Experiment Name: At_Roots__P Parameter: Organism Value: A. thaliana
  misc_feature: MA Experiment 20000185 PARAMETER Experiment Name: At_Roots__P Parameter: Tissue Value: Roots vs. Whole Plant
  misc_feature: MA Experiment ID: 20000211 Result: Up-regulated in Transcription
  misc_feature: MA Experiment 20000211 PARAMETER Experiment Name: At_0.001percent_MeJA__P Parameter: Age (day) Value: 14
  misc_feature: MA Experiment 20000211 PARAMETER Experiment Name: At_0.001percent_MeJA__P Parameter: Organism Value: A. thaliana
  misc_feature: MA Experiment 20000211 PARAMETER Experiment Name: At_0.001percent_MeJA__P Parameter: Plant Line Value: WS
  misc_feature: MA Experiment 20000211 PARAMETER Experiment Name: At_0.001percent_MeJA__P Parameter: Timepoint (hr) Value: 1
  misc_feature: MA Experiment 20000211 PARAMETER Experiment Name: At_0.001percent_MeJA__P Parameter: Tissue Value: Aerial
  misc_feature: MA Experiment 20000211 PARAMETER Experiment Name: At_0.001percent_MeJA__P Parameter: Treatment Value: 0.001percent MeJA vs. No Treatment
  misc_feature: MA Experiment ID: 20000227 Result: Down-regulated in Transcription
  misc_feature: MA Experiment 20000227 PARAMETER Experiment Name: At_Root-Tips-vs-Tops_P Parameter: Tissue Value: Root Tips vs. Root Tops
  misc_feature: MA Experiment ID: 20000265 Result: Up-regulated in Transcription
  misc_feature: MA Experiment 20000265 PARAMETER Experiment Name: At_Open_Flower_P Parameter: Age (day) Value: 21
  misc_feature: MA Experiment 20000265 PARAMETER Experiment Name: At_Open_Flower_P Parameter: Plant Line Value: WS
  misc_feature: MA Experiment 20000265 PARAMETER Experiment Name: At_Open_Flower_P Parameter: Tissue Value: Closed Flower vs. Whole Plant
  misc_feature: MA Experiment ID: 20000286 Result: Up-regulated in Transcription
  misc_feature: MA Experiment 20000286 PARAMETER Experiment Name: At_Open_Flower_P Parameter: Age (day) Value: 21
  misc_feature: MA Experiment 20000286 PARAMETER Experiment Name: At_Open_Flower_P Parameter: Plant Line Value: WS
  misc_feature: MA Experiment 20000286 PARAMETER Experiment Name: At_Open_Flower_P Parameter: Tissue Value: Half Open vs. Whole Plant
  misc_feature: MA Experiment ID: 20000437 Result: Down-regulated in Transcription
  misc_feature: MA Experiment 20000437 PARAMETER Experiment Name: At_Drought_P Parameter: Age (day) Value: 8
  misc_feature: MA Experiment 20000437 PARAMETER Experiment Name: At_Drought_P Parameter: Organism Value: A. thaliana
  misc_feature: MA Experiment 20000437 PARAMETER Experiment Name: At_Drought_P Parameter: Plant Line Value: WS
  misc_feature: MA Experiment 20000437 PARAMETER Experiment Name: At_Drought_P Parameter: Timepoint (hr) Value: 24
  misc_feature: MA Experiment 20000437 PARAMETER Experiment Name: At_Drought_P Parameter: Tissue Value: Whole Plant
  misc_feature: MA Experiment 20000437 PARAMETER Experiment Name: At_Drought_P Parameter: Treatment Value: Drought vs. No Drought
  misc_feature: MA Experiment ID: 20000439 Result: Up-regulated in Transcription
  misc_feature: MA Experiment 20000439 PARAMETER Experiment Name: At_Roots__P Parameter: Age (day) Value: 14 vs. 21
  misc_feature: MA Experiment 20000439 PARAMETER Experiment Name: At_Roots__P Parameter: Organism Value: A. thaliana
  misc_feature: MA Experiment 20000439 PARAMETER Experiment Name: At_Roots__P Parameter: Tissue Value: Roots vs. Whole Plant
  misc_feature: MA Experiment ID: 20000527 Result: Down-regulated in Transcription
  misc_feature: MA Experiment 20000527 PARAMETER Experiment Name: At_10percent_PEG_P Parameter: Age (day) Value: 20
  misc_feature: MA Experiment 20000527 PARAMETER Experiment Name: At_10percent_PEG_P Parameter: Organism Value: A. thaliana
  misc_feature: MA Experiment 20000527 PARAMETER Experiment Name: At_10percent_PEG_P Parameter: Plant Line Value: WS
  misc_feature: MA Experiment 20000527 PARAMETER Experiment Name: At_10percent_PEG_P Parameter: Timepoint (day) Value: 20
  misc_feature: MA Experiment 20000527 PARAMETER Experiment Name: At_10percent_PEG_P Parameter: Tissue Value: Whole Plant
  misc_feature: MA Experiment 20000527 PARAMETER Experiment Name: At_10percent_PEG_P Parameter: Treatment Value: 10percent PEG vs. No Treatment
  misc_feature: MA Experiment ID: 20000574 Result: Down-regulated in Transcription
  misc_feature: MA Experiment 20000574 PARAMETER Experiment Name: At_100uM_ABA_Mutants__P Parameter: Organism Value: A. thaliana
  misc_feature: MA Experiment 20000574 PARAMETER Experiment Name: At_100uM_ABA_Mutants__P Parameter: Plant Line Value: CS23 vs. Ler wt
  misc_feature: MA Experiment 20000574 PARAMETER Experiment Name: At_100uM_ABA_Mutants__P Parameter: Timepoint (hr) Value: N/A
  misc_feature: MA Experiment 20000574 PARAMETER Experiment Name: At_100uM_ABA_Mutants__P Parameter: Tissue Value: Whole Plant
  misc_feature: MA Experiment 20000574 PARAMETER Experiment Name: At_100uM_ABA_Mutants__P Parameter: Treatment Value: None
  misc_feature: MA Experiment ID: 20000794 Result: Up-regulated in Transcription
  misc_feature: MA Experiment 20000794 PARAMETER Experiment Name: At_Petals_P Parameter: Age (day) Value: 23-25 days
  misc_feature: MA Experiment 20000794 PARAMETER Experiment Name: At_Petals_P Parameter: Plant Line Value: WS
  misc_feature: MA Experiment 20000794 PARAMETER Experiment Name: At_Petals_P Parameter: Tissue Value: Petals vs. Whole plant
  misc_feature: MA Experiment ID: 20001248 Result: Down-regulated in Transcription
  misc_feature: MA Experiment 20001248 PARAMETER Experiment Name: At_Far-red-induction_P Parameter: Age (day) Value: 7
  misc_feature: MA Experiment 20001248 PARAMETER Experiment Name: At_Far-red-induction_P Parameter: Light Value: Far-red vs. White
  misc_feature: MA Experiment 20001248 PARAMETER Experiment Name: At_Far-red-induction_P Parameter: Organism Value: A. thaliana
  misc_feature: MA Experiment 20001248 PARAMETER Experiment Name: At_Far-red-induction_P Parameter: Plant Line Value: Columbia
  misc_feature: MA Experiment 20001248 PARAMETER Experiment Name: At_Far-red-induction_P Parameter: Timepoint (hr) Value: 4
  misc_feature: MA Experiment 20001248 PARAMETER Experiment Name: At_Far-red-induction_P Parameter: Tissue Value: Whole Plant
  misc_feature: MA Experiment ID: 20001450 Result: Down-regulated in Transcription
  misc_feature: MA Experiment 20001450 PARAMETER Experiment Name: At_Far-red-induction_P Parameter: Age (day) Value: 7
  misc_feature: MA Experiment 20001450 PARAMETER Experiment Name: At_Far-red-induction_P Parameter: Light Value: Far-red vs. White
  misc_feature: MA Experiment 20001450 PARAMETER Experiment Name: At_Far-red-induction_P Parameter: Organism Value: A. thaliana
  misc_feature: MA Experiment 20001450 PARAMETER Experiment Name: At_Far-red-induction_P Parameter: Plant Line Value: Columbia
  misc_feature: MA Experiment 20001450 PARAMETER Experiment Name: At_Far-red-induction_P Parameter: Timepoint (hr) Value: 8
  misc_feature: MA Experiment 20001450 PARAMETER Experiment Name: At_Far-red-induction_P Parameter: Tissue Value: Whole Plant
  misc_feature: MA Experiment ID: 20001451 Result: Down-regulated in Transcription
  misc_feature: MA Experiment 20001451 PARAMETER Experiment Name: At_Far-red-induction_P Parameter: Age (day) Value: 7
  misc_feature: MA Experiment 20001451 PARAMETER Experiment Name: At_Far-red-induction_P Parameter: Light Value: Far-red vs. White
  misc_feature: MA Experiment 20001451 PARAMETER Experiment Name: At_Far-red-induction_P Parameter: Organism Value: A. thaliana
  misc_feature: MA Experiment 20001451 PARAMETER Experiment Name: At_Far-red-induction_P Parameter: Plant Line Value: Columbia
  misc_feature: MA Experiment 20001451 PARAMETER Experiment Name: At_Far-red-induction_P Parameter: Timepoint (hr) Value: 24
  misc_feature: MA Experiment 20001451 PARAMETER Experiment Name: At_Far-red-induction_P Parameter: Tissue Value: Whole Plant
  misc_feature: MA Experiment ID: 20001911 Result: Down-regulated in Transcription
  misc_feature: MA Experiment 20001911 PARAMETER Experiment Name: At_Drought_Reproduction_P Parameter: Age (day) Value: 40
  misc_feature: MA Experiment 20001911 PARAMETER Experiment Name: At_Drought_Reproduction_P Parameter: Organism Value: A. thaliana
  misc_feature: MA Experiment 20001911 PARAMETER Experiment Name: At_Drought_Reproduction_P Parameter: Plant Line Value: WS
  misc_feature: MA Experiment 20001911 PARAMETER Experiment Name: At_Drought_Reproduction_P Parameter: Timepoint (day) Value: 10
  misc_feature: MA Experiment 20001911 PARAMETER Experiment Name: At_Drought_Reproduction_P Parameter: Tissue Value: Flowers
  misc_feature: MA Experiment 20001911 PARAMETER Experiment Name: At_Drought_Reproduction_P Parameter: Treatment Value: Drought vs. No Drought

SEQ ID NO: 47670 - protein, 465 aa, Arabidopsis thaliana; identical to SEQ ID NO: 41192
  peptide (1)..(465): Ceres Seq. ID no. 12323935
  misc_feature (62)..(447): Homolog of NCBI NO: 13324677 NR Description: ectonucleotide pyrophosphatase/phosphodiesterase 1
  misc_feature (62)..(447): Homolog of NCBI NO: 23503088 NR Description: Ectonucleotide pyrophosphatase/phosphodiesterase (E-NPP 1) (Phosphodiesterase I/nucleotide pyrophosphatase 1)
  misc_feature (62)..(447): Homolog of NCBI NO: 9453796 NR Description: dJ131F15.2 (phosphodiesterase I/nucleotide
  misc_feature (217)..(457): Homolog of NCBI NO: 13877571 NR Description: nucleotide pyrophosphatase-like protein
  misc_feature (15)..(457): Homolog of NCBI NO: 12081942 NR Description: nucleotide pyrophosphatase-like protein [Spinacia
  misc_feature (22)..(458): Homolog of NCBI NO: 34903578 NR Description: nucleotide pyrophosphatase homolog
  misc_feature (55)..(457): Homolog of NCBI NO: 15233659 NR Description: nucleotide pyrophosphatase - like protein
  misc_feature (5)..(465): Homolog of NCBI NO: 27808612 NR Description: At4g29690 [Arabidopsis thaliana]
  misc_feature (5)..(465): Homolog of NCBI NO: 15233662 NR Description: nucleotide pyrophosphatase - like protein
  misc_feature (5)..(465): Homolog of NCBI NO: 15233665 NR Description: nucleotide pyrophosphatase -like protein
  misc_feature (62)..(447): Homolog of NCBI NO: 13324677 NR Description: ectonucleotide pyrophosphatase/phosphodiesterase 1
  misc_feature (62)..(447): Homolog of NCBI NO: 23503088 NR Description: Ectonucleotide pyrophosphatase/phosphodiesterase (E-NPP 1) (Phosphodiesterase I/nucleotide pyrophosphatase 1)
  misc_feature (62)..(447): Homolog of NCBI NO: 9453796 NR Description: dJ131F15.2 (phosphodiesterase I/nucleotide
  misc_feature (217)..(457): Homolog of NCBI NO: 13877571 NR Description: nucleotide pyrophosphatase-like protein
  misc_feature (15)..(457): Homolog of NCBI NO: 12081942 NR Description: nucleotide pyrophosphatase-like protein [Spinacia
  misc_feature (22)..(458): Homolog of NCBI NO: 34903578 NR Description: nucleotide pyrophosphatase homolog
  misc_feature (55)..(457): Homolog of NCBI NO: 15233659 NR Description: nucleotide pyrophosphatase - like protein
  misc_feature (5)..(465): Homolog of NCBI NO: 27808612 NR Description: At4g29690 [Arabidopsis thaliana]
  misc_feature (5)..(465): Homolog of NCBI NO: 15233662 NR Description: nucleotide pyrophosphatase - like protein
  misc_feature (5)..(465): Homolog of NCBI NO: 15233665 NR Description: nucleotide pyrophosphatase -like protein

SEQ ID NO: 47671 - protein, 461 aa, Arabidopsis thaliana; identical to SEQ ID NO: 41193
  peptide (1)..(461): Ceres Seq. ID no. 12323936
  misc_feature (58)..(443): Homolog of NCBI NO: 23503088 NR Description: Ectonucleotide pyrophosphatase/phosphodiesterase (E-NPP 1) (Phosphodiesterase I/nucleotide pyrophosphatase 1)
  misc_feature (58)..(443): Homolog of NCBI NO: 13324677 NR Description: ectonucleotide pyrophosphatase/phosphodiesterase 1
  misc_feature (58)..(443): Homolog of NCBI NO: 9453796 NR Description: dJ131F15.2 (phosphodiesterase I/nucleotide
  misc_feature (213)..(453): Homolog of NCBI NO: 13877571 NR Description: nucleotide pyrophosphatase-like protein
  misc_feature (11)..(453): Homolog of NCBI NO: 12081942 NR Description: nucleotide pyrophosphatase-like protein [Spinacia
  misc_feature (18)..(454): Homolog of NCBI NO: 34903578 NR Description: nucleotide pyrophosphatase homolog
  misc_feature (51)..(453): Homolog of NCBI NO: 15233659 NR Description: nucleotide pyrophosphatase - like protein
  misc_feature (1)..(461): Homolog of NCBI NO: 27808612 NR Description: At4g29690 [Arabidopsis thaliana]
  misc_feature (1)..(461): Homolog of NCBI NO: 15233662 NR Description: nucleotide pyrophosphatase - like protein
  misc_feature (1)..(461): Homolog of NCBI NO: 15233665 NR Description: nucleotide pyrophosphatase -like protein
  misc_feature (58)..(443): Homolog of NCBI NO: 23503088 NR Description: Ectonucleotide pyrophosphatase/phosphodiesterase (E-NPP 1) (Phosphodiesterase I/nucleotide pyrophosphatase 1)
  misc_feature (58)..(443): Homolog of NCBI NO: 13324677 NR Description: ectonucleotide pyrophosphatase/phosphodiesterase 1
  misc_feature (58)..(443): Homolog of NCBI NO: 9453796 NR Description: dJ131F15.2 (phosphodiesterase I/nucleotide
  misc_feature (213)..(453): Homolog of NCBI NO: 13877571 NR Description: nucleotide pyrophosphatase-like protein
  misc_feature (11)..(453): Homolog of NCBI NO: 12081942 NR Description: nucleotide pyrophosphatase-like protein [Spinacia
  misc_feature (18)..(454): Homolog of NCBI NO: 34903578 NR Description: nucleotide pyrophosphatase homolog
  misc_feature (51)..(453): Homolog of NCBI NO: 15233659 NR Description: nucleotide pyrophosphatase - like protein
  misc_feature (1)..(461): Homolog of NCBI NO: 27808612 NR Description: At4g29690 [Arabidopsis thaliana]
  misc_feature (1)..(461): Homolog of NCBI NO: 15233662 NR Description: nucleotide pyrophosphatase - like protein
  misc_feature (1)..(461): Homolog of NCBI NO: 15233665 NR Description: nucleotide pyrophosphatase -like protein

SEQ ID NO: 47672 - protein, 400 aa, Arabidopsis thaliana; identical to SEQ ID NO: 41194
  peptide (1)..(400): Ceres Seq. ID no. 12323937
  misc_feature (1)..(382): Homolog of NCBI NO: 13324677 NR Description: ectonucleotide pyrophosphatase/phosphodiesterase 1
  misc_feature (1)..(382): Homolog of NCBI NO: 23503088 NR Description: Ectonucleotide pyrophosphatase/phosphodiesterase (E-NPP 1) (Phosphodiesterase I/nucleotide pyrophosphatase 1)
  misc_feature (1)..(382): Homolog of NCBI NO: 9453796 NR Description: dJ131F15.2 (phosphodiesterase I/nucleotide
  misc_feature (152)..(392): Homolog of NCBI NO: 13877571 NR Description: nucleotide pyrophosphatase-like protein
  misc_feature (1)..(392): Homolog of NCBI NO: 12081942 NR Description: nucleotide pyrophosphatase-like protein [Spinacia
  misc_feature (1)..(393): Homolog of NCBI NO: 34903578 NR Description: nucleotide pyrophosphatase homolog
  misc_feature (1)..(392): Homolog of NCBI NO: 15233659 NR Description: nucleotide pyrophosphatase - like protein
  misc_feature (1)..(400): Homolog of NCBI NO: 27808612 NR Description: At4g29690 [Arabidopsis thaliana]
  misc_feature (1)..(400): Homolog of NCBI NO: 15233662 NR Description: nucleotide pyrophosphatase - like protein
  misc_feature (1)..(400): Homolog of NCBI NO: 15233665 NR Description: nucleotide pyrophosphatase -like protein
  misc_feature (1)..(382): Homolog of NCBI NO: 13324677 NR Description: ectonucleotide pyrophosphatase/phosphodiesterase 1
  misc_feature (1)..(382): Homolog of NCBI NO: 23503088 NR Description: Ectonucleotide pyrophosphatase/phosphodiesterase (E-NPP 1) (Phosphodiesterase I/nucleotide pyrophosphatase 1)
  misc_feature (1)..(382): Homolog of NCBI NO: 9453796 NR Description: dJ131F15.2 (phosphodiesterase I/nucleotide
  misc_feature (152)..(392): Homolog of NCBI NO: 13877571 NR Description: nucleotide pyrophosphatase-like protein
  misc_feature (1)..(392): Homolog of NCBI NO: 12081942 NR Description: nucleotide pyrophosphatase-like protein [Spinacia
  misc_feature (1)..(393): Homolog of NCBI NO: 34903578 NR Description: nucleotide pyrophosphatase homolog
  misc_feature (1)..(392): Homolog of NCBI NO: 15233659 NR Description: nucleotide pyrophosphatase - like protein
  misc_feature (1)..(400): Homolog of NCBI NO: 27808612 NR Description: At4g29690 [Arabidopsis thaliana]
  misc_feature (1)..(400): Homolog of NCBI NO: 15233662 NR Description: nucleotide pyrophosphatase - like protein
  misc_feature (1)..(400): Homolog of NCBI NO: 15233665 NR Description: nucleotide pyrophosphatase -like protein

SEQ ID NO: 47673 - DNA, 1729 bp, Arabidopsis thaliana
  misc_feature (1)..(1729): Ceres Seq. ID no. 13647368
  misc_feature: MA Experiment ID: 20000179 Result: Up-regulated in Transcription
  misc_feature: MA Experiment 20000179 PARAMETER Experiment Name: At_Germinating_Seeds_P Parameter: Age (hr) Value: 6 vs. 0
  misc_feature: MA Experiment 20000179 PARAMETER Experiment Name: At_Germinating_Seeds_P Parameter: Tissue Value: Germinating Seeds
  misc_feature: MA Experiment ID: 20000180 Result: Up-regulated in Transcription
  misc_feature: MA Experiment 20000180 PARAMETER Experiment Name: At_Germinating_Seeds_P Parameter: Age (hr) Value: 24 vs. 0
  misc_feature: MA Experiment 20000180 PARAMETER Experiment Name: At_Germinating_Seeds_P Parameter: Tissue Value: Germinating Seeds
  misc_feature: MA Experiment ID: 20000184 Result: Down-regulated in Transcription
  misc_feature: MA Experiment 20000184 PARAMETER Experiment Name: At_Shoots__P Parameter: Age (day) Value: 7
  misc_feature: MA Experiment 20000184 PARAMETER Experiment Name: At_Shoots__P Parameter: Tissue Value: Shoots vs. Whole Plant
  misc_feature: MA Experiment ID: 20000185 Result: Down-regulated in Transcription
  misc_feature: MA Experiment 20000185 PARAMETER Experiment Name: At_Roots__P Parameter: Age (day) Value: 7 vs. 21
  misc_feature: MA Experiment 20000185 PARAMETER Experiment Name: At_Roots__P Parameter: Organism Value: A. thaliana
  misc_feature: MA Experiment 20000185 PARAMETER Experiment Name: At_Roots__P Parameter: Tissue Value: Roots vs. Whole Plant
  misc_feature: MA Experiment ID: 20000227 Result: Down-regulated in Transcription
  misc_feature: MA Experiment 20000227 PARAMETER Experiment Name: At_Root-Tips-vs-Tops_P Parameter: Tissue Value: Root Tips vs. Root Tops
  misc_feature: MA Experiment ID: 20000235 Result: Down-regulated in Transcription
  misc_feature: MA Experiment 20000235 PARAMETER Experiment Name: At_Siliques_P Parameter: Age (day) Value: 21
  misc_feature: MA Experiment 20000235 PARAMETER Experiment Name: At_Siliques_P Parameter: Organism Value: A. thaliana
  misc_feature: MA Experiment 20000235 PARAMETER Experiment Name: At_Siliques_P Parameter: Plant Line Value: WS
  misc_feature: MA Experiment 20000235 PARAMETER Experiment Name: At_Siliques_P Parameter: Tissue Value: 5-10mm Siliques vs. Whole Plant
  misc_feature: MA Experiment ID: 20000264 Result: Up-regulated in Transcription
  misc_feature: MA Experiment 20000264 PARAMETER Experiment Name: At_Open_Flower_P Parameter: Age (day) Value: 21
  misc_feature: MA Experiment 20000264 PARAMETER Experiment Name: At_Open_Flower_P Parameter: Plant Line Value: WS
  misc_feature: MA Experiment 20000264 PARAMETER Experiment Name: At_Open_Flower_P Parameter: Tissue Value: Open Flower vs. Whole Plant
  misc_feature: MA Experiment ID: 20000438 Result: Down-regulated in Transcription
  misc_feature: MA Experiment 20000438 PARAMETER Experiment Name: At_Shoots__P Parameter: Age (day) Value: 14
  misc_feature: MA Experiment 20000438 PARAMETER Experiment Name: At_Shoots__P Parameter: Tissue Value: Shoots vs. Whole Plant
  misc_feature: MA Experiment ID: 20000439 Result: Down-regulated in Transcription
  misc_feature: MA Experiment 20000439 PARAMETER Experiment Name: At_Roots__P Parameter: Age (day) Value: 14 vs. 21
  misc_feature: MA Experiment 20000439 PARAMETER Experiment Name: At_Roots__P Parameter: Organism Value: A. thaliana
  misc_feature: MA Experiment 20000439 PARAMETER Experiment Name: At_Roots__P Parameter: Tissue Value: Roots vs. Whole Plant
  misc_feature: MA Experiment ID: 20000794 Result: Up-regulated in Transcription
  misc_feature: MA Experiment 20000794 PARAMETER Experiment Name: At_Petals_P Parameter: Age (day) Value: 23-25 days
  misc_feature: MA Experiment 20000794 PARAMETER Experiment Name: At_Petals_P Parameter: Plant Line Value: WS
  misc_feature: MA Experiment 20000794 PARAMETER Experiment Name: At_Petals_P Parameter: Tissue Value: Petals vs. Whole plant
  misc_feature: MA Experiment ID: 20001248 Result: Up-regulated in Transcription
  misc_feature: MA Experiment 20001248 PARAMETER Experiment Name: At_Far-red-induction_P Parameter: Age (day) Value: 7
  misc_feature: MA Experiment 20001248 PARAMETER Experiment Name: At_Far-red-induction_P Parameter: Light Value: Far-red vs. White
  misc_feature: MA Experiment 20001248 PARAMETER Experiment Name: At_Far-red-induction_P Parameter: Organism Value: A. thaliana
  misc_feature: MA Experiment 20001248 PARAMETER Experiment Name: At_Far-red-induction_P Parameter: Plant Line Value: Columbia
  misc_feature: MA Experiment 20001248 PARAMETER Experiment Name: At_Far-red-induction_P Parameter: Timepoint (hr) Value: 4
  misc_feature: MA Experiment 20001248 PARAMETER Experiment Name: At_Far-red-induction_P Parameter: Tissue Value: Whole Plant
  misc_feature: MA Experiment ID: 20001450 Result: Up-regulated in Transcription
  misc_feature: MA Experiment 20001450 PARAMETER Experiment Name: At_Far-red-induction_P Parameter: Age (day) Value: 7
  misc_feature: MA Experiment 20001450 PARAMETER Experiment Name: At_Far-red-induction_P Parameter: Light Value: Far-red vs. White
  misc_feature: MA Experiment 20001450 PARAMETER Experiment Name: At_Far-red-induction_P Parameter: Organism Value: A. thaliana
  misc_feature: MA Experiment 20001450 PARAMETER Experiment Name: At_Far-red-induction_P Parameter: Plant Line Value: Columbia
  misc_feature: MA Experiment 20001450 PARAMETER Experiment Name: At_Far-red-induction_P Parameter: Timepoint (hr) Value: 8
  misc_feature: MA Experiment 20001450 PARAMETER Experiment Name: At_Far-red-induction_P Parameter: Tissue Value: Whole Plant
  misc_feature: MA Experiment ID: 20001451 Result: Up-regulated in Transcription
  misc_feature: MA Experiment 20001451 PARAMETER Experiment Name: At_Far-red-induction_P Parameter: Age (day) Value: 7
  misc_feature: MA Experiment 20001451 PARAMETER Experiment Name: At_Far-red-induction_P Parameter: Light Value: Far-red vs. White
  misc_feature: MA Experiment 20001451 PARAMETER Experiment Name: At_Far-red-induction_P Parameter: Organism Value: A. thaliana
  misc_feature: MA Experiment 20001451 PARAMETER Experiment Name: At_Far-red-induction_P Parameter: Plant Line Value: Columbia
  misc_feature: MA Experiment 20001451 PARAMETER Experiment Name: At_Far-red-induction_P Parameter: Timepoint (hr) Value: 24
  misc_feature: MA Experiment 20001451 PARAMETER Experiment Name: At_Far-red-induction_P Parameter: Tissue Value: Whole Plant
  misc_feature: MA Experiment ID: 20001556 Result: Down-regulated in Transcription
  misc_feature: MA Experiment 20001556 PARAMETER Experiment Name: At_Drought_Soil_Dry_P Parameter: Age (day) Value: 26
  misc_feature: MA Experiment 20001556 PARAMETER Experiment Name: At_Drought_Soil_Dry_P Parameter: Organism Value: A. thaliana
  misc_feature: MA Experiment 20001556 PARAMETER Experiment Name: At_Drought_Soil_Dry_P Parameter: Plant Line Value: WS
  misc_feature: MA Experiment 20001556 PARAMETER Experiment Name: At_Drought_Soil_Dry_P Parameter: Post Timepoint (hr) Value: None
  misc_feature: MA Experiment 20001556 PARAMETER Experiment Name: At_Drought_Soil_Dry_P Parameter: Post-Treatment Value: None
  misc_feature: MA Experiment 20001556 PARAMETER Experiment Name: At_Drought_Soil_Dry_P Parameter: Timepoint (day) Value: 12
  misc_feature: MA Experiment 20001556 PARAMETER Experiment Name: At_Drought_Soil_Dry_P Parameter: Treatment Value: Drought vs. No Drought
  misc_feature: MA Experiment ID: 20001557 Result: Down-regulated in Transcription
  misc_feature: MA Experiment 20001557 PARAMETER Experiment Name: At_Drought_Soil_Dry_P Parameter: Age (day) Value: 27
  misc_feature: MA Experiment 20001557 PARAMETER Experiment Name: At_Drought_Soil_Dry_P Parameter: Organism Value: A. thaliana
  misc_feature: MA Experiment 20001557 PARAMETER Experiment Name: At_Drought_Soil_Dry_P Parameter: Plant Line Value: WS
  misc_feature: MA Experiment 20001557 PARAMETER Experiment Name: At_Drought_Soil_Dry_P Parameter: Post Timepoint (hr) Value: 3
  misc_feature: MA Experiment 20001557 PARAMETER Experiment Name: At_Drought_Soil_Dry_P Parameter: Post-Treatment Value: Re-Water vs. No Drought
  misc_feature: MA Experiment 20001557 PARAMETER Experiment Name: At_Drought_Soil_Dry_P Parameter: Timepoint (day) Value: 13
  misc_feature: MA Experiment 20001557 PARAMETER Experiment Name: At_Drought_Soil_Dry_P Parameter: Treatment Value: Drought vs. No Drought
  misc_feature: MA Experiment ID: 20001558 Result: Down-regulated in Transcription
  misc_feature: MA Experiment 20001558 PARAMETER Experiment Name: At_Drought_Soil_Dry_P Parameter: Age (day) Value: 27
  misc_feature: MA Experiment 20001558 PARAMETER Experiment Name: At_Drought_Soil_Dry_P Parameter: Organism Value: A. thaliana
  misc_feature: MA Experiment 20001558 PARAMETER Experiment Name: At_Drought_Soil_Dry_P Parameter: Plant Line Value: WS
  misc_feature: MA Experiment 20001558 PARAMETER Experiment Name: At_Drought_Soil_Dry_P Parameter: Post Timepoint (hr) Value: 6
  misc_feature: MA Experiment 20001558 PARAMETER Experiment Name: At_Drought_Soil_Dry_P Parameter: Post-Treatment Value: Re-Water vs. No Drought
  misc_feature: MA Experiment 20001558 PARAMETER Experiment Name: At_Drought_Soil_Dry_P Parameter: Timepoint (day) Value: 13
  misc_feature: MA Experiment 20001558 PARAMETER Experiment Name: At_Drought_Soil_Dry_P Parameter: Treatment Value: Drought vs. No Drought
  misc_feature: MA Experiment ID: 20001559 Result: Down-regulated in Transcription
  misc_feature: MA Experiment 20001559 PARAMETER Experiment Name: At_Drought_Soil_Dry_P Parameter: Age (day) Value: 28
  misc_feature: MA Experiment 20001559 PARAMETER Experiment Name: At_Drought_Soil_Dry_P Parameter: Organism Value: A. thaliana
  misc_feature: MA Experiment 20001559 PARAMETER Experiment Name: At_Drought_Soil_Dry_P Parameter: Plant Line Value: WS
  misc_feature: MA Experiment 20001559 PARAMETER Experiment Name: At_Drought_Soil_Dry_P Parameter: Post Timepoint (hr) Value: 29
  misc_feature: MA Experiment 20001559 PARAMETER Experiment Name: At_Drought_Soil_Dry_P Parameter: Post-Treatment Value: Re-Water vs. No Drought
  misc_feature: MA Experiment 20001559 PARAMETER Experiment Name: At_Drought_Soil_Dry_P Parameter: Timepoint (day) Value: 14
  misc_feature: MA Experiment 20001559 PARAMETER Experiment Name: At_Drought_Soil_Dry_P Parameter: Treatment Value: Drought vs. No Drought
  misc_feature: MA Experiment ID: 20001560 Result: Down-regulated in Transcription
  misc_feature: MA Experiment 20001560 PARAMETER Experiment Name: At_Drought_Soil_Dry_P Parameter: Age (day) Value: 28
  misc_feature: MA Experiment 20001560 PARAMETER Experiment Name: At_Drought_Soil_Dry_P Parameter: Organism Value: A. thaliana
  misc_feature: MA Experiment 20001560 PARAMETER Experiment Name: At_Drought_Soil_Dry_P Parameter: Plant Line Value: WS
  misc_feature: MA Experiment 20001560 PARAMETER Experiment Name: At_Drought_Soil_Dry_P Parameter: Post Timepoint (hr) Value: None
  misc_feature: MA Experiment 20001560 PARAMETER Experiment Name: At_Drought_Soil_Dry_P Parameter: Post-Treatment Value: None
  misc_feature: MA Experiment 20001560 PARAMETER Experiment Name: At_Drought_Soil_Dry_P Parameter: Timepoint (day) Value: 14
  misc_feature: MA Experiment 20001560 PARAMETER Experiment Name: At_Drought_Soil_Dry_P Parameter: Treatment Value: Drought vs. No Drought
gagaaaaatccttacatcattttttttttgttatctttgtttcgtttttctggtagaagagagaagaaggagagacgaattggcagctaagcgattctctctctttctctctttctcttctcgtgtaatcttttggtgttcttgaaaccacttttttttttgttaattcctctgtttccttggaattgttttctgcttttttaagaagaaaaaaacgatgaatgtggtgcggagattaacgagtattgcctctggacgtaatttcgtttcttctgataacgtaggagaaactgagacgccgagatcaaagcctaaccagaatcgtgaagaaacagagtctacggaaactacgtcgtacgagaaagattctgtctcttcctcagagaactctgatcatttaccaaaggaaatccgtgaggatatggactgtggaatcatcaagggaaatggaacagaatctggacggattattaccaccaaaaagaagggtttgaatgatcaaaaagacaagacaatctcttacagagctgaacatgtaattggcactggctcattcggtgttgtctttcaggctaagtgcttagagacggaagaaaaagtagcaataaagaaagtgttacaggacaagagatacaaaaacagagaacttcagatcatgcgaatgcttgatcatcctaatgtcgttgagctcaagcattctttcttttccacgactgagaaagacgagctttatcttaaccttgttcttgagtatgtacccgagactatttaccgcgcttccagatcttacaccaagatgaatcagcatatgcctttgatttatattcagctctacacctatcagatttgccgtgctatgaattatctgcatcaagtggttggagtgtgtcaccgtgacattaagccgcagaatctgttggtcaataatgttacgcatgaagtaaagatatgcgattttgggagcgccaaaatgctgattccaggagaaccaaatatatcttacatatgctcaaggtattacagagctcctgaactcatatttggagcaaccgaatacacaagtgcgatcgatatgtggtctgtaggttgtgtcatggctgagctttttcttggacatcctctattccctggagaaaccagtgttgatcaattggtggagatcattaagattttagggacaccagcaagagaagagataaagaacatgaatcctcgttacaatgattttaagttccctcagatcaaagctcagccgtggcacaagattttccggagacaggtatctccagaagcaatggatcttgcctctagattgctccagtattcaccaaacctgagatgcacagcgcttgaagcatgtgcacacccattcttcgatgatctgagagacccgagagcatccttgcctaatggaagagcacttcctccattgtttgatttcacagctcaagaacttgctggggcatctgttgaactgcgtcatcgcttaatacctgagcatgcaaggaaatgaccatttgggttaatggctgcttctctacgcagatgttgatatataaatctttttttattttgagagtttcttgttcacaagtatagcattgtgctggttatgaaccctcactgacctctgcaaccacatcgactagcagtttgaaagtgtataattgtaagtttgtaactttgtagctttcattgttgcagacagaaatgcagaattttccgagtt

SEQ ID NO: 47674 - protein, 431 aa, Arabidopsis thaliana
  peptide (1)..(431): Ceres Seq. ID no. 13647369
  misc_feature (102)..(386): Pfam Name: Protein kinase domain Pfam Description: Protein kinase domain
  misc_feature (17)..(431): Homolog of NCBI NO: 7434276 NR Description: shaggy protein kinase (EC 2.7.1.-) 59
  misc_feature (52)..(431): Homolog of NCBI NO: 3702608 NR Description: shaggy kinase 7 [Petunia x hybrida]
  misc_feature (6)..(431): Homolog of NCBI NO: 7434282 NR Description: shaggy protein kinase (EC 2.7.1.-) 6 - common
  misc_feature (1)..(38): Homolog of NCBI NO: 10185114 NR Description: wound-induced GSK-3-like protein [Medicago sativa]
  misc_feature (1)..(430): Homolog of NCBI NO: 10185114 NR Description: wound-induced GSK-3-like protein [Medicago sativa]
  misc_feature (1)..(69): Homolog of NCBI NO: 11132756 NR Description: Shaggy-related protein kinase theta (ASK-theta)
  misc_feature (56)..(430): Homolog of NCBI NO: 11132756 NR Description: Shaggy-related protein kinase theta (ASK-theta)
  misc_feature (1)..(64): Homolog of NCBI NO: 15236918 NR Description: Shaggy related protein kinase tetha [Arabidopsis
  misc_feature (67)..(430): Homolog of NCBI NO: 15236918 NR Description: Shaggy related protein kinase tetha [Arabidopsis
  misc_feature (1)..(431): Homolog of NCBI NO: 15233049 NR Description: shaggy-related protein kinase beta [Arabidopsis
MNVVRRLTSIASGRNFVSSDNVGETETPRSKPNQNREETESTETTSYEKDSVSSSENSDHLPKEIREDMDCGIIKGNGTESGRIITTKKKGLNDQKDKTISYRAEHVIGTGSFGVVFQAKCLETEEKVAIKKVLQDKRYKNRELQIMRMLDHPNVVELKHSFFSTTEKDELYLNLVLEYVPETIYRASRSYTKMNQHMPLIYIQLYTYQICRAMNYLHQVVGVCHRDIKPQNLLVNNVTHEVKICDFGSAKMLIPGEPNISYICSRYYRAPELIFGATEYTSAIDMWSVGCVMAELFLGHPLFPGETSVDQLVEIIKILGTPAREEIKNMNPRYNDFKFPQIKAQPWHKIFRRQVSPEAMDLASRLLQYSPNLRCTALEACAHPFFDDLRDPRASLPNGRALPPLFDFTAQELAGASVELRHRLIPEHARK

SEQ ID NO: 47675 - protein, 363 aa, Arabidopsis thaliana
  peptide (1)..(363): Ceres Seq. ID no. 13647370
  misc_feature (34)..(318): Pfam Name: Protein kinase domain Pfam Description: Protein kinase domain
  misc_feature (1)..(363): Homolog of NCBI NO: 2911533 NR Description: Petunia Shaggy kinase 6 [Petunia x hybrida]
  misc_feature (1)..(363): Homolog of NCBI NO: 3236117 NR Description: shaggy kinase 6 [Petunia x hybrida]
  misc_feature (1)..(363): Homolog of NCBI NO: 7434277 NR Description: shaggy protein kinase (EC 2.7.1.-) 91
  misc_feature (1)..(363): Homolog of NCBI NO: 7434276 NR Description: shaggy protein kinase (EC 2.7.1.-) 59
  misc_feature (1)..(363): Homolog of NCBI NO: 3702608 NR Description: shaggy kinase 7 [Petunia x hybrida]
  misc_feature (1)..(363): Homolog of NCBI NO: 7434282 NR Description: shaggy protein kinase (EC 2.7.1.-) 6 - common
  misc_feature (1)..(362): Homolog of NCBI NO: 10185114 NR Description: wound-induced GSK-3-like protein [Medicago sativa]
  misc_feature (1)..(362): Homolog of NCBI NO: 11132756 NR Description: Shaggy-related protein kinase theta (ASK-theta)
  misc_feature (1)..(362): Homolog of NCBI NO: 15236918 NR Description: Shaggy related protein kinase tetha [Arabidopsis
  misc_feature (1)..(363): Homolog of NCBI NO: 15233049 NR Description: shaggy-related protein kinase beta [Arabidopsis
MDCGIIKGNGTESGRIITTKKKGLNDQKDKTISYRAEHVIGTGSFGVVFQAKCLETEEKVAIKKVLQDKRYKNRELQIMRMLDHPNVVELKHSFFSTTEKDELYLNLVLEYVPETIYRASRSYTKMNQHMPLIYIQLYTYQICRAMNYLHQVVGVCHRDIKPQNLLVNNVTHEVKICDFGSAKMLIPGEPNISYICSRYYRAPELIFGATEYTSAIDMWSVGCVMAELFLGHPLFPGETSVDQLVEIIKILGTPAREEIKNMNPRYNDFKFPQIKAQPWHKIFRRQVSPEAMDLASRLLQYSPNLRCTALEACAHPFFDDLRDPRASLPNGRALPPLFDFTAQELAGASVELRHRLIPEHARK

SEQ ID NO: 47676 - protein, 285 aa, Arabidopsis thaliana
  peptide (1)..(285): Ceres Seq. ID no. 13647371
  misc_feature (1)..(240): Pfam Name: Protein kinase domain Pfam Description: Protein kinase domain
  misc_feature (1)..(285): Homolog of NCBI NO: 2911533 NR Description: Petunia Shaggy kinase 6 [Petunia x hybrida]
  misc_feature (1)..(285): Homolog of NCBI NO: 3236117 NR Description: shaggy kinase 6 [Petunia x hybrida]
  misc_feature (1)..(285): Homolog of NCBI NO: 7434277 NR Description: shaggy protein kinase (EC 2.7.1.-) 91
  misc_feature (1)..(285): Homolog of NCBI NO: 7434276 NR Description: shaggy protein kinase (EC 2.7.1.-) 59
  misc_feature (1)..(285): Homolog of NCBI NO: 3702608 NR Description: shaggy kinase 7 [Petunia x hybrida]
  misc_feature (1)..(285): Homolog of NCBI NO: 7434282 NR Description: shaggy protein kinase (EC 2.7.1.-) 6 - common
  misc_feature (1)..(284): Homolog of NCBI NO: 10185114 NR Description: wound-induced GSK-3-like protein [Medicago sativa]
  misc_feature (1)..(284): Homolog of NCBI NO: 11132756 NR Description: Shaggy-related protein kinase theta (ASK-theta)
  misc_feature (1)..(284): Homolog of NCBI NO: 15236918 NR Description: Shaggy related protein kinase tetha [Arabidopsis
  misc_feature (1)..(285): Homolog of NCBI NO: 15233049 NR Description: shaggy-related protein kinase beta [Arabidopsis
MRMLDHPNVVELKHSFFSTTEKDELYLNLVLEYVPETIYRASRSYTKMNQHMPLIYIQLYTYQICRAMNYLHQVVGVCHRDIKPQNLLVNNVTHEVKICDFGSAKMLIPGEPNISYICSRYYRAPELIFGATEYTSAIDMWSVGCVMAELFLGHPLFPGETSVDQLVEIIKILGTPAREEIKNMNPRYNDFKFPQIKAQPWHKIFRRQVSPEAMDLASRLLQYSPNLRCTALEACAHPFFDDLRDPRASLPNGRALPPLFDFTAQELAGASVELRHRLIPEHARK

SEQ ID NO: 47677 - DNA, 1606 bp, Arabidopsis thaliana
  misc_feature (1)..(1606): Ceres Seq. ID no. 12725994
  misc_feature: MA Experiment ID: 20000452 Result: Up-regulated in Transcription
  misc_feature: MA Experiment 20000452 PARAMETER Experiment Name: At_CS6879_Shoots-Roots_P Parameter: Age (day) Value: 14
  misc_feature: MA Experiment 20000452 PARAMETER Experiment Name: At_CS6879_Shoots-Roots_P Parameter: Organism Value: A. thaliana
  misc_feature: MA Experiment 20000452 PARAMETER Experiment Name: At_CS6879_Shoots-Roots_P Parameter: Plant Line Value: CS6879 vs. WS
  misc_feature: MA Experiment 20000452 PARAMETER Experiment Name: At_CS6879_Shoots-Roots_P Parameter: Tissue Value: Shoots
  misc_feature: MA Experiment ID: 20001451 Result: Down-regulated in Transcription
  misc_feature: MA Experiment 20001451 PARAMETER Experiment Name: At_Far-red-induction_P Parameter: Age (day) Value: 7
  misc_feature: MA Experiment 20001451 PARAMETER Experiment Name: At_Far-red-induction_P Parameter: Light Value: Far-red vs. White
  misc_feature: MA Experiment 20001451 PARAMETER Experiment Name: At_Far-red-induction_P Parameter: Organism Value: A. thaliana
  misc_feature: MA Experiment 20001451 PARAMETER Experiment Name: At_Far-red-induction_P Parameter: Plant Line Value: Columbia
  misc_feature: MA Experiment 20001451 PARAMETER Experiment Name: At_Far-red-induction_P Parameter: Timepoint (hr) Value: 24
  misc_feature: MA Experiment 20001451 PARAMETER Experiment Name: At_Far-red-induction_P Parameter: Tissue Value: Whole Plant
  misc_feature: MA Experiment ID: 20001905 Result: Down-regulated in Transcription
  misc_feature: MA Experiment 20001905 PARAMETER Experiment Name: At_Drought_Reproduction_P Parameter: Age (day) Value: 40
  misc_feature: MA Experiment 20001905 PARAMETER Experiment Name: At_Drought_Reproduction_P Parameter: Organism Value: A. thaliana
  misc_feature: MA Experiment 20001905 PARAMETER Experiment Name: At_Drought_Reproduction_P Parameter: Plant Line Value: WS
  misc_feature: MA Experiment 20001905 PARAMETER Experiment Name: At_Drought_Reproduction_P Parameter: Timepoint (day) Value: 10
  misc_feature: MA Experiment 20001905 PARAMETER Experiment Name: At_Drought_Reproduction_P Parameter: Tissue Value: Rosettes
  misc_feature: MA Experiment 20001905 PARAMETER Experiment Name: At_Drought_Reproduction_P Parameter: Treatment Value: Drought vs. No Drought
  misc_feature: MA Experiment ID: 20001911 Result: Down-regulated in Transcription
  misc_feature: MA Experiment 20001911 PARAMETER Experiment Name: At_Drought_Reproduction_P Parameter: Age (day) Value: 40
  misc_feature: MA Experiment 20001911 PARAMETER Experiment Name: At_Drought_Reproduction_P Parameter: Organism Value: A. thaliana
  misc_feature: MA Experiment 20001911 PARAMETER Experiment Name: At_Drought_Reproduction_P Parameter: Plant Line Value: WS
  misc_feature: MA Experiment 20001911 PARAMETER Experiment Name: At_Drought_Reproduction_P Parameter: Timepoint (day) Value: 10
  misc_feature: MA Experiment 20001911 PARAMETER Experiment Name: At_Drought_Reproduction_P Parameter: Tissue Value: Flowers
  misc_feature: MA Experiment 20001911 PARAMETER Experiment Name: At_Drought_Reproduction_P Parameter: Treatment Value: Drought vs. No Drought
atggctctaaacaactttttgactttccaactactccttcttctacttcgtgtttcatcggaatctccatggatcgtcgccggagatgtgtctcgaatcccgatcaatttcctcgaattagcaaagagcccggaggttttcgattcaatggtgagaatcagaaggaaaatccacgagaatcctgagctgggatacgaggaattcgaaactagtaagttcattaggtcggagcttgaccttatcggagttaagtataggtttccggtagctatcaccggtattatcggatatatcggtaccggagaaccaccattcgtcgctctaagagcagatatggatgctttgcctattcaggaagctgttgagtgggagcacaagagcaaaaatcctggaaaaatgcatgcttgtggacatgatggtcatgttgctatgcttcttggtgctgctaagatacttcaacaacatcgccaacatttgcagggaactgtggtgcttatctttcagccagctgaggaaggtttgagtggagcaaagatgatgagagaagaaggagcgttgaagaacgttgaagctatttttggtatacatctttccccccggactccctttgggaaagctgcttcacttgcaggttcatttatggctggagctggagctttcgaggctgtaatcactgggaaaggaggtcatgctgccatccctcagcatacaatagatcctgttgttgcagcttcaagcattgtcctcagtcttcaacacttggtttcacgtgaaactgacccttcggattcaaaggtggtcacagttactaaggttaatggaggcaacgcgttcaatgtcatccctgattcaatcaccataggaggaactcttcgagcctttaccgggtttactcagcttcaggagagaatcaaagagattattacaaagcaagcagccgttcaccgatgcaatgcgtccgtgaatctagcacccaatggtaaccaaccgatgccaccaactgtgaacaacatggacttatacaagaaattcaagaaggtggttagggatttgttgggtcaagaagcttttgtggaagcagtgcctgaaatgggatccgaggacttctcatactttgcagaaacaatcccgggccatttctccctcttgggaatgcaagatgagacccaaggttatgcgtcgtctcattcaccacactatagaatcaacgaggatgttcttccttacggagctgctatccatgcaacgatggcagtacagtacctcaaagataaggcttctaaaggttctgtctcaggctttcatgacgaactctaatccctgtcaaccttggtacagtttcctcatcggtcattggttcgaattcagaagtaccaaatttacactccattgttgatagaattccatttaaatgatgaaaagccttaattcgtagaacaatttcaattgggaaattctcaacttttatgatatgtttgtgtaactgtaacatactggcataatcttagaacatgaattataattaataggctagtcttgttgtaatgcattggcaaaaccacaccttttatgtttatattgatcagaatcggagattttaagcatc

SEQ ID NO: 47678 - protein, 438 aa, Arabidopsis thaliana
  peptide (1)..(438): Ceres Seq. ID no. 12725995
  misc_feature (47)..(421): Pfam Name: Peptidase family M20/M25/M40 Pfam Description: Peptidase family M20/M25/M40
  misc_feature (47)..(421): Pfam Name: Peptidase family M20/M25/M40 Pfam Description: Peptidase family M20/M25/M40
  misc_feature (35)..(438): Homolog of NCBI NO: 34910396 NR Description: putative IAA-Ala hydrolase
  misc_feature (27)..(438): Homolog of NCBI NO: 27948556 NR Description: IAA-amino acid hydrolase [Oryza sativa (indica
  misc_feature (27)..(438): Homolog of NCBI NO: 34914096 NR Description: putative IAA-Ala hydrolase
  misc_feature (1)..(427): Homolog of NCBI NO: 15218029 NR Description: auxin conjugate hydrolase (ILL5); protein id:
  misc_feature (1)..(438): Homolog of NCBI NO: 2181184 NR Description: JR3 protein [Arabidopsis thaliana]
  misc_feature (35)..(438): Homolog of NCBI NO: 34910396 NR Description: putative IAA-Ala hydrolase
  misc_feature (27)..(438): Homolog of NCBI NO: 34914096 NR Description: putative IAA-Ala hydrolase
  misc_feature (1)..(438): Homolog of NCBI NO: 2181184 NR Description: JR3 protein [Arabidopsis thaliana]
  misc_feature (1)..(438): Homolog of NCBI NO: 15241892 NR Description: IAA-amino acid hydrolase homolog 1 precursor
  misc_feature (1)..(438): Homolog of NCBI NO: 902791 NR Description: ILL2
  misc_feature (1)..(438): Homolog of NCBI NO: 15241894 NR Description: IAA-amino acid hydrolase (gb|AAC04866.1)
  misc_feature (1)..(438): Homolog of NCBI NO: 18175667 NR Description: IAA-amino acid hydrolase [Arabidopsis thaliana]
  misc_feature (1)..(438): Homolog of NCBI NO: 15218027 NR Description: IAA-Ala hydrolase (IAR3)
  misc_feature (1)..(427): Homolog of NCBI NO: 15218029 NR Description: auxin conjugate hydrolase (ILL5); protein id:
  misc_feature (27)..(438): Homolog of NCBI NO: 27948556 NR Description: IAA-amino acid hydrolase [Oryza sativa (indica
  misc_feature (1)..(438): Homolog of NCBI NO: 15218027 NR Description: IAA-Ala hydrolase (IAR3)
  misc_feature (1)..(438): Homolog of NCBI NO: 18175667 NR Description: IAA-amino acid hydrolase [Arabidopsis thaliana]
  misc_feature (1)..(438): Homolog of NCBI NO: 15241894 NR Description: IAA-amino acid hydrolase (gb|AAC04866.1)
  misc_feature (1)..(438): Homolog of NCBI NO: 902791 NR Description: ILL2
  misc_feature (1)..(438): Homolog of NCBI NO: 15241892 NR Description: IAA-amino acid hydrolase homolog 1 precursor
MALNNFLTFQLLLLLLRVSSESPWIVAGDVSRIPINFLELAKSPEVFDSMVRIRRKIHENPELGYEEFETSKFIRSELDLIGVKYRFPVAITGIIGYIGTGEPPFVALRADMDALPIQEAVEWEHKSKNPGKMHACGHDGHVAMLLGAAKILQQHRQHLQGTVVLIFQPAEEGLSGAKMMREEGALKNVEAIFGIHLSPRTPFGKAASLAGSFMAGAGAFEAVITGKGGHAAIPQHTIDPVVAASSIVLSLQHLVSRETDPSDSKVVTVTKVNGGNAFNVIPDSITIGGTLRAFTGFTQLQERIKEIITKQAAVHRCNASVNLAPNGNQPMPPTVNNMDLYKKFKKVVRDLLGQEAFVEAVPEMGSEDFSYFAETIPGHFSLLGMQDETQGYASSHSPHYRINEDVLPYGAAIHATMAVQYLKDKASKGSVSGFHDEL

SEQ ID NO: 47679 - protein, 389 aa, Arabidopsis thaliana
  peptide (1)..(389): Ceres Seq. ID no. 12725996
  misc_feature (1)..(372): Pfam Name: Peptidase family M20/M25/M40 Pfam Description: Peptidase family M20/M25/M40
  misc_feature (1)..(372): Pfam Name: Peptidase family M20/M25/M40 Pfam Description: Peptidase family M20/M25/M40
  misc_feature (1)..(389): Homolog of NCBI NO: 34910396 NR Description: putative IAA-Ala hydrolase
  misc_feature (1)..(389): Homolog of NCBI NO: 27948556 NR Description: IAA-amino acid hydrolase [Oryza sativa (indica
  misc_feature (1)..(389): Homolog of NCBI NO: 34914096 NR Description: putative IAA-Ala hydrolase
  misc_feature (1)..(378): Homolog of NCBI NO: 15218029 NR Description: auxin conjugate hydrolase (ILL5); protein id:
  misc_feature (1)..(389): Homolog of NCBI NO: 2181184 NR Description: JR3 protein [Arabidopsis thaliana]
  misc_feature (1)..(389): Homolog of NCBI NO: 34910396 NR Description: putative IAA-Ala hydrolase
  misc_feature (1)..(389): Homolog of NCBI NO: 34914096 NR Description: putative IAA-Ala hydrolase
  misc_feature (1)..(389): Homolog of NCBI NO: 2181184 NR Description: JR3 protein [Arabidopsis thaliana]
  misc_feature (1)..(389): Homolog of NCBI NO: 15241892 NR Description: IAA-amino acid hydrolase homolog 1 precursor
  misc_feature (1)..(389): Homolog of NCBI NO: 902791 NR Description: ILL2
  misc_feature (1)..(389): Homolog of NCBI NO: 15241894 NR Description: IAA-amino acid hydrolase (gb|AAC04866.1)
  misc_feature (1)..(389): Homolog of NCBI NO: 18175667 NR Description: IAA-amino acid hydrolase [Arabidopsis thaliana]
  misc_feature (1)..(389): Homolog of NCBI NO: 15218027 NR Description: IAA-Ala hydrolase (IAR3)
  misc_feature (1)..(378): Homolog of NCBI NO: 15218029 NR Description: auxin conjugate hydrolase (ILL5); protein id:
  misc_feature (1)..(389): Homolog of NCBI NO: 27948556 NR Description: IAA-amino acid hydrolase [Oryza sativa (indica
  misc_feature (1)..(389): Homolog of NCBI NO: 15218027 NR Description: IAA-Ala hydrolase (IAR3)
  misc_feature (1)..(389): Homolog of NCBI NO: 18175667 NR Description: IAA-amino acid hydrolase [Arabidopsis thaliana]
  misc_feature (1)..(389): Homolog of NCBI NO: 15241894 NR Description: IAA-amino acid hydrolase (gb|AAC04866.1)
  misc_feature (1)..(389): Homolog of NCBI NO: 902791 NR Description: ILL2
  misc_feature (1)..(389): Homolog of NCBI NO: 15241892 NR Description: IAA-amino acid hydrolase homolog 1 precursor
MVRIRRKIHENPELGYEEFETSKFIRSELDLIGVKYRFPVAITGIIGYIGTGEPPFVALRADMDALPIQEAVEWEHKSKNPGKMHACGHDGHVAMLLGAAKILQQHRQHLQGTVVLIFQPAEEGLSGAKMMREEGALKNVEAIFGIHLSPRTPFGKAASLAGSFMAGAGAFEAVITGKGGHAAIPQHTIDPVVAASSIVLSLQHLVSRETDPSDSKVVTVTKVNGGNAFNVIPDSITIGGTLRAFTGFTQLQERIKEIITKQAAVHRCNASVNLAPNGNQPMPPTVNNMDLYKKFKKVVRDLLGQEAFVEAVPEMGSEDFSYFAETIPGHFSLLGMQDETQGYASSHSPHYRINEDVLPYGAAIHATMAVQYLKDKASKGSVSGFHDEL

SEQ ID NO: 47680 - protein, 327 aa, Arabidopsis thaliana
  peptide (1)..(327): Ceres Seq. ID no. 12725997
  misc_feature (1)..(310): Pfam Name: Peptidase family M20/M25/M40 Pfam Description: Peptidase family M20/M25/M40
  misc_feature (1)..(310): Pfam Name: Peptidase family M20/M25/M40 Pfam Description: Peptidase family M20/M25/M40
  misc_feature (1)..(327): Homolog of NCBI NO: 34910396 NR Description: putative IAA-Ala hydrolase
  misc_feature (1)..(327): Homolog of NCBI NO: 27948556 NR Description: IAA-amino acid hydrolase [Oryza sativa (indica
  misc_feature (1)..(327): Homolog of NCBI NO: 34914096 NR Description: putative IAA-Ala hydrolase
  misc_feature (1)..(316): Homolog of NCBI NO: 15218029 NR Description: auxin conjugate hydrolase (ILL5); protein id:
  misc_feature (1)..(327): Homolog of NCBI NO: 2181184 NR Description: JR3 protein [Arabidopsis thaliana]
  misc_feature (1)..(327): Homolog of NCBI NO: 34910396 NR Description: putative IAA-Ala hydrolase
  misc_feature (1)..(327): Homolog of NCBI NO: 34914096 NR Description: putative IAA-Ala hydrolase
  misc_feature (1)..(327): Homolog of NCBI NO: 2181184 NR Description: JR3 protein [Arabidopsis thaliana]
  misc_feature (1)..(327): Homolog of NCBI NO: 15241892 NR Description: IAA-amino acid hydrolase homolog 1 precursor
  misc_feature (1)..(327): Homolog of NCBI NO: 902791 NR Description: ILL2
  misc_feature (1)..(327): Homolog of NCBI NO: 15241894 NR Description: IAA-amino acid hydrolase (gb|AAC04866.1)
  misc_feature (1)..(327): Homolog of NCBI NO: 18175667 NR Description: IAA-amino acid hydrolase [Arabidopsis thaliana]
  misc_feature (1)..(327): Homolog of NCBI NO: 15218027 NR Description: IAA-Ala hydrolase (IAR3)
  misc_feature (1)..(316): Homolog of NCBI NO: 15218029 NR Description: auxin conjugate hydrolase (ILL5); protein id:
  misc_feature (1)..(327): Homolog of NCBI NO: 27948556 NR Description: IAA-amino acid hydrolase [Oryza sativa (indica
  misc_feature (1)..(327): Homolog of NCBI NO: 15218027 NR Description: IAA-Ala hydrolase (IAR3)
  misc_feature (1)..(327): Homolog of NCBI NO: 18175667 NR Description: IAA-amino acid hydrolase [Arabidopsis thaliana]
  misc_feature (1)..(327): Homolog of NCBI NO: 15241894 NR Description: IAA-amino acid hydrolase (gb|AAC04866.1)
  misc_feature (1)..(327): Homolog of NCBI NO: 902791 NR Description: ILL2
  misc_feature (1)..(327): Homolog of NCBI NO: 15241892 NR Description: IAA-amino acid hydrolase homolog 1 precursor
MDALPIQEAVEWEHKSKNPGKMHACGHDGHVAMLLGAAKILQQHRQHLQGTVVLIFQPAEEGLSGAKMMREEGALKNVEAIFGIHLSPRTPFGKAASLAGSFMAGAGAFEAVITGKGGHAAIPQHTIDPVVAASSIVLSLQHLVSRETDPSDSKVVTVTKVNGGNAFNVIPDSITIGGTLRAFTGFTQLQERIKEIITKQAAVHRCNASVNLAPNGNQPMPPTVNNMDLYKKFKKVVRDLLGQEAFVEAVPEMGSEDFSYFAETIPGHFSLLGMQDETQGYASSHSPHYRINEDVLPYGAAIHATMAVQYLKDKASKGSVSGFHDEL

SEQ ID NO: 47681 - DNA, 2388 bp, Arabidopsis thaliana
  misc_feature (1)..(2388): Ceres Seq. ID no. 13647403
  misc_feature: MA Experiment ID: 20000171 Result: Up-regulated in Transcription
  misc_feature: MA Experiment 20000171 PARAMETER Experiment Name: At_42deg_Heat_P Parameter: Age (day) Value: 14
  misc_feature: MA Experiment 20000171 PARAMETER Experiment Name: At_42deg_Heat_P Parameter: Organism Value: A. thaliana
  misc_feature: MA Experiment 20000171 PARAMETER Experiment Name: At_42deg_Heat_P Parameter: Plant Line Value: WS
  misc_feature: MA Experiment 20000171 PARAMETER Experiment Name: At_42deg_Heat_P Parameter: Temperature (deg C) Value: 42 vs. 22
  misc_feature: MA Experiment 20000171 PARAMETER Experiment Name: At_42deg_Heat_P Parameter: Timepoint (hr) Value: 1
  misc_feature: MA Experiment 20000171 PARAMETER Experiment Name: At_42deg_Heat_P Parameter: Tissue Value: Aerial
  misc_feature: MA Experiment ID: 20000173 Result: Up-regulated in Transcription
  misc_feature: MA Experiment 20000173 PARAMETER Experiment Name: At_42deg_Heat_P Parameter: Age (day) Value: 14
  misc_feature: MA Experiment 20000173 PARAMETER Experiment Name: At_42deg_Heat_P Parameter: Organism Value: A. thaliana
  misc_feature: MA Experiment 20000173 PARAMETER Experiment Name: At_42deg_Heat_P Parameter: Plant Line Value: WS
  misc_feature: MA Experiment 20000173 PARAMETER Experiment Name: At_42deg_Heat_P Parameter: Temperature (deg C) Value: 42 vs. 22
  misc_feature: MA Experiment 20000173 PARAMETER Experiment Name: At_42deg_Heat_P Parameter: Timepoint (hr) Value: 6
  misc_feature: MA Experiment 20000173 PARAMETER Experiment Name: At_42deg_Heat_P Parameter: Tissue Value: Aerial
  misc_feature: MA Experiment ID: 20000180 Result: Up-regulated in Transcription
  misc_feature: MA Experiment 20000180 PARAMETER Experiment Name: At_Germinating_Seeds_P Parameter: Age (hr) Value: 24 vs. 0
  misc_feature: MA Experiment 20000180 PARAMETER Experiment Name: At_Germinating_Seeds_P Parameter: Tissue Value: Germinating Seeds
  misc_feature: MA Experiment ID: 20000184 Result: Up-regulated in Transcription
  misc_feature: MA Experiment 20000184 PARAMETER Experiment Name: At_Shoots__P Parameter: Age (day) Value: 7
  misc_feature: MA Experiment 20000184 PARAMETER Experiment Name: At_Shoots__P Parameter: Tissue Value: Shoots vs. Whole Plant
  misc_feature: MA Experiment ID: 20000185 Result: Up-regulated in Transcription
  misc_feature: MA Experiment 20000185 PARAMETER Experiment Name: At_Roots__P Parameter: Age (day) Value: 7 vs. 21
  misc_feature: MA Experiment 20000185 PARAMETER Experiment Name: At_Roots__P Parameter: Organism Value: A. thaliana
  misc_feature: MA Experiment 20000185 PARAMETER Experiment Name: At_Roots__P Parameter: Tissue Value: Roots vs. Whole Plant
  misc_feature: MA Experiment ID: 20000235 Result: Up-regulated in Transcription
  misc_feature: MA Experiment 20000235 PARAMETER Experiment Name: At_Siliques_P Parameter: Age (day) Value: 21
  misc_feature: MA Experiment 20000235 PARAMETER Experiment Name: At_Siliques_P Parameter: Organism Value: A. thaliana
  misc_feature: MA Experiment 20000235 PARAMETER Experiment Name: At_Siliques_P Parameter: Plant Line Value: WS
  misc_feature: MA Experiment 20000235 PARAMETER Experiment Name: At_Siliques_P Parameter: Tissue Value: 5-10mm Siliques vs. Whole Plant
  misc_feature: MA Experiment ID: 20000264 Result: Up-regulated in Transcription
  misc_feature: MA Experiment 20000264 PARAMETER Experiment Name: At_Open_Flower_P Parameter: Age (day) Value: 21
  misc_feature: MA Experiment 20000264 PARAMETER Experiment Name: At_Open_Flower_P Parameter: Plant Line Value: WS
  misc_feature: MA Experiment 20000264 PARAMETER Experiment Name: At_Open_Flower_P Parameter: Tissue Value: Open Flower vs. Whole Plant
  misc_feature: MA Experiment ID: 20000436 Result: Up-regulated in Transcription
  misc_feature: MA Experiment 20000436 PARAMETER Experiment Name: At_Drought_P Parameter: Age (day) Value: 7
  misc_feature: MA Experiment 20000436 PARAMETER Experiment Name: At_Drought_P Parameter: Organism Value: A. thaliana
  misc_feature: MA Experiment 20000436 PARAMETER Experiment Name: At_Drought_P Parameter: Plant Line Value: WS
  misc_feature: MA Experiment 20000436 PARAMETER Experiment Name: At_Drought_P Parameter: Timepoint (hr) Value: 12
  misc_feature: MA Experiment 20000436 PARAMETER Experiment Name: At_Drought_P Parameter: Tissue Value: Whole Plant
  misc_feature: MA Experiment 20000436 PARAMETER Experiment Name: At_Drought_P Parameter: Treatment Value: Drought vs. No Drought
  misc_feature: MA Experiment ID: 20000438 Result: Up-regulated in Transcription
  misc_feature: MA Experiment 20000438 PARAMETER Experiment Name: At_Shoots__P Parameter: Age (day) Value: 14
  misc_feature: MA Experiment 20000438 PARAMETER Experiment Name: At_Shoots__P Parameter: Tissue Value: Shoots vs. Whole Plant
  misc_feature: MA Experiment ID: 20000439 Result: Up-regulated in Transcription
  misc_feature: MA Experiment 20000439 PARAMETER Experiment Name: At_Roots__P Parameter: Age (day) Value: 14 vs. 21
  misc_feature: MA Experiment 20000439 PARAMETER Experiment Name: At_Roots__P Parameter: Organism Value: A. thaliana
  misc_feature: MA Experiment 20000439 PARAMETER Experiment Name: At_Roots__P Parameter: Tissue Value: Roots vs. Whole Plant
  misc_feature: MA Experiment ID: 20000441 Result: Up-regulated in Transcription
  misc_feature: MA Experiment 20000441 PARAMETER Experiment Name: At_1uM_BR-BRZ__P Parameter: Tissue Value: Shoot Apices
  misc_feature: MA Experiment 20000441 PARAMETER Experiment Name: At_1uM_BR-BRZ__P Parameter: Treatment Value: 1uM BR vs. No Treatment
  misc_feature: MA Experiment ID: 20000443 Result: Up-regulated in Transcription
  misc_feature: MA Experiment 20000443 PARAMETER Experiment Name: At_1uM_BR-BRZ__P Parameter: Tissue Value: Shoot Apices
  misc_feature: MA Experiment 20000443 PARAMETER Experiment Name: At_1uM_BR-BRZ__P Parameter: Treatment Value: 1uM BRZ vs. No Treatment
  misc_feature: MA Experiment ID: 20000495 Result: Down-regulated in Transcription
  misc_feature: MA Experiment 20000495 PARAMETER Experiment Name: At_Guard_Cells_P Parameter: Harvest Date Value: 8/2/2002
  misc_feature: MA Experiment 20000495 PARAMETER Experiment Name: At_Guard_Cells_P Parameter: Organism Value: A. thaliana
  misc_feature: MA Experiment 20000495 PARAMETER Experiment Name: At_Guard_Cells_P Parameter: Tissue Value: Guard Cells vs. Leaves
  misc_feature: MA Experiment ID: 20000573 Result: Down-regulated in Transcription
  misc_feature: MA Experiment 20000573 PARAMETER Experiment Name: At_100uM_ABA_Mutants__P Parameter: Organism Value: A. thaliana
  misc_feature: MA Experiment 20000573 PARAMETER Experiment Name: At_100uM_ABA_Mutants__P Parameter: Plant Line Value: CS22 vs. Ler wt
  misc_feature: MA Experiment 20000573 PARAMETER Experiment Name: At_100uM_ABA_Mutants__P Parameter: Timepoint (hr) Value: N/A
  misc_feature: MA Experiment 20000573 PARAMETER Experiment Name: At_100uM_ABA_Mutants__P Parameter: Tissue Value: Whole Plant
  misc_feature: MA Experiment 20000573 PARAMETER Experiment Name: At_100uM_ABA_Mutants__P Parameter: Treatment Value: None
  misc_feature: MA Experiment ID: 20000574 Result: Down-regulated in Transcription
  misc_feature: MA Experiment 20000574 PARAMETER Experiment Name: At_100uM_ABA_Mutants__P Parameter: Organism Value: A. thaliana
  misc_feature: MA Experiment 20000574 PARAMETER Experiment Name: At_100uM_ABA_Mutants__P Parameter: Plant Line Value: CS23 vs. Ler wt
  misc_feature: MA Experiment 20000574 PARAMETER Experiment Name: At_100uM_ABA_Mutants__P Parameter: Timepoint (hr) Value: N/A
  misc_feature: MA Experiment 20000574 PARAMETER Experiment Name: At_100uM_ABA_Mutants__P Parameter: Tissue Value: Whole Plant
  misc_feature: MA Experiment 20000574 PARAMETER Experiment Name: At_100uM_ABA_Mutants__P Parameter: Treatment Value: None
  misc_feature: MA Experiment ID: 20000578 Result: Down-regulated in Transcription
  misc_feature: MA Experiment 20000578 PARAMETER Experiment Name: At_CS3726__P Parameter: Organism Value: A. thaliana
  misc_feature: MA Experiment 20000578 PARAMETER Experiment Name: At_CS3726__P Parameter: Plant Line Value: CS3726
  misc_feature: MA Experiment 20000578 PARAMETER Experiment Name: At_CS3726__P Parameter: Tissue Value: Whole Plant
  misc_feature: MA Experiment ID: 20001247 Result: Down-regulated in Transcription
  misc_feature: MA Experiment 20001247 PARAMETER Experiment Name: At_Far-red-induction_P Parameter: Age (day) Value: 7
  misc_feature: MA Experiment 20001247 PARAMETER Experiment Name: At_Far-red-induction_P Parameter: Light Value: Far-red vs. White
  misc_feature: MA Experiment 20001247 PARAMETER Experiment Name: At_Far-red-induction_P Parameter: Organism Value: A. thaliana
  misc_feature: MA Experiment 20001247 PARAMETER Experiment Name: At_Far-red-induction_P Parameter: Plant Line Value: Columbia
  misc_feature: MA Experiment 20001247 PARAMETER Experiment Name: At_Far-red-induction_P Parameter: Timepoint (hr) Value: 1
  misc_feature: MA Experiment 20001247 PARAMETER Experiment Name: At_Far-red-induction_P Parameter: Tissue Value: Whole Plant
  misc_feature: MA Experiment ID: 20001248 Result: Down-regulated in Transcription
  misc_feature: MA Experiment 20001248 PARAMETER Experiment Name: At_Far-red-induction_P Parameter: Age (day) Value: 7
  misc_feature: MA Experiment 20001248 PARAMETER Experiment Name: At_Far-red-induction_P Parameter: Light Value: Far-red vs. White
  misc_feature: MA Experiment 20001248 PARAMETER Experiment Name: At_Far-red-induction_P Parameter: Organism Value: A. thaliana
  misc_feature: MA Experiment 20001248 PARAMETER Experiment Name: At_Far-red-induction_P Parameter: Plant Line Value: Columbia
  misc_feature: MA Experiment 20001248 PARAMETER Experiment Name: At_Far-red-induction_P Parameter: Timepoint (hr) Value: 4
  misc_feature: MA Experiment 20001248 PARAMETER Experiment Name: At_Far-red-induction_P Parameter: Tissue Value: Whole Plant
  misc_feature: MA Experiment ID: 20001557 Result: Down-regulated in Transcription
  misc_feature: MA Experiment 20001557 PARAMETER Experiment Name: At_Drought_Soil_Dry_P Parameter: Age (day) Value: 27
  misc_feature: MA Experiment 20001557 PARAMETER Experiment Name: At_Drought_Soil_Dry_P Parameter: Organism Value: A. thaliana
  misc_feature: MA Experiment 20001557 PARAMETER Experiment Name: At_Drought_Soil_Dry_P Parameter: Plant Line Value: WS
  misc_feature: MA Experiment 20001557 PARAMETER Experiment Name: At_Drought_Soil_Dry_P Parameter: Post Timepoint (hr) Value: 3
  misc_feature: MA Experiment 20001557 PARAMETER Experiment Name: At_Drought_Soil_Dry_P Parameter: Post-Treatment Value: Re-Water vs. No Drought
  misc_feature: MA Experiment 20001557 PARAMETER Experiment Name: At_Drought_Soil_Dry_P Parameter: Timepoint (day) Value: 13
  misc_feature: MA Experiment 20001557 PARAMETER Experiment Name: At_Drought_Soil_Dry_P Parameter: Treatment Value: Drought vs. No Drought
  misc_feature: MA Experiment ID: 20001560 Result: Down-regulated in Transcription
  misc_feature: MA Experiment 20001560 PARAMETER Experiment Name: At_Drought_Soil_Dry_P Parameter: Age (day) Value: 28
  misc_feature: MA Experiment 20001560 PARAMETER Experiment Name: At_Drought_Soil_Dry_P Parameter: Organism Value: A. thaliana
  misc_feature: MA Experiment 20001560 PARAMETER Experiment Name: At_Drought_Soil_Dry_P Parameter: Plant Line Value: WS
  misc_feature: MA Experiment 20001560 PARAMETER Experiment Name: At_Drought_Soil_Dry_P Parameter: Post Timepoint (hr) Value: None
  misc_feature: MA Experiment 20001560 PARAMETER Experiment Name: At_Drought_Soil_Dry_P Parameter: Post-Treatment Value: None
  misc_feature: MA Experiment 20001560 PARAMETER Experiment Name: At_Drought_Soil_Dry_P Parameter: Timepoint (day) Value: 14
  misc_feature: MA Experiment 20001560 PARAMETER Experiment Name: At_Drought_Soil_Dry_P Parameter: Treatment Value: Drought vs. No Drought
  misc_feature: MA Experiment ID: 20001771 Result: Up-regulated in Transcription
  misc_feature: MA Experiment 20001771 PARAMETER Experiment Name: At_Far-red-enriched-adult_P Parameter: Age (day) Value: 28
  misc_feature: MA Experiment 20001771 PARAMETER Experiment Name: At_Far-red-enriched-adult_P Parameter: Light Value: Far-red enriched vs. White
  misc_feature: MA Experiment 20001771 PARAMETER Experiment Name: At_Far-red-enriched-adult_P Parameter: Organism Value: A. thaliana
  misc_feature: MA Experiment 20001771 PARAMETER Experiment Name: At_Far-red-enriched-adult_P Parameter: Plant Line Value: Columbia
  misc_feature: MA Experiment 20001771 PARAMETER Experiment Name: At_Far-red-enriched-adult_P Parameter: Timepoint (hr) Value: 16
  misc_feature: MA Experiment 20001771 PARAMETER Experiment Name: At_Far-red-enriched-adult_P Parameter: Tissue Value: Aerial
tcaaaaaaaaaaaaataggaagccttcatcgtcttctgccgaacatctctagaaagtcctacacagttttttttttcgatctagcttcgatgaattgatacaatctcttctatctgctgagttttttgttttctggtaaacaattttatctgtggagttttctggagttgctagtggaagaatctgtctcacagctaggcgattatctttcggatgaatttcatgggaacgatgatggtatagtgccagactcagcgtatgaggatggaggtcagtttccaattctagttagtaacaggaagaaacgaagaaatgatgatatgggtagtggaacaaaccatctaaagagtaatacttttatcaagagagaggcaaacatgttaggaaaaaatccatggcctgagaaagatagtggtggctcttcggtttctcgtgatacgggaacaggaaaagatgttcaggatatgacattggaggatacaaatacttcagatcatggtttcaatggtggccacgtagatgtggttgaaaatttctccactggggatcccatgttgtgtgacacttccgctgcaacgaatgatggcgtatataattattccctcaacagcattccggatgctgaaaatgatcttagctttttcgacaatggagataaagaaaaaaatgatctcttctatggctggggtgacataggaaattttgaggatgtggacaacatgcttaggagttgtgattcaacattcggcttggatagtcttaataatgaaggtgacttagggtggttctcttctgcccagccaaacgaggagacagcaggcgcgatgacagatgatctcaaaccagacaaaatgttggaaaatcaaagaaccgctatgttgcaggttgaagactttttgaacaacagtgagcccaaccatgctgttgaagatgagtatggatatactattgaggacgattcagctcaaggaaaatcatcacaaaatgtattcgatacaagtttgcaaaagaaggatatattgatgctggatgtagaggcaaatcttgagaagaagcagactgatcatcttcatcatctggatgggaaaagtgatgggttctcggagaacagttttactttacagcacagtggtatttcaagggaaataatggataccaaccagtattaccctccctccgcattccaacagcgagatgtgccatactcgcatttcaattgtgagcagccttccgttcaagtatcagcatgtgaaagtaaatctggtattaaatctgagaacaaacccagtccttcctctgcttcaaatgagtcatacacatcaaatcatgcacaatcaatcgagagcttacaaggtccaactgttgatgatcggtttaggaaggtctttgaaacgagagccaacttgctgcctgggcaagatatgcctccttcttttgctgcaaataccaagaagagtagtaagacagactccatggtgtttcctgatgctgctcctatccagaagattgggcttgagaatgaccacagaaaagctgcaactgaattggaaacatcaaatatgcagggaagttcttgtgttagctctgttgtggatgacatttcactggaagcaacaagttttcgccagcttcaacaagttatagaacagttggatgttaggacaaagctttgcataagagacagcttataccgattagcaaaaagtgcggaacagagacatcatggtggaaacagaccggagaaaggcgcaggctcgcatctcgtgactggtgaagcagacaagtatgctggattcatggatatcgaaactgatacaaacccgatagatcgatcgatagctcatttgctgtttcacaggccctcagactcatctctttcatccgataacaatgttctgtcttataaatctcatccaatgattcctcagcccaatagtagtccgagcctgaggatagagaaacaagaggaaactacagaacttagacccgaagcagaagttgtaacaagtgacaacaattaatgatgtcaaataaaactggctctttcattgctgaagcattcgagatattgttgttaacactaatctcgattttggctaagcgaaattgctcaggttagttactaaaatcctgactgcttcttcattagaatcatggattttgtaacacagttgtatttatgtgttgagataactttctggtctagatttcggttcgaacctgattgtacacctggttgctcgaacctgattgtacacctggttgctcgaaccaggtctttaagatatgttctttacctttgtaatctgttcaagttgttaagtagaggaagaagtagagacatagcaattctgtagataaagatgttagttcgttttgtaatgcgat

SEQ ID NO: 47682 - protein, 566 aa, Arabidopsis thaliana
  peptide (1)..(566): Ceres Seq. ID no. 13647404
  misc_feature (270)..(516): Homolog of NCBI NO: 15232525 NR Description: expressed protein [Arabidopsis thaliana]
  misc_feature (1)..(566): Homolog of NCBI NO: 15237638 NR Description: expressed protein [Arabidopsis thaliana]
MGSGTNHLKSNTFIKREANMLGKNPWPEKDSGGSSVSRDTGTGKDVQDMTLEDTNTSDHGFNGGHVDVVENFSTGDPMLCDTSAATNDGVYNYSLNSIPDAENDLSFFDNGDKEKNDLFYGWGDIGNFEDVDNMLRSCDSTFGLDSLNNEGDLGWFSSAQPNEETAGAMTDDLKPDKMLENQRTAMLQVEDFLNNSEPNHAVEDEYGYTIEDDSAQGKSSQNVFDTSLQKKDILMLDVEANLEKKQTDHLHHLDGKSDGFSENSFTLQHSGISREIMDTNQYYPPSAFQQRDVPYSHFNCEQPSVQVSACESKSGIKSENKPSPSSASNESYTSNHAQSIESLQGPTVDDRFRKVFETRANLLPGQDMPPSFAANTKKSSKTDSMVFPDAAPIQKIGLENDHRKAATELETSNMQGSSCVSSVVDDISLEATSFRQLQQVIEQLDVRTKLCIRDSLYRLAKSAEQRHHGGNRPEKGAGSHLVTGEADKYAGFMDIETDTNPIDRSIAHLLFHRPSDSSLSSDNNVLSYKSHPMIPQPNSSPSLRIEKQEETTELRPEAEVVTSDNN

SEQ ID NO: 47683 - protein, 547 aa, Arabidopsis thaliana
  peptide (1)..(547): Ceres Seq. ID no. 13647405
  misc_feature (251)..(497): Homolog of NCBI NO: 15232525 NR Description: expressed protein [Arabidopsis thaliana]
  misc_feature (1)..(547): Homolog of NCBI NO: 15237638 NR Description: expressed protein [Arabidopsis thaliana]
MLGKNPWPEKDSGGSSVSRDTGTGKDVQDMTLEDTNTSDHGFNGGHVDVVENFSTGDPMLCDTSAATNDGVYNYSLNSIPDAENDLSFFDNGDKEKNDLFYGWGDIGNFEDVDNMLRSCDSTFGLDSLNNEGDLGWFSSAQPNEETAGAMTDDLKPDKMLENQRTAMLQVEDFLNNSEPNHAVEDEYGYTIEDDSAQGKSSQNVFDTSLQKKDILMLDVEANLEKKQTDHLHHLDGKSDGFSENSFTLQHSGISREIMDTNQYYPPSAFQQRDVPYSHFNCEQPSVQVSACESKSGIKSENKPSPSSASNESYTSNHAQSIESLQGPTVDDRFRKVFETRANLLPGQDMPPSFAANTKKSSKTDSMVFPDAAPIQKIGLENDHRKAATELETSNMQGSSCVSSVVDDISLEATSFRQLQQVIEQLDVRTKLCIRDSLYRLAKSAEQRHHGGNRPEKGAGSHLVTGEADKYAGFMDIETDTNPIDRSIAHLLFHRPSDSSLSSDNNVLSYKSHPMIPQPNSSPSLRIEKQEETTELRPEAEVVTSDNN

SEQ ID NO: 47684 - protein, 518 aa, Arabidopsis thaliana
  peptide (1)..(518): Ceres Seq. ID no. 13647406
  misc_feature (222)..(468): Homolog of NCBI NO: 15232525 NR Description: expressed protein [Arabidopsis thaliana]
  misc_feature (1)..(518): Homolog of NCBI NO: 15237638 NR Description: expressed protein [Arabidopsis thaliana]
MTLEDTNTSDHGFNGGHVDVVENFSTGDPMLCDTSAATNDGVYNYSLNSIPDAENDLSFFDNGDKEKNDLFYGWGDIGNFEDVDNMLRSCDSTFGLDSLNNEGDLGWFSSAQPNEETAGAMTDDLKPDKMLENQRTAMLQVEDFLNNSEPNHAVEDEYGYTIEDDSAQGKSSQNVFDTSLQKKDILMLDVEANLEKKQTDHLHHLDGKSDGFSENSFTLQHSGISREIMDTNQYYPPSAFQQRDVPYSHFNCEQPSVQVSACESKSGIKSENKPSPSSASNESYTSNHAQSIESLQGPTVDDRFRKVFETRANLLPGQDMPPSFAANTKKSSKTDSMVFPDAAPIQKIGLENDHRKAATELETSNMQGSSCVSSVVDDISLEATSFRQLQQVIEQLDVRTKLCIRDSLYRLAKSAEQRHHGGNRPEKGAGSHLVTGEADKYAGFMDIETDTNPIDRSIAHLLFHRPSDSSLSSDNNVLSYKSHPMIPQPNSSPSLRIEKQEETTELRPEAEVVTSDNN

SEQ ID NO: 47685 - DNA, 1269 bp, Arabidopsis thaliana
  misc_feature (1)..(1269): Ceres Seq. ID no. 13647458
  misc_feature: MA Experiment ID: 20000173 Result: Down-regulated in Transcription
  misc_feature: MA Experiment 20000173 PARAMETER Experiment Name: At_42deg_Heat_P Parameter: Age (day) Value: 14
  misc_feature: MA Experiment 20000173 PARAMETER Experiment Name: At_42deg_Heat_P Parameter: Organism Value: A. thaliana
  misc_feature: MA Experiment 20000173 PARAMETER Experiment Name: At_42deg_Heat_P Parameter: Plant Line Value: WS
  misc_feature: MA Experiment 20000173 PARAMETER Experiment Name: At_42deg_Heat_P Parameter: Temperature (deg C) Value: 42 vs. 22
  misc_feature: MA Experiment 20000173 PARAMETER Experiment Name: At_42deg_Heat_P Parameter: Timepoint (hr) Value: 6
  misc_feature: MA Experiment 20000173 PARAMETER Experiment Name: At_42deg_Heat_P Parameter: Tissue Value: Aerial
  misc_feature: MA Experiment ID: 20000179 Result: Up-regulated in Transcription
  misc_feature: MA Experiment 20000179 PARAMETER Experiment Name: At_Germinating_Seeds_P Parameter: Age (hr) Value: 6 vs. 0
  misc_feature: MA Experiment 20000179 PARAMETER Experiment Name: At_Germinating_Seeds_P Parameter: Tissue Value: Germinating Seeds
  misc_feature: MA Experiment ID: 20000180 Result: Up-regulated in Transcription
  misc_feature: MA Experiment 20000180 PARAMETER Experiment Name: At_Germinating_Seeds_P Parameter: Age (hr) Value: 24 vs. 0
  misc_feature: MA Experiment 20000180 PARAMETER Experiment Name: At_Germinating_Seeds_P Parameter: Tissue Value: Germinating Seeds
  misc_feature: MA Experiment ID: 20000227 Result: Up-regulated in Transcription
  misc_feature: MA Experiment 20000227 PARAMETER Experiment Name: At_Root-Tips-vs-Tops_P Parameter: Tissue Value: Root Tips vs. Root Tops
  misc_feature: MA Experiment ID: 20000234 Result: Up-regulated in Transcription
  misc_feature: MA Experiment 20000234 PARAMETER Experiment Name: At_Siliques_P Parameter: Age (day) Value: 21
  misc_feature: MA Experiment 20000234 PARAMETER Experiment Name: At_Siliques_P Parameter: Organism Value: A. thaliana
  misc_feature: MA Experiment 20000234 PARAMETER Experiment Name: At_Siliques_P Parameter: Plant Line Value: WS
  misc_feature: MA Experiment 20000234 PARAMETER Experiment Name: At_Siliques_P Parameter: Tissue Value: Less Than 5mm Siliques vs. Whole Plant
  misc_feature: MA Experiment ID: 20000235 Result: Up-regulated in Transcription
  misc_feature: MA Experiment 20000235 PARAMETER Experiment Name: At_Siliques_P Parameter: Age (day) Value: 21
  misc_feature: MA Experiment 20000235 PARAMETER Experiment Name: At_Siliques_P Parameter: Organism Value: A. thaliana
  misc_feature: MA Experiment 20000235 PARAMETER Experiment Name: At_Siliques_P Parameter: Plant Line Value: WS
  misc_feature: MA Experiment 20000235 PARAMETER Experiment Name: At_Siliques_P Parameter: Tissue Value: 5-10mm Siliques vs. Whole Plant
  misc_feature: MA Experiment ID: 20000264 Result: Up-regulated in Transcription
  misc_feature: MA Experiment 20000264 PARAMETER Experiment Name: At_Open_Flower_P Parameter: Age (day) Value: 21
  misc_feature: MA Experiment 20000264 PARAMETER Experiment Name: At_Open_Flower_P Parameter: Plant Line Value: WS
  misc_feature: MA Experiment 20000264 PARAMETER Experiment Name: At_Open_Flower_P Parameter: Tissue Value: Open Flower vs. Whole Plant
  misc_feature: MA Experiment ID: 20000265 Result: Up-regulated in Transcription
  misc_feature: MA Experiment 20000265 PARAMETER Experiment Name: At_Open_Flower_P Parameter: Age (day) Value: 21
  misc_feature: MA Experiment 20000265 PARAMETER Experiment Name: At_Open_Flower_P Parameter: Plant Line Value: WS
  misc_feature: MA Experiment 20000265 PARAMETER Experiment Name: At_Open_Flower_P Parameter: Tissue Value: Closed Flower vs. Whole Plant
  misc_feature: MA Experiment ID: 20000286 Result: Up-regulated in Transcription
  misc_feature: MA Experiment 20000286 PARAMETER Experiment Name: At_Open_Flower_P Parameter: Age (day) Value: 21
  misc_feature: MA Experiment 20000286 PARAMETER Experiment Name: At_Open_Flower_P Parameter: Plant Line Value: WS
  misc_feature: MA Experiment 20000286 PARAMETER Experiment Name: At_Open_Flower_P Parameter: Tissue Value: Half Open vs. Whole Plant
  misc_feature: MA Experiment ID: 20000437 Result: Down-regulated in Transcription
  misc_feature: MA Experiment 20000437 PARAMETER Experiment Name: At_Drought_P Parameter: Age (day) Value: 8
  misc_feature: MA Experiment 20000437 PARAMETER Experiment Name: At_Drought_P Parameter: Organism Value: A. thaliana
  misc_feature: MA Experiment 20000437 PARAMETER Experiment Name: At_Drought_P Parameter: Plant Line Value: WS
  misc_feature: MA Experiment 20000437 PARAMETER Experiment Name: At_Drought_P Parameter: Timepoint (hr) Value: 24
  misc_feature: MA Experiment 20000437 PARAMETER Experiment Name: At_Drought_P Parameter: Tissue Value: Whole Plant
  misc_feature: MA Experiment 20000437 PARAMETER Experiment Name: At_Drought_P Parameter: Treatment Value: Drought vs. No Drought
  misc_feature: MA Experiment ID: 20000496 Result: Down-regulated in Transcription
  misc_feature: MA Experiment 20000496 PARAMETER Experiment Name: At_Guard_Cells_P Parameter: Harvest Date Value: 7/19/2002
  misc_feature: MA Experiment 20000496 PARAMETER Experiment Name: At_Guard_Cells_P Parameter: Organism Value: Canola
  misc_feature: MA Experiment 20000496 PARAMETER Experiment Name: At_Guard_Cells_P Parameter: Tissue Value: Guard Cells vs. Leaves
  misc_feature: MA Experiment ID: 20001451 Result: Down-regulated in Transcription
  misc_feature: MA Experiment 20001451 PARAMETER Experiment Name: At_Far-red-induction_P Parameter: Age (day) Value: 7
  misc_feature: MA Experiment 20001451 PARAMETER Experiment Name: At_Far-red-induction_P Parameter: Light Value: Far-red vs. White
  misc_feature: MA Experiment 20001451 PARAMETER Experiment Name: At_Far-red-induction_P Parameter: Organism Value: A. thaliana
  misc_feature: MA Experiment 20001451 PARAMETER Experiment Name: At_Far-red-induction_P Parameter: Plant Line Value: Columbia
  misc_feature: MA Experiment 20001451 PARAMETER Experiment Name: At_Far-red-induction_P Parameter: Timepoint (hr) Value: 24
  misc_feature: MA Experiment 20001451 PARAMETER Experiment Name: At_Far-red-induction_P Parameter: Tissue Value: Whole Plant
  misc_feature: MA Experiment ID: 20001560 Result: Up-regulated in Transcription
  misc_feature: MA Experiment 20001560 PARAMETER Experiment Name: At_Drought_Soil_Dry_P Parameter: Age (day) Value: 28
  misc_feature: MA Experiment 20001560 PARAMETER Experiment Name: At_Drought_Soil_Dry_P Parameter: Organism Value: A. thaliana
  misc_feature: MA Experiment 20001560 PARAMETER Experiment Name: At_Drought_Soil_Dry_P Parameter: Plant Line Value: WS
  misc_feature: MA Experiment 20001560 PARAMETER Experiment Name: At_Drought_Soil_Dry_P Parameter: Post Timepoint (hr) Value: None
  misc_feature: MA Experiment 20001560 PARAMETER Experiment Name: At_Drought_Soil_Dry_P Parameter: Post-Treatment Value: None
  misc_feature: MA Experiment 20001560 PARAMETER Experiment Name: At_Drought_Soil_Dry_P Parameter: Timepoint (day) Value: 14
  misc_feature: MA Experiment 20001560 PARAMETER Experiment Name: At_Drought_Soil_Dry_P Parameter: Treatment Value: Drought vs. No Drought
atggctttcttatgggcacggtacttgtttgtttacttgtctttctttctttctgtcacactctttaaagatgggaaacatcctggttgtgatgaatattactttggtagaagagaattctcgtttacgcttgaaaacgatgtttatttgcggtataagtctttcaagaatgcttcacttatggaagctgctatcaaatcgaattttccatacaagattgatattggtgctgtgtatagcgttgatccggataagagacatgcatatgctcaaagtggaaccaatttgtttactccagtggagagggagttagtctttgatattgatataacagattatgatgatgttagatactgttgttcgggagccgatgtttgctccaaatgctggcctttaatgacagttgctatcaaagtcattgatacttccttaagagaggattttggtttcaaacacatcctctgggtcttcagtggacgtcgtggagttcactgttgggtttgtgatgctaaagctcgaaggttgactaatgaacaaagatcagcagttgctgaatactttcgtgtttataagggaaatgaaaacaatgcaaaaaaggtcgatctgatgggtcattctcttcatccgtttcttgcgagatcatatgtggactttattaagagtttctttgagggtgagttacaagcaactcaaagtatattctcaagcaaagaaaagtatgagaagatacttgggatgattacagatgaagatattcaagcagacctcagaggaaagtgggagaattctgcgagatcatctctatcagaagaagccaccagccttttaaggtgggaacaacttaagaaagctcttcaatcgaagagaaacaaggctctatcactgcggacgtgcgtagaagaaattgtcttcacctttacgtatcctcgaattgatttggaggtttcaaaacaaatgaaccatttgcttaaggcacccttctgcgtccatccaaaaacaggtcgtgtctgtgttcctattgacccgaataactgtgatgagtttgatccattggcagttccaactctttcacagctaatagaagaaatcaattccggtggcctcagaatggacgtggatgatgatgattcagatagtagtttacttgggaaatcaataaagttcttcagatcctcattcctagaacccttactaaaatcatgcaaggaagaaatagagagttcatacaaaaccaagattgctaagactaaggattcattcagctggtga

SEQ ID NO: 47686 - protein, 422 aa, Arabidopsis thaliana
  peptide (1)..(422): Ceres Seq. ID no. 13647459
  misc_feature (21)..(336): Pfam Name: DNA primase small subunit Pfam Description: DNA primase small subunit
  misc_feature (3)..(403): Homolog of NCBI NO: 32421129 NR Description: hypothetical protein [Neurospora crassa]
  misc_feature (35)..(365): Homolog of NCBI NO: 40744428 NR Description: hypothetical protein AN3033.2 [Aspergillus
  misc_feature (4)..(418): Homolog of NCBI NO: 3676248 NR Description: DNA polymerase alpha subunit IV (primase) [Rattus
  misc_feature (4)..(418): Homolog of NCBI NO: 110830 NR Description: DNA primase (EC 2.7.7.-) 46K chain - mouse
  misc_feature (4)..(418): Homolog of NCBI NO: 6679459 NR Description: DNA primase, p49 subunit [Mus musculus]
  misc_feature (4)..(376): Homolog of NCBI NO: 28839820 NR Description: Similar to primase, polypeptide 1, 49kDa [Danio
  misc_feature (4)..(418): Homolog of NCBI NO: 4506051 NR Description: primase, polypeptide 1, 49kDa
  misc_feature (9)..(417): Homolog of NCBI NO: 22037275 NR Description: DNA primase catalytic subunit p48 [Moneuplotes
  misc_feature (4)..(418): Homolog of NCBI NO: 29612475 NR Description: Similar to primase, polypeptide 1, 49kDa [Xenopus
  misc_feature (21)..(389): Homolog of NCBI NO: 15238209 NR Description: DNA polymerase alpha subunit IV (primase)-related
MAFLWARYLFVYLSFFLSVTLFKDGKHPGCDEYYFGRREFSFTLENDVYLRYKSFKNASLMEAAIKSNFPYKIDIGAVYSVDPDKRHAYAQSGTNLFTPVERELVFDIDITDYDDVRYCCSGADVCSKCWPLMTVAIKVIDTSLREDFGFKHILWVFSGRRGVHCWVCDAKARRLTNEQRSAVAEYFRVYKGNENNAKKVDLMGHSLHPFLARSYVDFIKSFFEGELQATQSIFSSKEKYEKILGMITDEDIQADLRGKWENSARSSLSEEATSLLRWEQLKKALQSKRNKALSLRTCVEEIVFTFTYPRIDLEVSKQMNHLLKAPFCVHPKTGRVCVPIDPNNCDEFDPLAVPTLSQLIEEINSGGLRMDVDDDDSDSSLLGKSIKFFRSSFLEPLLKSCKEEIESSYKTKIAKTKDSFSW

SEQ ID NO: 47687 - protein, 362 aa, Arabidopsis thaliana
  peptide (1)..(362): Ceres Seq. ID no. 13647460
  misc_feature (1)..(276): Pfam Name: DNA primase small subunit Pfam Description: DNA primase small subunit
  misc_feature (1)..(343): Homolog of NCBI NO: 32421129 NR Description: hypothetical protein [Neurospora crassa]
  misc_feature (1)..(305): Homolog of NCBI NO: 40744428 NR Description: hypothetical protein AN3033.2 [Aspergillus
  misc_feature (1)..(358): Homolog of NCBI NO: 3676248 NR Description: DNA polymerase alpha subunit IV (primase) [Rattus
  misc_feature (1)..(358): Homolog of NCBI NO: 110830 NR Description: DNA primase (EC 2.7.7.-) 46K chain - mouse
  misc_feature (1)..(358): Homolog of NCBI NO: 6679459 NR Description: DNA primase, p49 subunit [Mus musculus]
  misc_feature (1)..(316): Homolog of NCBI NO: 28839820 NR Description: Similar to primase, polypeptide 1, 49kDa [Danio
  misc_feature (1)..(358): Homolog of NCBI NO: 4506051 NR Description: primase, polypeptide 1, 49kDa
  misc_feature (1)..(357): Homolog of NCBI NO: 22037275 NR Description: DNA primase catalytic subunit p48 [Moneuplotes
  misc_feature (1)..(358): Homolog of NCBI NO: 29612475 NR Description: Similar to primase, polypeptide 1, 49kDa [Xenopus
  misc_feature (1)..(329): Homolog of NCBI NO: 15238209 NR Description: DNA polymerase alpha subunit IV (primase)-related
MEAAIKSNFPYKIDIGAVYSVDPDKRHAYAQSGTNLFTPVERELVFDIDITDYDDVRYCCSGADVCSKCWPLMTVAIKVIDTSLREDFGFKHILWVFSGRRGVHCWVCDAKARRLTNEQRSAVAEYFRVYKGNENNAKKVDLMGHSLHPFLARSYVDFIKSFFEGELQATQSIFSSKEKYEKILGMITDEDIQADLRGKWENSARSSLSEEATSLLRWEQLKKALQSKRNKALSLRTCVEEIVFTFTYPRIDLEVSKQMNHLLKAPFCVHPKTGRVCVPIDPNNCDEFDPLAVPTLSQLIEEINSGGLRMDVDDDDSDSSLLGKSIKFFRSSFLEPLLKSCKEEIESSYKTKIAKTKDSFSW

SEQ ID NO: 47688 - protein, 290 aa, Arabidopsis thaliana
  peptide (1)..(290): Ceres Seq. ID no. 13647461
  misc_feature (1)..(204): Pfam Name: DNA primase small subunit Pfam Description: DNA primase small subunit
  misc_feature (1)..(271): Homolog of NCBI NO: 32421129 NR Description: hypothetical protein [Neurospora crassa]
  misc_feature (1)..(233): Homolog of NCBI NO: 40744428 NR Description: hypothetical protein AN3033.2 [Aspergillus
  misc_feature (1)..(286): Homolog of NCBI NO: 3676248 NR Description: DNA polymerase alpha subunit IV (primase) [Rattus
  misc_feature (1)..(286): Homolog of NCBI NO: 110830 NR Description: DNA primase (EC 2.7.7.-) 46K chain - mouse
  misc_feature (1)..(286): Homolog of NCBI NO: 6679459 NR Description: DNA primase, p49 subunit [Mus musculus]
  misc_feature (1)..(244): Homolog of NCBI NO: 28839820 NR Description: Similar to primase, polypeptide 1, 49kDa [Danio
  misc_feature (1)..(286): Homolog of NCBI NO: 4506051 NR Description: primase, polypeptide 1, 49kDa
  misc_feature (1)..(285): Homolog of NCBI NO: 22037275 NR Description: DNA primase catalytic subunit p48 [Moneuplotes
  misc_feature (1)..(286): Homolog of NCBI NO: 29612475 NR Description: Similar to primase, polypeptide 1, 49kDa [Xenopus
  misc_feature (1)..(257): Homolog of NCBI NO: 15238209 NR Description: DNA polymerase alpha subunit IV (primase)-related
MTVAIKVIDTSLREDFGFKHILWVFSGRRGVHCWVCDAKARRLTNEQRSAVAEYFRVYKGNENNAKKVDLMGHSLHPFLARSYVDFIKSFFEGELQATQSIFSSKEKYEKILGMITDEDIQADLRGKWENSARSSLSEEATSLLRWEQLKKALQSKRNKALSLRTCVEEIVFTFTYPRIDLEVSKQMNHLLKAPFCVHPKTGRVCVPIDPNNCDEFDPLAVPTLSQLIEEINSGGLRMDVDDDDSDSSLLGKSIKFFRSSFLEPLLKSCKEEIESSYKTKIAKTKDSFSW

SEQ ID NO: 47689 - DNA, 2082 bp, Arabidopsis thaliana
  misc_feature (1)..(2082): Ceres Seq. ID no. 13647442
  misc_feature: MA Experiment ID: 20000180 Result: Down-regulated in Transcription
  misc_feature: MA Experiment 20000180 PARAMETER Experiment Name: At_Germinating_Seeds_P Parameter: Age (hr) Value: 24 vs. 0
  misc_feature: MA Experiment 20000180 PARAMETER Experiment Name: At_Germinating_Seeds_P Parameter: Tissue Value: Germinating Seeds
  misc_feature: MA Experiment ID: 20000445 Result: Down-regulated in Transcription
  misc_feature: MA Experiment 20000445 PARAMETER Experiment Name: At_100uM_NAA__P Parameter: Age (day) Value: 14
  misc_feature: MA Experiment 20000445 PARAMETER Experiment Name: At_100uM_NAA__P Parameter: Organism Value: A. thaliana
  misc_feature: MA Experiment 20000445 PARAMETER Experiment Name: At_100uM_NAA__P Parameter: Plant Line Value: WS
  misc_feature: MA Experiment 20000445 PARAMETER Experiment Name: At_100uM_NAA__P Parameter: Timepoint (hr) Value: 6
  misc_feature: MA Experiment 20000445 PARAMETER Experiment Name: At_100uM_NAA__P Parameter: Tissue Value: Aerial
  misc_feature: MA Experiment 20000445 PARAMETER Experiment Name: At_100uM_NAA__P Parameter: Treatment Value: 100uM NAA vs. No Treatment
  misc_feature: MA Experiment ID: 20001451 Result: Up-regulated in Transcription
  misc_feature: MA Experiment 20001451 PARAMETER Experiment Name: At_Far-red-induction_P Parameter: Age (day) Value: 7
  misc_feature: MA Experiment 20001451 PARAMETER Experiment Name: At_Far-red-induction_P Parameter: Light Value: Far-red vs. White
  misc_feature: MA Experiment 20001451 PARAMETER Experiment Name: At_Far-red-induction_P Parameter: Organism Value: A. thaliana
  misc_feature: MA Experiment 20001451 PARAMETER Experiment Name: At_Far-red-induction_P Parameter: Plant Line Value: Columbia
  misc_feature: MA Experiment 20001451 PARAMETER Experiment Name: At_Far-red-induction_P Parameter: Timepoint (hr) Value: 24
  misc_feature: MA Experiment 20001451 PARAMETER Experiment Name: At_Far-red-induction_P Parameter: Tissue Value: Whole Plant
  misc_feature: MA Experiment ID: 20001560 Result: Up-regulated in Transcription
  misc_feature: MA Experiment 20001560 PARAMETER Experiment Name: At_Drought_Soil_Dry_P Parameter: Age (day) Value: 28
  misc_feature: MA Experiment 20001560 PARAMETER Experiment Name: At_Drought_Soil_Dry_P Parameter: Organism Value: A. thaliana
  misc_feature: MA Experiment 20001560 PARAMETER Experiment Name: At_Drought_Soil_Dry_P Parameter: Plant Line Value: WS
  misc_feature: MA Experiment 20001560 PARAMETER Experiment Name: At_Drought_Soil_Dry_P Parameter: Post Timepoint (hr) Value: None
  misc_feature: MA Experiment 20001560 PARAMETER Experiment Name: At_Drought_Soil_Dry_P Parameter: Post-Treatment Value: None
  misc_feature: MA Experiment 20001560 PARAMETER Experiment Name: At_Drought_Soil_Dry_P Parameter: Timepoint (day) Value: 14
  misc_feature: MA Experiment 20001560 PARAMETER Experiment Name: At_Drought_Soil_Dry_P Parameter: Treatment Value: Drought vs. No Drought
  misc_feature: MA Experiment ID: 20001911 Result: Up-regulated in Transcription
  misc_feature: MA Experiment 20001911 PARAMETER Experiment Name: At_Drought_Reproduction_P Parameter: Age (day) Value: 40
  misc_feature: MA Experiment 20001911 PARAMETER Experiment Name: At_Drought_Reproduction_P Parameter: Organism Value: A. thaliana
  misc_feature: MA Experiment 20001911 PARAMETER Experiment Name: At_Drought_Reproduction_P Parameter: Plant Line Value: WS
  misc_feature: MA Experiment 20001911 PARAMETER Experiment Name: At_Drought_Reproduction_P Parameter: Timepoint (day) Value: 10
  misc_feature: MA Experiment 20001911 PARAMETER Experiment Name: At_Drought_Reproduction_P Parameter: Tissue Value: Flowers
  misc_feature: MA Experiment 20001911 PARAMETER Experiment Name: At_Drought_Reproduction_P Parameter: Treatment Value: Drought vs. No Drought
atccaaaacataattagtataacgatactactactaaccgactggactagattattctacttgatatatcctctcgagaactattgctgccgctactcgtttcatatctccgtctccggctcgatccgccaagtagagtaagcagcaatgactaaaaagaagaatcctaatgttttcttggatgtatcaattggtggggatcccgttcaacggattgtcattgagctttttgctgatgttgtccccaagacagcggaaaacttccgtgccctctgcacaggtgaggcgggcgttggaaagtccactgggaagcctctacatttcaaaggatcatctttccatcgggttatcaaaggattcatggctcagggtggtgatttttccaatgggaatggcactggtggggagagcatctatggtgggaagttttcagatgagaactttagattggaccatgatggagctggagtcctttcaatggcaaattgtggcccaaataccaacgggtcccaattttttatactttttaaacgccaaccacatcttgatgggaagcatgttgtatttggcaaagtcgttgaagggatggcagtaatcaagaaaatggaacttctggggacgagtgatgggaaacctactagcccagtcaaaataatagactgtggtgaaacgtctcagataagagcacatgatgctgctgaaagagaaaaagggaaatcgaaaaaatcaaacaagaacttttctcctggtgacgtatctgaccgtgaagctaaggagacacgcaaaaaagaatctaacgagaaaaggataaaacgaaaaagaagatactcttcgtcagattcatatagctcaagttccgactcagattcagattcggaatcagaagcatattcatcttcctcctatgagtctagttcttccagtgatgggaagcataggaagaggaagtcaacaacaagacacaaaggccgacgcggggaaagaaagagtaaaggacgaagcgggaaaaagaaagctcggccagatagaaaaccaagcacgaatagttcaagtgacacggagagtagcagcagttctgatgatgagaaagtgggccacaaagccataaagtcagtgaaagttgataacgctgatcaacacgccaacttggatgactcagtgaaatcaaggagcaggagcccaattcgtaggagaaaccaaaacagcaggagcaaaagtcctagtaggagccctgtgagagttcttggaaatggaaacagaagtcctagtaggagccctgtgagagatcttggaaatggaagcagaagtcctcgtgagaagccaacagaggaaactgtggggaaatctttcagaagcccatctccaagtggtgtgcccaagcgcatccgaaaggggcgtgggttcaccgaacgctattcctttgctcggaagtaccatactccttctcctgagcgttctcctcctagacattggcctgacagaagaaactttcaggataggaacagggataggtatccgagcaacagaagttactctgagcgctcaccgaggggacgctttagaagcccacccagaagaaggagccctccaaggtacaaccggaggagaaggagcacttctcggagtccagatgggtaccgtagacgattgagagacggaagcaggagccagagtccgaggcatcgtagccgtagccagagccctagaaagaggcagccaattagccaagacctgaaatcccgtctcgggccacagagatcccccatcagaggaggacgcacctctcctgcagaatcactcagcccttctcactcaccttctccaccaggaaagagaggtctggttagctatgcggattgatggtcactctcatccattggtttctctgctgacttgcgagtttttgttttaatttccgtgttttagtgcaagcaataataggtaatgatattttttatgttggtcggatatataatactctaccttagttgcattattacagatcgtggaacattgatcaaattgagactgatatatgttggcagaattgagtttgggaatcgaagtttgtagaaaatttat

SEQ ID NO: 47690 - protein, 570 aa, Arabidopsis thaliana
  peptide (1)..(570): Ceres Seq. ID no. 13647443
  misc_feature (215)..(311): Pfam Name: Lipoprotein amino terminal region Pfam Description: Lipoprotein amino terminal region
  misc_feature (6)..(176): Homolog of NCBI NO: 15226467 NR Description: cyclophilin (CYP2) [Arabidopsis thaliana]
  misc_feature (6)..(176): Homolog of NCBI NO: 18076088 NR Description: cyclophilin [Ricinus communis]
  misc_feature (6)..(174): Homolog of NCBI NO: 11270316 NR Description: peptidylprolyl isomerase (EC 5.2.1.8)
  misc_feature (3)..(522): Homolog of NCBI NO: 4758106 NR Description: peptidyl-prolyl isomerase G (cyclophilin G)
  misc_feature (3)..(541): Homolog of NCBI NO: 28277610 NR Description: Similar to matrin cyclophilin (matrin-cyp) [Danio
  misc_feature (1)..(550): Homolog of NCBI NO: 20259449 NR Description: unknown protein [Arabidopsis thaliana]
  misc_feature (1)..(550): Homolog of NCBI NO: 22329097 NR Description: expressed protein [Arabidopsis thaliana]
  misc_feature (3)..(563): Homolog of NCBI NO: 37788310 NR Description: cyclophilin-like protein [Triticum aestivum]
  misc_feature (1)..(376): Homolog of NCBI NO: 30695789 NR Description: cyclophylin -related protein [Arabidopsis
  misc_feature (1)..(570): Homolog of NCBI NO: 15229425 NR Description: cyclophylin -related protein [Arabidopsis
MTKKKNPNVFLDVSIGGDPVQRIVIELFADVVPKTAENFRALCTGEAGVGKSTGKPLHFKGSSFHRVIKGFMAQGGDFSNGNGTGGESIYGGKFSDENFRLDHDGAGVLSMANCGPNTNGSQFFILFKRQPHLDGKHVVFGKVVEGMAVIKKMELLGTSDGKPTSPVKIIDCGETSQIRAHDAAEREKGKSKKSNKNFSPGDVSDREAKETRKKESNEKRIKRKRRYSSSDSYSSSSDSDSDSESEAYSSSSYESSSSSDGKHRKRKSTTRHKGRRGERKSKGRSGKKKARPDRKPSTNSSSDTESSSSSDDEKVGHKAIKSVKVDNADQHANLDDSVKSRSRSPIRRRNQNSRSKSPSRSPVRVLGNGNRSPSRSPVRDLGNGSRSPREKPTEETVGKSFRSPSPSGVPKRIRKGRGFTERYSFARKYHTPSPERSPPRHWPDRRNFQDRNRDRYPSNRSYSERSPRGRFRSPPRRRSPPRYNRRRRSTSRSPDGYRRRLRDGSRSQSPRHRSRSQSPRKRQPISQDLKSRLGPQRSPIRGGRTSPAESLSPSHSPSPPGKRGLVSYAD

SEQ ID NO: 47691 - protein, 499 aa, Arabidopsis thaliana
  peptide (1)..(499): Ceres Seq. ID no. 13647444
  misc_feature (144)..(240): Pfam Name: Lipoprotein amino terminal region Pfam Description: Lipoprotein amino terminal region
  misc_feature (1)..(105): Homolog of NCBI NO: 15226467 NR Description: cyclophilin (CYP2) [Arabidopsis thaliana]
  misc_feature (1)..(105): Homolog of NCBI NO: 18076088 NR Description: cyclophilin [Ricinus communis]
  misc_feature (1)..(103): Homolog of NCBI NO: 11270316 NR Description: peptidylprolyl isomerase (EC 5.2.1.8)
  misc_feature (1)..(451): Homolog of NCBI NO: 4758106 NR Description: peptidyl-prolyl isomerase G (cyclophilin G)
  misc_feature (1)..(470): Homolog of NCBI NO: 28277610 NR Description: Similar to matrin cyclophilin (matrin-cyp) [Danio
  misc_feature (1)..(479): Homolog of NCBI NO: 20259449 NR Description: unknown protein [Arabidopsis thaliana]
  misc_feature (1)..(479): Homolog of NCBI NO: 22329097 NR Description: expressed protein [Arabidopsis thaliana]
  misc_feature (1)..(492): Homolog of NCBI NO: 37788310 NR Description: cyclophilin-like protein [Triticum aestivum]
  misc_feature (1)..(305): Homolog of NCBI NO: 30695789 NR Description: cyclophylin -related protein [Arabidopsis
  misc_feature (1)..(499): Homolog of NCBI NO: 15229425 NR Description: cyclophylin -related protein [Arabidopsis
MAQGGDFSNGNGTGGESIYGGKFSDENFRLDHDGAGVLSMANCGPNTNGSQFFILFKRQPHLDGKHVVFGKVVEGMAVIKKMELLGTSDGKPTSPVKIIDCGETSQIRAHDAAEREKGKSKKSNKNFSPGDVSDREAKETRKKESNEKRIKRKRRYSSSDSYSSSSDSDSDSESEAYSSSSYESSSSSDGKHRKRKSTTRHKGRRGERKSKGRSGKKKARPDRKPSTNSSSDTESSSSSDDEKVGHKAIKSVKVDNADQHANLDDSVKSRSRSPIRRRNQNSRSKSPSRSPVRVLGNGNRSPSRSPVRDLGNGSRSPREKPTEETVGKSFRSPSPSGVPKRIRKGRGFTERYSFARKYHTPSPERSPPRHWPDRRNFQDRNRDRYPSNRSYSERSPRGRFRSPPRRRSPPRYNRRRRSTSRSPDGYRRRLRDGSRSQSPRHRSRSQSPRKRQPISQDLKSRLGPQRSPIRGGRTSPAESLSPSHSPSPPGKRGLVSYAD

SEQ ID NO: 47692 - protein, 460 aa, Arabidopsis thaliana
  peptide (1)..(460): Ceres Seq. ID no. 13647445
  misc_feature (105)..(201): Pfam Name: Lipoprotein amino terminal region Pfam Description: Lipoprotein amino terminal region
  misc_feature (1)..(66): Homolog of NCBI NO: 15226467 NR Description: cyclophilin (CYP2) [Arabidopsis thaliana]
  misc_feature (1)..(66): Homolog of NCBI NO: 18076088 NR Description: cyclophilin [Ricinus communis]
  misc_feature (1)..(64): Homolog of NCBI NO: 11270316 NR Description: peptidylprolyl isomerase (EC 5.2.1.8)
  misc_feature (1)..(412): Homolog of NCBI NO: 4758106 NR Description: peptidyl-prolyl isomerase G (cyclophilin G)
  misc_feature (1)..(431): Homolog of NCBI NO: 28277610 NR Description: Similar to matrin cyclophilin (matrin-cyp) [Danio
  misc_feature (1)..(440): Homolog of NCBI NO: 20259449 NR Description: unknown protein [Arabidopsis thaliana]
  misc_feature (1)..(440): Homolog of NCBI NO: 22329097 NR Description: expressed protein [Arabidopsis thaliana]
  misc_feature (1)..(453): Homolog of NCBI NO: 37788310 NR Description: cyclophilin-like protein [Triticum aestivum]
  misc_feature (1)..(266): Homolog of NCBI NO: 30695789 NR Description: cyclophylin -related protein [Arabidopsis
  misc_feature (1)..(460): Homolog of NCBI NO: 15229425 NR Description: cyclophylin -related protein [Arabidopsis
MANCGPNTNGSQFFILFKRQPHLDGKHVVFGKVVEGMAVIKKMELLGTSDGKPTSPVKIIDCGETSQIRAHDAAEREKGKSKKSNKNFSPGDVSDREAKETRKKESNEKRIKRKRRYSSSDSYSSSSDSDSDSESEAYSSSSYESSSSSDGKHRKRKSTTRHKGRRGERKSKGRSGKKKARPDRKPSTNSSSDTESSSSSDDEKVGHKAIKSVKVDNADQHANLDDSVKSRSRSPIRRRNQNSRSKSPSRSPVRVLGNGNRSPSRSPVRDLGNGSRSPREKPTEETVGKSFRSPSPSGVPKRIRKGRGFTERYSFARKYHTPSPERSPPRHWPDRRNFQDRNRDRYPSNRSYSERSPRGRFRSPPRRRSPPRYNRRRRSTSRSPDGYRRRLRDGSRSQSPRHRSRSQSPRKRQPISQDLKSRLGPQRSPIRGGRTSPAESLSPSHSPSPPGKRGLVSYAD

SEQ ID NO: 47693 - DNA, 672 bp, Arabidopsis thaliana
  misc_feature (1)..(672): Ceres Seq. ID no. 13647469
  misc_feature: MA Experiment ID: 20001911 Result: Down-regulated in Transcription
  misc_feature: MA Experiment 20001911 PARAMETER Experiment Name: At_Drought_Reproduction_P Parameter: Age (day) Value: 40
  misc_feature: MA Experiment 20001911 PARAMETER Experiment Name: At_Drought_Reproduction_P Parameter: Organism Value: A. thaliana
  misc_feature: MA Experiment 20001911 PARAMETER Experiment Name: At_Drought_Reproduction_P Parameter: Plant Line Value: WS
  misc_feature: MA Experiment 20001911 PARAMETER Experiment Name: At_Drought_Reproduction_P Parameter: Timepoint (day) Value: 10
  misc_feature: MA Experiment 20001911 PARAMETER Experiment Name: At_Drought_Reproduction_P Parameter: Tissue Value: Flowers
  misc_feature: MA Experiment 20001911 PARAMETER Experiment Name: At_Drought_Reproduction_P Parameter: Treatment Value: Drought vs. No Drought
acactcttgtataaagttttgagctttaagtctcagagtcaggttttggtgggttaattctggtagacaagaatcaaacaaacaatgggagacgaagcaaagatcttcactctttcagaagtttcagagcataatcaagctcatgactgttggattgtcatcaatggaaaggtgtacaatgtgaccaagtttcttgaagaccatccaggtggggacgatgttctcttgtcttcaacaggtaaggatgcaacggatgattttgaggacgtgggtcacagcgagagtgcaagagaaatgatggagcagtactacgtaggagagattgatccaacaacaataccaaagaaagtcaaatacacacctcctaaacagcctcactacaatcaagacaagacctctgaattcataatcaagctcctccagttcctcgtaccccttgccattcttggtttagcagtcggaatccgtatctacaccaaatcagggtaggcttcttttttttctgagcattacttccttatatcttatatatagagagaaagattcaagtcttttgaaaagacaaatctgaaagtctctccctttgttattgtctcttcccatattttgctgtttgaatgtattttggataatttcttatctattgtggtgtaactgcatataaacacagtc

SEQ ID NO: 47694 - protein, 134 aa, Arabidopsis thaliana
  peptide (1)..(134): Ceres Seq. ID no. 13647470
  misc_feature (7)..(81): Pfam Name: Cytochrome b5-like Heme/Steroid binding domain Pfam Description: Cytochrome b5-like Heme/Steroid binding domain
  misc_feature (1)..(132): Homolog of NCBI NO: 1345879 NR Description: Cytochrome b5
  misc_feature (6)..(133): Homolog of NCBI NO: 12229735 NR Description: Cytochrome b5
  misc_feature (5)..(133): Homolog of NCBI NO: 2647949 NR Description: cytochrome b5 [Olea europaea]
  misc_feature (3)..(133): Homolog of NCBI NO: 1345881 NR Description: Cytochrome b5
  misc_feature (3)..(133): Homolog of NCBI NO: 14719320 NR Description: cytochrome B5 [Oryza sativa]
  misc_feature (1)..(132): Homolog of NCBI NO: 1345925 NR Description: Cytochrome b5, seed isoform
  misc_feature (6)..(133): Homolog of NCBI NO: 34905998 NR Description: putative cytochrome B5 [Oryza sativa (japonica
  misc_feature (1)..(132): Homolog of NCBI NO: 1345882 NR Description: CYTOCHROME B5
  misc_feature (1)..(132): Homolog of NCBI NO: 1076621 NR Description: cytochrome b5 - common tobacco
  misc_feature (1)..(134): Homolog of NCBI NO: 15225731 NR Description: cytochrome b5, putative [Arabidopsis thaliana]
MGDEAKIFTLSEVSEHNQAHDCWIVINGKVYNVTKFLEDHPGGDDVLLSSTGKDATDDFEDVGHSESAREMMEQYYVGEIDPTTIPKKVKYTPPKQPHYNQDKTSEFIIKLLQFLVPLAILGLAVGIRIYTKSG

SEQ ID NO: 47695 - DNA, 2002 bp, Arabidopsis thaliana; identical to SEQ ID NO: 44162
  misc_feature (1)..(2002): Ceres Seq. ID no. 12489432
  misc_feature: MA Experiment ID: 20000166 Result: Up-regulated in Transcription
  misc_feature: MA Experiment 20000166 PARAMETER Experiment Name: At_100uM_ABA_P Parameter: Age (day) Value: 14
  misc_feature: MA Experiment 20000166 PARAMETER Experiment Name: At_100uM_ABA_P Parameter: Organism Value: A. thaliana
  misc_feature: MA Experiment 20000166 PARAMETER Experiment Name: At_100uM_ABA_P Parameter: Plant Line Value: WS
  misc_feature: MA Experiment 20000166 PARAMETER Experiment Name: At_100uM_ABA_P Parameter: Timepoint (hr) Value: 1
  misc_feature: MA Experiment 20000166 PARAMETER Experiment Name: At_100uM_ABA_P Parameter: Tissue Value: Aerial
  misc_feature: MA Experiment 20000166 PARAMETER Experiment Name: At_100uM_ABA_P Parameter: Treatment Value: 100uM ABA vs. No Treatment
  misc_feature: MA Experiment ID: 20000169 Result: Up-regulated in Transcription
  misc_feature: MA Experiment 20000169 PARAMETER Experiment Name: At_100uM_ABA_P Parameter: Age (day) Value: 14
  misc_feature: MA Experiment 20000169 PARAMETER Experiment Name: At_100uM_ABA_P Parameter: Organism Value: A. thaliana
  misc_feature: MA Experiment 20000169 PARAMETER Experiment Name: At_100uM_ABA_P Parameter: Plant Line Value: WS
  misc_feature: MA Experiment 20000169 PARAMETER Experiment Name: At_100uM_ABA_P Parameter: Timepoint (hr) Value: 6
  misc_feature: MA Experiment 20000169 PARAMETER Experiment Name: At_100uM_ABA_P Parameter: Tissue Value: Aerial
  misc_feature: MA Experiment 20000169 PARAMETER Experiment Name: At_100uM_ABA_P Parameter: Treatment Value: 100uM ABA vs. No Treatment
  misc_feature: MA Experiment ID: 20000179 Result: Down-regulated in Transcription
  misc_feature: MA Experiment 20000179 PARAMETER Experiment Name: At_Germinating_Seeds_P Parameter: Age (hr) Value: 6 vs. 0
  misc_feature: MA Experiment 20000179 PARAMETER Experiment Name: At_Germinating_Seeds_P Parameter: Tissue Value: Germinating Seeds
  misc_feature: MA Experiment ID: 20000182 Result: Up-regulated in Transcription
  misc_feature: MA Experiment 20000182 PARAMETER Experiment Name: At_2mM_SA_P Parameter: Age (day) Value: 14
  misc_feature: MA Experiment 20000182 PARAMETER Experiment Name: At_2mM_SA_P Parameter: Organism Value: A. thaliana
  misc_feature: MA Experiment 20000182 PARAMETER Experiment Name: At_2mM_SA_P Parameter: Plant Line Value: WS
  misc_feature: MA Experiment 20000182 PARAMETER Experiment Name: At_2mM_SA_P Parameter: Timepoint (hr) Value: 6
  misc_feature: MA Experiment 20000182 PARAMETER Experiment Name: At_2mM_SA_P Parameter: Tissue Value: Aerial
  misc_feature: MA Experiment 20000182 PARAMETER Experiment Name: At_2mM_SA_P Parameter: Treatment Value: 2mM SA vs. No Treatment
  misc_feature: MA Experiment ID: 20000234 Result: Down-regulated in Transcription
  misc_feature: MA Experiment 20000234 PARAMETER Experiment Name: At_Siliques_P Parameter: Age (day) Value: 21
  misc_feature: MA Experiment 20000234 PARAMETER Experiment Name: At_Siliques_P Parameter: Organism Value: A. thaliana
  misc_feature: MA Experiment 20000234 PARAMETER Experiment Name: At_Siliques_P Parameter: Plant Line Value: WS
  misc_feature: MA Experiment 20000234 PARAMETER Experiment Name: At_Siliques_P Parameter: Tissue Value: Less Than 5mm Siliques vs. Whole Plant
  misc_feature: MA Experiment ID: 20000267 Result: Up-regulated in Transcription
  misc_feature: MA Experiment 20000267 PARAMETER Experiment Name: At_Drought_P Parameter: Age (day) Value: 7
  misc_feature: MA Experiment 20000267 PARAMETER Experiment Name: At_Drought_P Parameter: Organism Value: A. thaliana
  misc_feature: MA Experiment 20000267 PARAMETER Experiment Name: At_Drought_P Parameter: Plant Line Value: WS
  misc_feature: MA Experiment 20000267 PARAMETER Experiment Name: At_Drought_P Parameter: Timepoint (hr) Value: 6
  misc_feature: MA Experiment 20000267 PARAMETER Experiment Name: At_Drought_P Parameter: Tissue Value: Whole Plant
  misc_feature: MA Experiment 20000267 PARAMETER Experiment Name: At_Drought_P Parameter: Treatment Value: Drought vs. No Drought
  misc_feature: MA Experiment ID: 20000268 Result: Up-regulated in Transcription
  misc_feature: MA Experiment 20000268 PARAMETER Experiment Name: At_100mM_NaCl__P Parameter: Age (day) Value: 14
  misc_feature: MA Experiment 20000268 PARAMETER Experiment Name: At_100mM_NaCl__P Parameter: Organism Value: A. thaliana
  misc_feature: MA Experiment 20000268 PARAMETER Experiment Name: At_100mM_NaCl__P Parameter: Plant Line Value: WS
  misc_feature: MA Experiment 20000268 PARAMETER Experiment Name: At_100mM_NaCl__P Parameter: Timepoint (hr) Value: 6
  misc_feature: MA Experiment 20000268 PARAMETER Experiment Name: At_100mM_NaCl__P Parameter: Tissue Value: Whole Plant
  misc_feature: MA Experiment 20000268 PARAMETER Experiment Name: At_100mM_NaCl__P Parameter: Treatment Value: 100mM NaCl vs. No Treatment
  misc_feature: MA Experiment ID: 20000436 Result: Up-regulated in Transcription
  misc_feature: MA Experiment 20000436 PARAMETER Experiment Name: At_Drought_P Parameter: Age (day) Value: 7
  misc_feature: MA Experiment 20000436 PARAMETER Experiment Name: At_Drought_P Parameter: Organism Value: A. thaliana
  misc_feature: MA Experiment 20000436 PARAMETER Experiment Name: At_Drought_P Parameter: Plant Line Value: WS
  misc_feature: MA Experiment 20000436 PARAMETER Experiment Name: At_Drought_P Parameter: Timepoint (hr) Value: 12
  misc_feature: MA Experiment 20000436 PARAMETER Experiment Name: At_Drought_P Parameter: Tissue Value: Whole Plant
  misc_feature: MA Experiment 20000436 PARAMETER Experiment Name: At_Drought_P Parameter: Treatment Value: Drought vs. No Drought
  misc_feature: MA Experiment ID: 20000437 Result: Up-regulated in Transcription
  misc_feature: MA Experiment 20000437 PARAMETER Experiment Name: At_Drought_P Parameter: Age (day) Value: 8
  misc_feature: MA Experiment 20000437 PARAMETER Experiment Name: At_Drought_P Parameter: Organism Value: A. thaliana
  misc_feature: MA Experiment 20000437 PARAMETER Experiment Name: At_Drought_P Parameter: Plant Line Value: WS
  misc_feature: MA Experiment 20000437 PARAMETER Experiment Name: At_Drought_P Parameter: Timepoint (hr) Value: 24
  misc_feature: MA Experiment 20000437 PARAMETER Experiment Name: At_Drought_P Parameter: Tissue Value: Whole Plant
  misc_feature: MA Experiment 20000437 PARAMETER Experiment Name: At_Drought_P Parameter: Treatment Value: Drought vs. No Drought
  misc_feature: MA Experiment ID: 20000453 Result: Up-regulated in Transcription
  misc_feature: MA Experiment 20000453 PARAMETER Experiment Name: At_100uM_ABA_P Parameter: Age (day) Value: 15
  misc_feature: MA Experiment 20000453 PARAMETER Experiment Name: At_100uM_ABA_P Parameter: Organism Value: A. thaliana
  misc_feature: MA Experiment 20000453 PARAMETER Experiment Name: At_100uM_ABA_P Parameter: Plant Line Value: WS
  misc_feature: MA Experiment 20000453 PARAMETER Experiment Name: At_100uM_ABA_P Parameter: Timepoint (hr) Value: 24
  misc_feature: MA Experiment 20000453 PARAMETER Experiment Name: At_100uM_ABA_P Parameter: Tissue Value: Aerial
  misc_feature: MA Experiment 20000453 PARAMETER Experiment Name: At_100uM_ABA_P Parameter: Treatment Value: 100uM ABA vs. No Treatment
  misc_feature: MA Experiment ID: 20001247 Result: Down-regulated in Transcription
  misc_feature: MA Experiment 20001247 PARAMETER Experiment Name: At_Far-red-induction_P Parameter: Age (day) Value: 7
  misc_feature: MA Experiment 20001247 PARAMETER Experiment Name: At_Far-red-induction_P Parameter: Light Value: Far-red vs. White
  misc_feature: MA Experiment 20001247 PARAMETER Experiment Name: At_Far-red-induction_P Parameter: Organism Value: A. thaliana
  misc_feature: MA Experiment 20001247 PARAMETER Experiment Name: At_Far-red-induction_P Parameter: Plant Line Value: Columbia
  misc_feature: MA Experiment 20001247 PARAMETER Experiment Name: At_Far-red-induction_P Parameter: Timepoint (hr) Value: 1
  misc_feature: MA Experiment 20001247 PARAMETER Experiment Name: At_Far-red-induction_P Parameter: Tissue Value: Whole Plant
  misc_feature: MA Experiment ID: 20001554 Result: Up-regulated in Transcription
  misc_feature: MA Experiment 20001554 PARAMETER Experiment Name: At_Drought_Soil_Dry_P Parameter: Age (day) Value: 21
  misc_feature: MA Experiment 20001554 PARAMETER Experiment Name: At_Drought_Soil_Dry_P Parameter: Organism Value: A. thaliana
  misc_feature: MA Experiment 20001554 PARAMETER Experiment Name: At_Drought_Soil_Dry_P Parameter: Plant Line Value: WS
  misc_feature: MA Experiment 20001554 PARAMETER Experiment Name: At_Drought_Soil_Dry_P Parameter: Post Timepoint (hr) Value: None
  misc_feature: MA Experiment 20001554 PARAMETER Experiment Name: At_Drought_Soil_Dry_P Parameter: Post-Treatment Value: None
  misc_feature: MA Experiment 20001554 PARAMETER Experiment Name: At_Drought_Soil_Dry_P Parameter: Timepoint (day) Value: 7
  misc_feature: MA Experiment 20001554 PARAMETER Experiment Name: At_Drought_Soil_Dry_P Parameter: Treatment Value: Drought vs. No Drought
  misc_feature: MA Experiment ID: 20001555 Result: Up-regulated in Transcription
  misc_feature: MA Experiment 20001555 PARAMETER Experiment Name: At_Drought_Soil_Dry_P Parameter: Age (day) Value: 24
  misc_feature: MA Experiment 20001555 PARAMETER Experiment Name: At_Drought_Soil_Dry_P Parameter: Organism Value: A. thaliana
  misc_feature: MA Experiment 20001555 PARAMETER Experiment Name: At_Drought_Soil_Dry_P Parameter: Plant Line Value: WS
  misc_feature: MA Experiment 20001555 PARAMETER Experiment Name: At_Drought_Soil_Dry_P Parameter: Post Timepoint (hr) Value: None
  misc_feature: MA Experiment 20001555 PARAMETER Experiment Name: At_Drought_Soil_Dry_P Parameter: Post-Treatment Value: None
  misc_feature: MA Experiment 20001555 PARAMETER Experiment Name: At_Drought_Soil_Dry_P Parameter: Timepoint (day) Value: 10
  misc_feature: MA Experiment 20001555 PARAMETER Experiment Name: At_Drought_Soil_Dry_P Parameter: Treatment Value: Drought vs. No Drought
  misc_feature: MA Experiment ID: 20001559 Result: Up-regulated in Transcription
  misc_feature: MA Experiment 20001559 PARAMETER Experiment Name: At_Drought_Soil_Dry_P Parameter: Age (day) Value: 28
  misc_feature: MA Experiment 20001559 PARAMETER Experiment Name: At_Drought_Soil_Dry_P Parameter: Organism Value: A. thaliana
  misc_feature: MA Experiment 20001559 PARAMETER Experiment Name: At_Drought_Soil_Dry_P Parameter: Plant Line Value: WS
  misc_feature: MA Experiment 20001559 PARAMETER Experiment Name: At_Drought_Soil_Dry_P Parameter: Post Timepoint (hr) Value: 29
  misc_feature: MA Experiment 20001559 PARAMETER Experiment Name: At_Drought_Soil_Dry_P Parameter: Post-Treatment Value: Re-Water vs. No Drought
  misc_feature: MA Experiment 20001559 PARAMETER Experiment Name: At_Drought_Soil_Dry_P Parameter: Timepoint (day) Value: 14
  misc_feature: MA Experiment 20001559 PARAMETER Experiment Name: At_Drought_Soil_Dry_P Parameter: Treatment Value: Drought vs. No Drought
  misc_feature: MA Experiment ID: 20001757 Result: Down-regulated in Transcription
  misc_feature: MA Experiment 20001757 PARAMETER Experiment Name: At_50mM_NH4NO3_L-to-H_P Parameter: Timepoint (hr) Value: 6
  misc_feature: MA Experiment 20001757 PARAMETER Experiment Name: At_50mM_NH4NO3_L-to-H_P Parameter: Tissue Value: Leaf
  misc_feature: MA Experiment 20001757 PARAMETER Experiment Name: At_50mM_NH4NO3_L-to-H_P Parameter: Treatment Value: 50mM NH4NO3 vs 100mM Mannitol
  misc_feature: MA Experiment ID: 20001904 Result: Up-regulated in Transcription
  misc_feature: MA Experiment 20001904 PARAMETER Experiment Name: At_Drought_Reproduction_P Parameter: Age (day) Value: 37
  misc_feature: MA Experiment 20001904 PARAMETER Experiment Name: At_Drought_Reproduction_P Parameter: Organism Value: A. thaliana
  misc_feature: MA Experiment 20001904 PARAMETER Experiment Name: At_Drought_Reproduction_P Parameter: Plant Line Value: WS
  misc_feature: MA Experiment 20001904 PARAMETER Experiment Name: At_Drought_Reproduction_P Parameter: Timepoint (day) Value: 7
  misc_feature: MA Experiment 20001904 PARAMETER Experiment Name: At_Drought_Reproduction_P Parameter: Tissue Value: Rosettes
  misc_feature: MA Experiment 20001904 PARAMETER Experiment Name: At_Drought_Reproduction_P Parameter: Treatment Value: Drought vs. No Drought
  misc_feature: MA Experiment ID: 20001906 Result: Up-regulated in Transcription
  misc_feature: MA Experiment 20001906 PARAMETER Experiment Name: At_Drought_Reproduction_P Parameter: Age (day) Value: 35
  misc_feature: MA Experiment 20001906 PARAMETER Experiment Name: At_Drought_Reproduction_P Parameter: Organism Value: A. thaliana
  misc_feature: MA Experiment 20001906 PARAMETER Experiment Name: At_Drought_Reproduction_P Parameter: Plant Line Value: WS
  misc_feature: MA Experiment 20001906 PARAMETER Experiment Name: At_Drought_Reproduction_P Parameter: Timepoint (day) Value: 5
  misc_feature: MA Experiment 20001906 PARAMETER Experiment Name: At_Drought_Reproduction_P Parameter: Tissue Value: Siliques
  misc_feature: MA Experiment 20001906 PARAMETER Experiment Name: At_Drought_Reproduction_P Parameter: Treatment Value: Drought vs. No Drought
  misc_feature: MA Experiment ID: 20001908 Result: Up-regulated in Transcription
  misc_feature: MA Experiment 20001908 PARAMETER Experiment Name: At_Drought_Reproduction_P Parameter: Age (day) Value: 40
  misc_feature: MA Experiment 20001908 PARAMETER Experiment Name: At_Drought_Reproduction_P Parameter: Organism Value: A. thaliana
  misc_feature: MA Experiment 20001908 PARAMETER Experiment Name: At_Drought_Reproduction_P Parameter: Plant Line Value: WS
  misc_feature: MA Experiment 20001908 PARAMETER Experiment Name: At_Drought_Reproduction_P Parameter: Timepoint (day) Value: 10
  misc_feature: MA Experiment 20001908 PARAMETER Experiment Name: At_Drought_Reproduction_P Parameter: Tissue Value: Siliques
  misc_feature: MA Experiment 20001908 PARAMETER Experiment Name: At_Drought_Reproduction_P Parameter: Treatment Value: Drought vs. No Drought

SEQ ID NO: 47696 - protein, 434 aa, Arabidopsis thaliana; identical to SEQ ID NO: 44163
  peptide (1)..(434): Ceres Seq. ID no. 12489433
  misc_feature (127)..(415): Pfam Name: Protein phosphatase 2C Pfam Description: Protein phosphatase 2C
  misc_feature (127)..(415): Pfam Name: Protein phosphatase 2C Pfam Description: Protein phosphatase 2C
  misc_feature (229)..(431): Homolog of NCBI NO: 15218595 NR Description: protein phosphatase 2C (AtP2C-HA); protein id:
  misc_feature (229)..(431): Homolog of NCBI NO: 3242077 NR Description: protein phosphatase 2C [Arabidopsis thaliana]
  misc_feature (232)..(431): Homolog of NCBI NO: 26452332 NR Description: unknown protein [Arabidopsis thaliana]
  misc_feature (47)..(254): Homolog of NCBI NO: 26452332 NR Description: unknown protein [Arabidopsis thaliana]
  misc_feature (232)..(431): Homolog of NCBI NO: 30685388 NR Description: protein phosphatase 2C (PP2C) -related
  misc_feature (229)..(431): Homolog of NCBI NO: 15218595 NR Description: protein phosphatase 2C (AtP2C-HA); protein id:
  misc_feature (232)..(431): Homolog of NCBI NO: 26452332 NR Description: unknown protein [Arabidopsis thaliana]
  misc_feature (232)..(431): Homolog of NCBI NO: 30685388 NR Description: protein phosphatase 2C (PP2C) -related
  misc_feature (1)..(434): Homolog of NCBI NO: 15236110 NR Description: protein phosphatase ABI1
  misc_feature (1)..(434): Homolog of NCBI NO: 509419 NR Description: ABI1 [Arabidopsis thaliana]
  misc_feature (1)..(434): Homolog of NCBI NO: 14334800 NR Description: putative protein phosphatase ABI1 [Arabidopsis
  misc_feature (1)..(434): Homolog of NCBI NO: 15242022 NR Description: protein phosphatase 2C, ABI2; protein id:
  misc_feature (47)..(254): Homolog of NCBI NO: 30685388 NR Description: protein phosphatase 2C (PP2C) -related
  misc_feature (47)..(254): Homolog of NCBI NO: 26452332 NR Description: unknown protein [Arabidopsis thaliana]
  misc_feature (229)..(431): Homolog of NCBI NO: 3242077 NR Description: protein phosphatase 2C [Arabidopsis thaliana]
  misc_feature (47)..(254): Homolog of NCBI NO: 30685388 NR Description: protein phosphatase 2C (PP2C) -related
  misc_feature (1)..(434): Homolog of NCBI NO: 15242022 NR Description: protein phosphatase 2C, ABI2; protein id:
  misc_feature (1)..(434): Homolog of NCBI NO: 14334800 NR Description: putative protein phosphatase ABI1 [Arabidopsis
  misc_feature (1)..(434): Homolog of NCBI NO: 509419 NR Description: ABI1 [Arabidopsis thaliana]
  misc_feature (1)..(434): Homolog of NCBI NO: 15236110 NR Description: protein phosphatase ABI1

SEQ ID NO: 47697 - protein, 415 aa, Arabidopsis thaliana; identical to SEQ ID NO: 44164
  peptide (1)..(415): Ceres Seq. ID no. 12489434
  misc_feature (108)..(396): Pfam Name: Protein phosphatase 2C Pfam Description: Protein phosphatase 2C
  misc_feature (108)..(396): Pfam Name: Protein phosphatase 2C Pfam Description: Protein phosphatase 2C
  misc_feature (210)..(412): Homolog of NCBI NO: 15218595 NR Description: protein phosphatase 2C (AtP2C-HA); protein id:
  misc_feature (210)..(412): Homolog of NCBI NO: 3242077 NR Description: protein phosphatase 2C [Arabidopsis thaliana]
  misc_feature (213)..(412): Homolog of NCBI NO: 26452332 NR Description: unknown protein [Arabidopsis thaliana]
  misc_feature (28)..(235): Homolog of NCBI NO: 26452332 NR Description: unknown protein [Arabidopsis thaliana]
  misc_feature (213)..(412): Homolog of NCBI NO: 30685388 NR Description: protein phosphatase 2C (PP2C) -related
  misc_feature (210)..(412): Homolog of NCBI NO: 15218595 NR Description: protein phosphatase 2C (AtP2C-HA); protein id:
  misc_feature (213)..(412): Homolog of NCBI NO: 26452332 NR Description: unknown protein [Arabidopsis thaliana]
  misc_feature (213)..(412): Homolog of NCBI NO: 30685388 NR Description: protein phosphatase 2C (PP2C) -related
  misc_feature (1)..(415): Homolog of NCBI NO: 15236110 NR Description: protein phosphatase ABI1
  misc_feature (1)..(415): Homolog of NCBI NO: 509419 NR Description: ABI1 [Arabidopsis thaliana]
  misc_feature (1)..(415): Homolog of NCBI NO: 14334800 NR Description: putative protein phosphatase ABI1 [Arabidopsis
  misc_feature (1)..(415): Homolog of NCBI NO: 15242022 NR Description: protein phosphatase 2C, ABI2; protein id:
  misc_feature (28)..(235): Homolog of NCBI NO: 30685388 NR Description: protein phosphatase 2C (PP2C) -related
  misc_feature (28)..(235): Homolog of NCBI NO: 26452332 NR Description: unknown protein [Arabidopsis thaliana]
  misc_feature (210)..(412): Homolog of NCBI NO: 3242077 NR Description: protein phosphatase 2C [Arabidopsis thaliana]
  misc_feature (28)..(235): Homolog of NCBI NO: 30685388 NR Description: protein phosphatase 2C (PP2C) -related
  misc_feature (1)..(415): Homolog of NCBI NO: 15242022 NR Description: protein phosphatase 2C, ABI2; protein id:
  misc_feature (1)..(415): Homolog of NCBI NO: 14334800 NR Description: putative protein phosphatase ABI1 [Arabidopsis
  misc_feature (1)..(415): Homolog of NCBI NO: 509419 NR Description: ABI1 [Arabidopsis thaliana]
  misc_feature (1)..(415): Homolog of NCBI NO: 15236110 NR Description: protein phosphatase ABI1

SEQ ID NO: 47698 - protein, 388 aa, Arabidopsis thaliana; identical to SEQ ID NO: 44165
  peptide (1)..(388): Ceres Seq. ID no. 12489435
  misc_feature (81)..(369): Pfam Name: Protein phosphatase 2C Pfam Description: Protein phosphatase 2C
  misc_feature (81)..(369): Pfam Name: Protein phosphatase 2C Pfam Description: Protein phosphatase 2C
  misc_feature (183)..(385): Homolog of NCBI NO: 15218595 NR Description: protein phosphatase 2C (AtP2C-HA); protein id:
  misc_feature (183)..(385): Homolog of NCBI NO: 3242077 NR Description: protein phosphatase 2C [Arabidopsis thaliana]
  misc_feature (186)..(385): Homolog of NCBI NO: 26452332 NR Description: unknown protein [Arabidopsis thaliana]
  misc_feature (1)..(208): Homolog of NCBI NO: 26452332 NR Description: unknown protein [Arabidopsis thaliana]
  misc_feature (186)..(385): Homolog of NCBI NO: 30685388 NR Description: protein phosphatase 2C (PP2C) -related
  misc_feature (183)..(385): Homolog of NCBI NO: 15218595 NR Description: protein phosphatase 2C (AtP2C-HA); protein id:
  misc_feature (186)..(385): Homolog of NCBI NO: 26452332 NR Description: unknown protein [Arabidopsis thaliana]
  misc_feature (186)..(385): Homolog of NCBI NO: 30685388 NR Description: protein phosphatase 2C (PP2C) -related
  misc_feature (1)..(388): Homolog of NCBI NO: 15236110 NR Description: protein phosphatase ABI1
  misc_feature (1)..(388): Homolog of NCBI NO: 509419 NR Description: ABI1 [Arabidopsis thaliana]
  misc_feature (1)..(388): Homolog of NCBI NO: 14334800 NR Description: putative protein phosphatase ABI1 [Arabidopsis
  misc_feature (1)..(388): Homolog of NCBI NO: 15242022 NR Description: protein phosphatase 2C, ABI2; protein id:
  misc_feature (1)..(208): Homolog of NCBI NO: 30685388 NR Description: protein phosphatase 2C (PP2C) -related
  misc_feature (1)..(208): Homolog of NCBI NO: 26452332 NR Description: unknown protein [Arabidopsis thaliana]
  misc_feature (183)..(385): Homolog of NCBI NO: 3242077 NR Description: protein phosphatase 2C [Arabidopsis thaliana]
  misc_feature (1)..(208): Homolog of NCBI NO: 30685388 NR Description: protein phosphatase 2C (PP2C) -related
  misc_feature (1)..(388): Homolog of NCBI NO: 15242022 NR Description: protein phosphatase 2C, ABI2; protein id:
  misc_feature (1)..(388): Homolog of NCBI NO: 14334800 NR Description: putative protein phosphatase ABI1 [Arabidopsis
  misc_feature (1)..(388): Homolog of NCBI NO: 509419 NR Description: ABI1 [Arabidopsis thaliana]
  misc_feature (1)..(388): Homolog of NCBI NO: 15236110 NR Description: protein phosphatase ABI1

SEQ ID NO: 47699 - DNA, 2066 bp, Arabidopsis thaliana; identical to SEQ ID NO: 41121
  misc_feature (1)..(2066): Ceres Seq. ID no. 13575096
  misc_feature: MA Experiment ID: 20000171 Result: Down-regulated in Transcription
  misc_feature: MA Experiment 20000171 PARAMETER Experiment Name: At_42deg_Heat_P Parameter: Age (day) Value: 14
  misc_feature: MA Experiment 20000171 PARAMETER Experiment Name: At_42deg_Heat_P Parameter: Organism Value: A. thaliana
  misc_feature: MA Experiment 20000171 PARAMETER Experiment Name: At_42deg_Heat_P Parameter: Plant Line Value: WS
  misc_feature: MA Experiment 20000171 PARAMETER Experiment Name: At_42deg_Heat_P Parameter: Temperature (deg C) Value: 42 vs. 22
  misc_feature: MA Experiment 20000171 PARAMETER Experiment Name: At_42deg_Heat_P Parameter: Timepoint (hr) Value: 1
  misc_feature: MA Experiment 20000171 PARAMETER Experiment Name: At_42deg_Heat_P Parameter: Tissue Value: Aerial
  misc_feature: MA Experiment ID: 20000173 Result: Down-regulated in Transcription
  misc_feature: MA Experiment 20000173 PARAMETER Experiment Name: At_42deg_Heat_P Parameter: Age (day) Value: 14
  misc_feature: MA Experiment 20000173 PARAMETER Experiment Name: At_42deg_Heat_P Parameter: Organism Value: A. thaliana
  misc_feature: MA Experiment 20000173 PARAMETER Experiment Name: At_42deg_Heat_P Parameter: Plant Line Value: WS
  misc_feature: MA Experiment 20000173 PARAMETER Experiment Name: At_42deg_Heat_P Parameter: Temperature (deg C) Value: 42 vs. 22
  misc_feature: MA Experiment 20000173 PARAMETER Experiment Name: At_42deg_Heat_P Parameter: Timepoint (hr) Value: 6
  misc_feature: MA Experiment 20000173 PARAMETER Experiment Name: At_42deg_Heat_P Parameter: Tissue Value: Aerial
  misc_feature: MA Experiment ID: 20000211 Result: Up-regulated in Transcription
  misc_feature: MA Experiment 20000211 PARAMETER Experiment Name: At_0.001percent_MeJA__P Parameter: Age (day) Value: 14
  misc_feature: MA Experiment 20000211 PARAMETER Experiment Name: At_0.001percent_MeJA__P Parameter: Organism Value: A. thaliana
  misc_feature: MA Experiment 20000211 PARAMETER Experiment Name: At_0.001percent_MeJA__P Parameter: Plant Line Value: WS
  misc_feature: MA Experiment 20000211 PARAMETER Experiment Name: At_0.001percent_MeJA__P Parameter: Timepoint (hr) Value: 1
  misc_feature: MA Experiment 20000211 PARAMETER Experiment Name: At_0.001percent_MeJA__P Parameter: Tissue Value: Aerial
  misc_feature: MA Experiment 20000211 PARAMETER Experiment Name: At_0.001percent_MeJA__P Parameter: Treatment Value: 0.001percent MeJA vs. No Treatment
  misc_feature: MA Experiment ID: 20000227 Result: Down-regulated in Transcription
  misc_feature: MA Experiment 20000227 PARAMETER Experiment Name: At_Root-Tips-vs-Tops_P Parameter: Tissue Value: Root Tips vs. Root Tops
  misc_feature: MA Experiment ID: 20000269 Result: Down-regulated in Transcription
  misc_feature: MA Experiment 20000269 PARAMETER Experiment Name: At_1mM_KNO3_L-vs-H_Roots_P Parameter: Age (day) Value: 7,10,12
  misc_feature: MA Experiment 20000269 PARAMETER Experiment Name: At_1mM_KNO3_L-vs-H_Roots_P Parameter: Organism Value: A. thaliana
  misc_feature: MA Experiment 20000269 PARAMETER Experiment Name: At_1mM_KNO3_L-vs-H_Roots_P Parameter: Plant Line Value: WS
  misc_feature: MA Experiment 20000269 PARAMETER Experiment Name: At_1mM_KNO3_L-vs-H_Roots_P Parameter: Timepoint (day) Value: 7,10,12
  misc_feature: MA Experiment 20000269 PARAMETER Experiment Name: At_1mM_KNO3_L-vs-H_Roots_P Parameter: Tissue Value: Roots
  misc_feature: MA Experiment 20000269 PARAMETER Experiment Name: At_1mM_KNO3_L-vs-H_Roots_P Parameter: Treatment Value: 1mM KNO3 vs. 50mM KNO3
  misc_feature: MA Experiment ID: 20000439 Result: Up-regulated in Transcription
  misc_feature: MA Experiment 20000439 PARAMETER Experiment Name: At_Roots__P Parameter: Age (day) Value: 14 vs. 21
  misc_feature: MA Experiment 20000439 PARAMETER Experiment Name: At_Roots__P Parameter: Organism Value: A. thaliana
  misc_feature: MA Experiment 20000439 PARAMETER Experiment Name: At_Roots__P Parameter: Tissue Value: Roots vs. Whole Plant
  misc_feature: MA Experiment ID: 20000573 Result: Down-regulated in Transcription
  misc_feature: MA Experiment 20000573 PARAMETER Experiment Name: At_100uM_ABA_Mutants__P Parameter: Organism Value: A. thaliana
  misc_feature: MA Experiment 20000573 PARAMETER Experiment Name: At_100uM_ABA_Mutants__P Parameter: Plant Line Value: CS22 vs. Ler wt
  misc_feature: MA Experiment 20000573 PARAMETER Experiment Name: At_100uM_ABA_Mutants__P Parameter: Timepoint (hr) Value: N/A
  misc_feature: MA Experiment 20000573 PARAMETER Experiment Name: At_100uM_ABA_Mutants__P Parameter: Tissue Value: Whole Plant
  misc_feature: MA Experiment 20000573 PARAMETER Experiment Name: At_100uM_ABA_Mutants__P Parameter: Treatment Value: None
  misc_feature: MA Experiment ID: 20000574 Result: Down-regulated in Transcription
  misc_feature: MA Experiment 20000574 PARAMETER Experiment Name: At_100uM_ABA_Mutants__P Parameter: Organism Value: A. thaliana
  misc_feature: MA Experiment 20000574 PARAMETER Experiment Name: At_100uM_ABA_Mutants__P Parameter: Plant Line Value: CS23 vs. Ler wt
  misc_feature: MA Experiment 20000574 PARAMETER Experiment Name: At_100uM_ABA_Mutants__P Parameter: Timepoint (hr) Value: N/A
  misc_feature: MA Experiment 20000574 PARAMETER Experiment Name: At_100uM_ABA_Mutants__P Parameter: Tissue Value: Whole Plant
  misc_feature: MA Experiment 20000574 PARAMETER Experiment Name: At_100uM_ABA_Mutants__P Parameter: Treatment Value: None
  misc_feature: MA Experiment ID: 20001248 Result: Down-regulated in Transcription
  misc_feature: MA Experiment 20001248 PARAMETER Experiment Name: At_Far-red-induction_P Parameter: Age (day) Value: 7
  misc_feature: MA Experiment 20001248 PARAMETER Experiment Name: At_Far-red-induction_P Parameter: Light Value: Far-red vs. White
  misc_feature: MA Experiment 20001248 PARAMETER Experiment Name: At_Far-red-induction_P Parameter: Organism Value: A. thaliana
  misc_feature: MA Experiment 20001248 PARAMETER Experiment Name: At_Far-red-induction_P Parameter: Plant Line Value: Columbia
  misc_feature: MA Experiment 20001248 PARAMETER Experiment Name: At_Far-red-induction_P Parameter: Timepoint (hr) Value: 4
  misc_feature: MA Experiment 20001248 PARAMETER Experiment Name: At_Far-red-induction_P Parameter: Tissue Value: Whole Plant
  misc_feature: MA Experiment ID: 20001450 Result: Down-regulated in Transcription
  misc_feature: MA Experiment 20001450 PARAMETER Experiment Name: At_Far-red-induction_P Parameter: Age (day) Value: 7
  misc_feature: MA Experiment 20001450 PARAMETER Experiment Name: At_Far-red-induction_P Parameter: Light Value: Far-red vs. White
  misc_feature: MA Experiment 20001450 PARAMETER Experiment Name: At_Far-red-induction_P Parameter: Organism Value: A. thaliana
  misc_feature: MA Experiment 20001450 PARAMETER Experiment Name: At_Far-red-induction_P Parameter: Plant Line Value: Columbia
  misc_feature: MA Experiment 20001450 PARAMETER Experiment Name: At_Far-red-induction_P Parameter: Timepoint (hr) Value: 8
  misc_feature: MA Experiment 20001450 PARAMETER Experiment Name: At_Far-red-induction_P Parameter: Tissue Value: Whole Plant
  misc_feature: MA Experiment ID: 20001911 Result: Down-regulated in Transcription
  misc_feature: MA Experiment 20001911 PARAMETER Experiment Name: At_Drought_Reproduction_P Parameter: Age (day) Value: 40
  misc_feature: MA Experiment 20001911 PARAMETER Experiment Name: At_Drought_Reproduction_P Parameter: Organism Value: A. thaliana
  misc_feature: MA Experiment 20001911 PARAMETER Experiment Name: At_Drought_Reproduction_P Parameter: Plant Line Value: WS
  misc_feature: MA Experiment 20001911 PARAMETER Experiment Name: At_Drought_Reproduction_P Parameter: Timepoint (day) Value: 10
  misc_feature: MA Experiment 20001911 PARAMETER Experiment Name: At_Drought_Reproduction_P Parameter: Tissue Value: Flowers
  misc_feature: MA Experiment 20001911 PARAMETER Experiment Name: At_Drought_Reproduction_P Parameter: Treatment Value: Drought vs. No Drought

SEQ ID NO: 47700 - protein, 583 aa, Arabidopsis thaliana; identical to SEQ ID NO: 41122
  peptide (1)..(583): Ceres Seq. ID no. 15222613
  misc_feature (96)..(491): Pfam Name: POT family Pfam Description: POT family
  misc_feature (96)..(491): Pfam Name: POT family Pfam Description: POT family
  misc_feature (2)..(557): Homolog of NCBI NO: 17381202 NR Description: putative peptide transporter protein [Arabidopsis
  misc_feature (2)..(557): Homolog of NCBI NO: 15237370 NR Description: peptide transporter [Arabidopsis thaliana]
  misc_feature (7)..(557): Homolog of NCBI NO: 37535270 NR Description: putative peptide transport protein
  misc_feature (2)..(557): Homolog of NCBI NO: 17381202 NR Description: putative peptide transporter protein [Arabidopsis
  misc_feature (7)..(557): Homolog of NCBI NO: 37535270 NR Description: putative peptide transport protein
  misc_feature (1)..(583): Homolog of NCBI NO: 17380882 NR Description: putative PTR2 family peptide transporter protein
  misc_feature (1)..(583): Homolog of NCBI NO: 15226687 NR Description: PTR2 family peptide transporter -related
  misc_feature (1)..(558): Homolog of NCBI NO: 2367418 NR Description: peptide transporter [Lotus japonicus]
  misc_feature (2)..(557): Homolog of NCBI NO: 15237370 NR Description: peptide transporter [Arabidopsis thaliana]
  misc_feature (1)..(558): Homolog of NCBI NO: 2367418 NR Description: peptide transporter [Lotus japonicus]
  misc_feature (1)..(583): Homolog of NCBI NO: 17380882 NR Description: putative PTR2 family peptide transporter protein
  misc_feature (1)..(583): Homolog of NCBI NO: 15226687 NR Description: PTR2 family peptide transporter -related

SEQ ID NO: 47701 - protein, 541 aa, Arabidopsis thaliana; identical to SEQ ID NO: 41123
  peptide (1)..(541): Ceres Seq. ID no. 15222614
  misc_feature (54)..(449): Pfam Name: POT family Pfam Description: POT family
  misc_feature (54)..(449): Pfam Name: POT family Pfam Description: POT family
  misc_feature (1)..(515): Homolog of NCBI NO: 17381202 NR Description: putative peptide transporter protein [Arabidopsis
  misc_feature (1)..(515): Homolog of NCBI NO: 15237370 NR Description: peptide transporter [Arabidopsis thaliana]
  misc_feature (1)..(515): Homolog of NCBI NO: 37535270 NR Description: putative peptide transport protein
  misc_feature (1)..(515): Homolog of NCBI NO: 17381202 NR Description: putative peptide transporter protein [Arabidopsis
  misc_feature (1)..(515): Homolog of NCBI NO: 37535270 NR Description: putative peptide transport protein
  misc_feature (1)..(541): Homolog of NCBI NO: 17380882 NR Description: putative PTR2 family peptide transporter protein
  misc_feature (1)..(541): Homolog of NCBI NO: 15226687 NR Description: PTR2 family peptide transporter -related
  misc_feature (1)..(516): Homolog of NCBI NO: 2367418 NR Description: peptide transporter [Lotus japonicus]
  misc_feature (1)..(515): Homolog of NCBI NO: 15237370 NR Description: peptide transporter [Arabidopsis thaliana]
  misc_feature (1)..(516): Homolog of NCBI NO: 2367418 NR Description: peptide transporter [Lotus japonicus]
  misc_feature (1)..(541): Homolog of NCBI NO: 17380882 NR Description: putative PTR2 family peptide transporter protein
  misc_feature (1)..(541): Homolog of NCBI NO: 15226687 NR Description: PTR2 family peptide transporter -related

SEQ ID NO: 47702 - protein, 474 aa, Arabidopsis thaliana; identical to SEQ ID NO: 41124
  peptide (1)..(474): Ceres Seq. ID no. 15222615
  misc_feature (1)..(382): Pfam Name: POT family Pfam Description: POT family
  misc_feature (1)..(382): Pfam Name: POT family Pfam Description: POT family
  misc_feature (1)..(448): Homolog of NCBI NO: 17381202 NR Description: putative peptide transporter protein [Arabidopsis
  misc_feature (1)..(448): Homolog of NCBI NO: 15237370 NR Description: peptide transporter [Arabidopsis thaliana]
  misc_feature (1)..(448): Homolog of NCBI NO: 37535270 NR Description: putative peptide transport protein
  misc_feature (1)..(448): Homolog of NCBI NO: 17381202 NR Description: putative peptide transporter protein [Arabidopsis
  misc_feature (1)..(448): Homolog of NCBI NO: 37535270 NR Description: putative peptide transport protein
  misc_feature (1)..(474): Homolog of NCBI NO: 17380882 NR Description: putative PTR2 family peptide transporter protein
  misc_feature (1)..(474): Homolog of NCBI NO: 15226687 NR Description: PTR2 family peptide transporter -related
  misc_feature (1)..(449): Homolog of NCBI NO: 2367418 NR Description: peptide transporter [Lotus japonicus]
  misc_feature (1)..(448): Homolog of NCBI NO: 15237370 NR Description: peptide transporter [Arabidopsis thaliana]
  misc_feature (1)..(449): Homolog of NCBI NO: 2367418 NR Description: peptide transporter [Lotus japonicus]
  misc_feature (1)..(474): Homolog of NCBI NO: 17380882 NR Description: putative PTR2 family peptide transporter protein
  misc_feature (1)..(474): Homolog of NCBI NO: 15226687 NR Description: PTR2 family peptide transporter -related

SEQ ID NO: 47703 - DNA, 2948 bp, Arabidopsis thaliana
  misc_feature (1)..(2948): Ceres Seq. ID no. 12591727
  misc_feature: MA Experiment ID: 20000439 Result: Up-regulated in Transcription
  misc_feature: MA Experiment 20000439 PARAMETER Experiment Name: At_Roots__P Parameter: Age (day) Value: 14 vs. 21
  misc_feature: MA Experiment 20000439 PARAMETER Experiment Name: At_Roots__P Parameter: Organism Value: A. thaliana
  misc_feature: MA Experiment 20000439 PARAMETER Experiment Name: At_Roots__P Parameter: Tissue Value: Roots vs. Whole Plant
agaccaagctcaggctatcatctctccgttaattagggttttcttctctatctcgatttcaataccattgttgatccgctgagctagggttgttcgatcccgataattgtgtcgcttagctctgatctctgttcatcgaatttggttaatttgttttgattggttaagatacattggaaagcgatgccaccgaaggttgtgaagaggggaggcgccgcgagaagaggtgggaggcttacgagatcggcgctcaaggcgcagaatcctcacgtggaatcttcccatgacgaatctgttaatatcggtgagctctcaggctccgatgcactggaagccaaggaggtgactccggaggttgataaaactgttgaggaagagaatccattagatgtgccgaagtcatcggattcaattgatgattctgaagctgcagcgaatccgcatgttgatgttccgtcgaaaaaggagactgaggtagaggaatctgtggatgattttggaaaagatgaaagattggatttagatgacaatgaacctgagtatgaggctgaggaatatggcggggaggagtttgaagagagggaattgggacaggaggaccatgagttggtaaatgaggagggggaagaactggaggaagagattgaggtcgaggaggaagctggtgagtttgcagacgagattggagatggtgcggaggaccttgatagtgaggatgatgatgatgatcatgctattgaagaggtcaagcatggagaaactgttgatgtggaagaagaagagcatcatgatgttctccatgagaggcgtaagcgtaaggagttcgaaatatttgttgggagtttggacaaaggtgcttcggaggaggacttaaagaaagtgtttggtcatgtgggcgaggtgactgaagttaggattttgaagaatcctcagacaaagaagagcaagggttctgctttcttgcgttttgcaactgtggaacaggcaaaacgagctgttaaagagcttaaaagcccaatgataaatggtaaaaagtgtggtgtaactgcaagccaagataatgataccctcttcgttggtaacatatgcaagatatggaccccagaagctttgagggagaagcttaaacactatggagttgagaatatggatgatataacgttggtagaggacagcaacaatgtcaacatgaatcgagggtatgcctttttggaattctcatctcgctcagatgccatggatgctcacaagcgtctcgtcaagaaagatgtgatgtttggagttgagaagcctgcaaaggtctcttttactgattctttcttagacctggaagatgagataatggcgcaggttaagacaatcttcattgacggtctgttaccttcatggaatgaagaacgtgttagagaccttctgaaaccatatggtaaacttgaaaaagttgagcttgctcgcaatatgccatcagcaaggaggaaagattttggctttgtaacttttgatactcatgaagctgctgtgagttgtgccaaattcatcaacaactcagagctaggcgaaggggaggacaaggcaaaagtgagagcacgcctgtctagaccacttcagaaagcaggtaaaggccgacaatctagtcgctcagaccagcggtctaggcatggggctggacggtctggaaggagttcatttgctcgtcttccacctcgtagccttgcttcctctcggagtgctagaggcgctggatctcgggccccatcttctagtgcaaagagagcttctggatcaagaggaagacgtcctcgcccacctctacctccgcctgcaagagctaggcccttgcctccacctgcaagagccaggcccatgccaccacctgcaagagccaggcccttgccaccacctgctaggtcatatgatagaagacctccagttcctctgtatccaaaggctagcttgaagagagactatgatcggcgtgatgaacttcctcctccaagaagcagaccagctgtaagctatagttccaggctttctcctgagaggcatctgtcttacagagatgattatccaccccggggttcgggttattcagatcttcctagaagttcttctcgctctgaaattaggaggccattcgtagatgacctttacagtccgagatttgaaagacctccaagttacagtgagggaagacctcgtgcttatgaacctcttcctggatcaaagcgtccatatgctgcactggatgaccttcctccccgttatgctgatgttgatgttcgtcattcaagaccccgtctggactatgatgttggcccatctcaatatggggaatcctacggggaccggattcctaggtctagtctaggatatggaagcagccgaaattctatgtcaaatcatgactcgcggggcccatacagcagtcgtcagggaatggattatggaggaggttcttatagtggcagcgatgtaggaggtatgtactcgtcaagctatggtggcgacttacccagaagagatggaggaggtagctcgtattcttcaatttactccagccgtggcttgggtggtagtagttactctggtggtggtccaggatcatactactgaataatttcacatgaccgaggctgctaaaaaaggaggtttggccatgcaaagttgtgtatgtagaaaggaagctaccagctgcgaaaggattaaagccagcttcggtgagactgttggaatattaatgggcttgcatctacaactgcacttgtatcttttttcggatggaatgataagctcgagttttatagagatggttcatagttgtgggactcgttatctatcttatctatctctatctcttgaataatggatggatttgttggaacagagattaagctgtgtttgtattattgatccatcagtttagttaagctttcaccgtcttctcagct

SEQ ID NO: 47704 - protein, 809 aa, Arabidopsis thaliana
  peptide (1)..(809): Ceres Seq. ID no. 12591728
  misc_feature (296)..(373): Pfam Name: RNA recognition motif. (a.k.a. RRM, RBD, or RNP domain) Pfam Description: RNA recognition motif. (a.k.a. RRM, RBD, or RNP
  misc_feature (296)..(373): Pfam Name: RNA recognition motif. (a.k.a. RRM, RBD, or RNP domain) Pfam Description: RNA recognition motif. (a.k.a. RRM, RBD, or RNP
  misc_feature (108)..(567): Homolog of NCBI NO: 29371361 NR Description: putative RNA-binding protein
  misc_feature (108)..(568): Homolog of NCBI NO: 18411454 NR Description: RRM-containing protein
  misc_feature (296)..(463): Homolog of NCBI NO: 7485542 NR Description: hypothetical protein F16B22.20 - Arabidopsis
  misc_feature (196)..(506): Homolog of NCBI NO: 34393486 NR Description: putative RRM RNA binding protein NSAP1
  misc_feature (145)..(473): Homolog of NCBI NO: 34901412 NR Description: OSJNBa0075N02.12 [Oryza sativa (japonica
  misc_feature (108)..(567): Homolog of NCBI NO: 29371361 NR Description: putative RNA-binding protein
  misc_feature (296)..(463): Homolog of NCBI NO: 7485542 NR Description: hypothetical protein F16B22.20 - Arabidopsis
  misc_feature (145)..(473): Homolog of NCBI NO: 34901412 NR Description: OSJNBa0075N02.12 [Oryza sativa (japonica
  misc_feature (46)..(809): Homolog of NCBI NO: 38345947 NR Description: OSJNBb0103I08.18 [Oryza sativa (japonica
  misc_feature (583)..(809): Homolog of NCBI NO: 7485543 NR Description: hypothetical protein At2g44720 [imported] -
  misc_feature (94)..(369): Homolog of NCBI NO: 7485542 NR Description: hypothetical protein F16B22.20 - Arabidopsis
  misc_feature (327)..(809): Homolog of NCBI NO: 22655529 NR Description: water-stress protein [Zea mays]
  misc_feature (145)..(473): Homolog of NCBI NO: 34395354 NR Description: water-stress protein-like protein
  misc_feature (196)..(506): Homolog of NCBI NO: 34393486 NR Description: putative RRM RNA binding protein NSAP1
  misc_feature (108)..(568): Homolog of NCBI NO: 18411454 NR Description: RRM-containing protein
  misc_feature (145)..(473): Homolog of NCBI NO: 34395354 NR Description: water-stress protein-like protein
  misc_feature (327)..(809): Homolog of NCBI NO: 22655529 NR Description: water-stress protein [Zea mays]
  misc_feature (94)..(369): Homolog of NCBI NO: 7485542 NR Description: hypothetical protein F16B22.20 - Arabidopsis
  misc_feature (583)..(809): Homolog of NCBI NO: 7485543 NR Description: hypothetical protein At2g44720 [imported] -
  misc_feature (46)..(809): Homolog of NCBI NO: 38345947 NR Description: OSJNBb0103I08.18 [Oryza sativa (japonica
MPPKVVKRGGAARRGGRLTRSALKAQNPHVESSHDESVNIGELSGSDALEAKEVTPEVDKTVEEENPLDVPKSSDSIDDSEAAANPHVDVPSKKETEVEESVDDFGKDERLDLDDNEPEYEAEEYGGEEFEERELGQEDHELVNEEGEELEEEIEVEEEAGEFADEIGDGAEDLDSEDDDDDHAIEEVKHGETVDVEEEEHHDVLHERRKRKEFEIFVGSLDKGASEEDLKKVFGHVGEVTEVRILKNPQTKKSKGSAFLRFATVEQAKRAVKELKSPMINGKKCGVTASQDNDTLFVGNICKIWTPEALREKLKHYGVENMDDITLVEDSNNVNMNRGYAFLEFSSRSDAMDAHKRLVKKDVMFGVEKPAKVSFTDSFLDLEDEIMAQVKTIFIDGLLPSWNEERVRDLLKPYGKLEKVELARNMPSARRKDFGFVTFDTHEAAVSCAKFINNSELGEGEDKAKVRARLSRPLQKAGKGRQSSRSDQRSRHGAGRSGRSSFARLPPRSLASSRSARGAGSRAPSSSAKRASGSRGRRPRPPLPPPARARPLPPPARARPMPPPARARPLPPPARSYDRRPPVPLYPKASLKRDYDRRDELPPPRSRPAVSYSSRLSPERHLSYRDDYPPRGSGYSDLPRSSSRSEIRRPFVDDLYSPRFERPPSYSEGRPRAYEPLPGSKRPYAALDDLPPRYADVDVRHSRPRLDYDVGPSQYGESYGDRIPRSSLGYGSSRNSMSNHDSRGPYSSRQGMDYGGGSYSGSDVGGMYSSSYGGDLPRRDGGGSSYSSIYSSRGLGGSSYSGGGPGSYY

SEQ ID NO: 47705 - protein, 531 aa, Arabidopsis thaliana
  peptide (1)..(531): Ceres Seq. ID no. 12591729
  misc_feature (18)..(95): Pfam Name: RNA recognition motif. (a.k.a. RRM, RBD, or RNP domain) Pfam Description: RNA recognition motif. (a.k.a. RRM, RBD, or RNP
  misc_feature (18)..(95): Pfam Name: RNA recognition motif. (a.k.a. RRM, RBD, or RNP domain) Pfam Description: RNA recognition motif. (a.k.a. RRM, RBD, or RNP
  misc_feature (1)..(289): Homolog of NCBI NO: 29371361 NR Description: putative RNA-binding protein
  misc_feature (1)..(290): Homolog of NCBI NO: 18411454 NR Description: RRM-containing protein
  misc_feature (18)..(185): Homolog of NCBI NO: 7485542 NR Description: hypothetical protein F16B22.20 - Arabidopsis
  misc_feature (1)..(228): Homolog of NCBI NO: 34393486 NR Description: putative RRM RNA binding protein NSAP1
  misc_feature (1)..(195): Homolog of NCBI NO: 34901412 NR Description: OSJNBa0075N02.12 [Oryza sativa (japonica
  misc_feature (1)..(289): Homolog of NCBI NO: 29371361 NR Description: putative RNA-binding protein
  misc_feature (18)..(185): Homolog of NCBI NO: 7485542 NR Description: hypothetical protein F16B22.20 - Arabidopsis
  misc_feature (1)..(195): Homolog of NCBI NO: 34901412 NR Description: OSJNBa0075N02.12 [Oryza sativa (japonica
  misc_feature (1)..(531): Homolog of NCBI NO: 38345947 NR Description: OSJNBb0103I08.18 [Oryza sativa (japonica
  misc_feature (305)..(531): Homolog of NCBI NO: 7485543 NR Description: hypothetical protein At2g44720 [imported] -
  misc_feature (1)..(91): Homolog of NCBI NO: 7485542 NR Description: hypothetical protein F16B22.20 - Arabidopsis
  misc_feature (49)..(531): Homolog of NCBI NO: 22655529 NR Description: water-stress protein [Zea mays]
  misc_feature (1)..(195): Homolog of NCBI NO: 34395354 NR Description: water-stress protein-like protein
  misc_feature (1)..(228): Homolog of NCBI NO: 34393486 NR Description: putative RRM RNA binding protein NSAP1
  misc_feature (1)..(290): Homolog of NCBI NO: 18411454 NR Description: RRM-containing protein
  misc_feature (1)..(195): Homolog of NCBI NO: 34395354 NR Description: water-stress protein-like protein
  misc_feature (49)..(531): Homolog of NCBI NO: 22655529 NR Description: water-stress protein [Zea mays]
  misc_feature (1)..(91): Homolog of NCBI NO: 7485542 NR Description: hypothetical protein F16B22.20 - Arabidopsis
  misc_feature (305)..(531): Homolog of NCBI NO: 7485543 NR Description: hypothetical protein At2g44720 [imported] -
  misc_feature (1)..(531): Homolog of NCBI NO: 38345947 NR Description: OSJNBb0103I08.18 [Oryza sativa (japonica
MINGKKCGVTASQDNDTLFVGNICKIWTPEALREKLKHYGVENMDDITLVEDSNNVNMNRGYAFLEFSSRSDAMDAHKRLVKKDVMFGVEKPAKVSFTDSFLDLEDEIMAQVKTIFIDGLLPSWNEERVRDLLKPYGKLEKVELARNMPSARRKDFGFVTFDTHEAAVSCAKFINNSELGEGEDKAKVRARLSRPLQKAGKGRQSSRSDQRSRHGAGRSGRSSFARLPPRSLASSRSARGAGSRAPSSSAKRASGSRGRRPRPPLPPPARARPLPPPARARPMPPPARARPLPPPARSYDRRPPVPLYPKASLKRDYDRRDELPPPRSRPAVSYSSRLSPERHLSYRDDYPPRGSGYSDLPRSSSRSEIRRPFVDDLYSPRFERPPSYSEGRPRAYEPLPGSKRPYAALDDLPPRYADVDVRHSRPRLDYDVGPSQYGESYGDRIPRSSLGYGSSRNSMSNHDSRGPYSSRQGMDYGGGSYSGSDVGGMYSSSYGGDLPRRDGGGSSYSSIYSSRGLGGSSYSGGGPGSYY

SEQ ID NO: 47706 - protein, 488 aa, Arabidopsis thaliana
  peptide (1)..(488): Ceres Seq. ID no. 12591730
  misc_feature (1)..(52): Pfam Name: RNA recognition motif. (a.k.a. RRM, RBD, or RNP domain) Pfam Description: RNA recognition motif. (a.k.a. RRM, RBD, or RNP
  misc_feature (1)..(52): Pfam Name: RNA recognition motif. (a.k.a. RRM, RBD, or RNP domain) Pfam Description: RNA recognition motif. (a.k.a. RRM, RBD, or RNP
  misc_feature (1)..(246): Homolog of NCBI NO: 29371361 NR Description: putative RNA-binding protein
  misc_feature (1)..(247): Homolog of NCBI NO: 18411454 NR Description: RRM-containing protein
  misc_feature (1)..(142): Homolog of NCBI NO: 7485542 NR Description: hypothetical protein F16B22.20 - Arabidopsis
  misc_feature (1)..(185): Homolog of NCBI NO: 34393486 NR Description: putative RRM RNA binding protein NSAP1
  misc_feature (1)..(152): Homolog of NCBI NO: 34901412 NR Description: OSJNBa0075N02.12 [Oryza sativa (japonica
  misc_feature (1)..(246): Homolog of NCBI NO: 29371361 NR Description: putative RNA-binding protein
  misc_feature (1)..(142): Homolog of NCBI NO: 7485542 NR Description: hypothetical protein F16B22.20 - Arabidopsis
  misc_feature (1)..(152): Homolog of NCBI NO: 34901412 NR Description: OSJNBa0075N02.12 [Oryza sativa (japonica
  misc_feature (1)..(488): Homolog of NCBI NO: 38345947 NR Description: OSJNBb0103I08.18 [Oryza sativa (japonica
  misc_feature (262)..(488): Homolog of NCBI NO: 7485543 NR Description: hypothetical protein At2g44720 [imported] -
  misc_feature (1)..(48): Homolog of NCBI NO: 7485542 NR Description: hypothetical protein F16B22.20 - Arabidopsis
  misc_feature (6)..(488): Homolog of NCBI NO: 22655529 NR Description: water-stress protein [Zea mays]
  misc_feature (1)..(152): Homolog of NCBI NO: 34395354 NR Description: water-stress protein-like protein
  misc_feature (1)..(185): Homolog of NCBI NO: 34393486 NR Description: putative RRM RNA binding protein NSAP1
  misc_feature (1)..(247): Homolog of NCBI NO: 18411454 NR Description: RRM-containing protein
  misc_feature (1)..(152): Homolog of NCBI NO: 34395354 NR Description: water-stress protein-like protein
  misc_feature (6)..(488): Homolog of NCBI NO: 22655529 NR Description: water-stress protein [Zea mays]
  misc_feature (1)..(48): Homolog of NCBI NO: 7485542 NR Description: hypothetical protein F16B22.20 - Arabidopsis
  misc_feature (262)..(488): Homolog of NCBI NO: 7485543 NR Description: hypothetical protein At2g44720 [imported] -
  misc_feature (1)..(488): Homolog of NCBI NO: 38345947 NR Description: OSJNBb0103I08.18 [Oryza sativa (japonica
MDDITLVEDSNNVNMNRGYAFLEFSSRSDAMDAHKRLVKKDVMFGVEKPAKVSFTDSFLDLEDEIMAQVKTIFIDGLLPSWNEERVRDLLKPYGKLEKVELARNMPSARRKDFGFVTFDTHEAAVSCAKFINNSELGEGEDKAKVRARLSRPLQKAGKGRQSSRSDQRSRHGAGRSGRSSFARLPPRSLASSRSARGAGSRAPSSSAKRASGSRGRRPRPPLPPPARARPLPPPARARPMPPPARARPLPPPARSYDRRPPVPLYPKASLKRDYDRRDELPPPRSRPAVSYSSRLSPERHLSYRDDYPPRGSGYSDLPRSSSRSEIRRPFVDDLYSPRFERPPSYSEGRPRAYEPLPGSKRPYAALDDLPPRYADVDVRHSRPRLDYDVGPSQYGESYGDRIPRSSLGYGSSRNSMSNHDSRGPYSSRQGMDYGGGSYSGSDVGGMYSSSYGGDLPRRDGGGSSYSSIYSSRGLGGSSYSGGGPGSYY

SEQ ID NO: 47707 - DNA, 2231 bp, Arabidopsis thaliana
  misc_feature (1)..(2231): Ceres Seq. ID no. 12600732
  misc_feature: MA Experiment ID: 20000173 Result: Down-regulated in Transcription
  misc_feature: MA Experiment 20000173 PARAMETER Experiment Name: At_42deg_Heat_P Parameter: Age (day) Value: 14
  misc_feature: MA Experiment 20000173 PARAMETER Experiment Name: At_42deg_Heat_P Parameter: Organism Value: A. thaliana
  misc_feature: MA Experiment 20000173 PARAMETER Experiment Name: At_42deg_Heat_P Parameter: Plant Line Value: WS
  misc_feature: MA Experiment 20000173 PARAMETER Experiment Name: At_42deg_Heat_P Parameter: Temperature (deg C) Value: 42 vs. 22
  misc_feature: MA Experiment 20000173 PARAMETER Experiment Name: At_42deg_Heat_P Parameter: Timepoint (hr) Value: 6
  misc_feature: MA Experiment 20000173 PARAMETER Experiment Name: At_42deg_Heat_P Parameter: Tissue Value: Aerial
  misc_feature: MA Experiment ID: 20000444 Result: Up-regulated in Transcription
  misc_feature: MA Experiment 20000444 PARAMETER Experiment Name: At_100uM_NAA__P Parameter: Age (day) Value: 14
  misc_feature: MA Experiment 20000444 PARAMETER Experiment Name: At_100uM_NAA__P Parameter: Organism Value: A. thaliana
  misc_feature: MA Experiment 20000444 PARAMETER Experiment Name: At_100uM_NAA__P Parameter: Plant Line Value: WS
  misc_feature: MA Experiment 20000444 PARAMETER Experiment Name: At_100uM_NAA__P Parameter: Timepoint (hr) Value: 1
  misc_feature: MA Experiment 20000444 PARAMETER Experiment Name: At_100uM_NAA__P Parameter: Tissue Value: Aerial
  misc_feature: MA Experiment 20000444 PARAMETER Experiment Name: At_100uM_NAA__P Parameter: Treatment Value: 100uM NAA vs. No Treatment
  misc_feature: MA Experiment ID: 20000794 Result: Up-regulated in Transcription
  misc_feature: MA Experiment 20000794 PARAMETER Experiment Name: At_Petals_P Parameter: Age (day) Value: 23-25 days
  misc_feature: MA Experiment 20000794 PARAMETER Experiment Name: At_Petals_P Parameter: Plant Line Value: WS
  misc_feature: MA Experiment 20000794 PARAMETER Experiment Name: At_Petals_P Parameter: Tissue Value: Petals vs. Whole plant
  misc_feature: MA Experiment ID: 20001248 Result: Down-regulated in Transcription
  misc_feature: MA Experiment 20001248 PARAMETER Experiment Name: At_Far-red-induction_P Parameter: Age (day) Value: 7
  misc_feature: MA Experiment 20001248 PARAMETER Experiment Name: At_Far-red-induction_P Parameter: Light Value: Far-red vs. White
  misc_feature: MA Experiment 20001248 PARAMETER Experiment Name: At_Far-red-induction_P Parameter: Organism Value: A. thaliana
  misc_feature: MA Experiment 20001248 PARAMETER Experiment Name: At_Far-red-induction_P Parameter: Plant Line Value: Columbia
  misc_feature: MA Experiment 20001248 PARAMETER Experiment Name: At_Far-red-induction_P Parameter: Timepoint (hr) Value: 4
  misc_feature: MA Experiment 20001248 PARAMETER Experiment Name: At_Far-red-induction_P Parameter: Tissue Value: Whole Plant
cttggctctctctctctctctctcttcttctctgctcaagacaagaacttgatgttcatgtcttgaaacttaacaaagtattgatctttccttttaagtaaagaatttgggggttacacaacttcgtctagatggagcaagagaaaagcttggatccacaactatggcatgcttgtgcaggatcaatggttcaaatcccttcactgaattcaacggttttttacttcgctcaaggccacacagagcacgctcacgcgcctcctgattttcacgcgccgcgcgttccacctcttatcctctgtcgtgtcgtctccgtgaagttcctcgccgacgctgaaacagacgaagtttttgctaaaattacgcttttgccacttccgggaaacgacttggatctagaaaacgacgccgttttgggtctaactcctccttcttctgacggtaacggtaacggtaaagagaaaccggcgtctttcgctaaaacgttaacgcagtctgacgctaataacggcggtggtttctccgttccacgttattgcgccgagacgattttcccgcggcttgattactcggcggagccaccggttcaaaccgtgattgctaaagacatccacggcgagacttggaaattccggcatatttacagaggaacacctcgccgtcatctcctaaccaccggttggagcactttcgttaaccagaagaaactaatcgccggagactcaatcgtcttcctccgttctgaatccggtgacctctgcgtcggaatccgccgcgctaaacgcggcggtctcggatctaacgcaggatccgacaatccttaccctggattctccggtttcctccgtgacgacgagtcaacaacaacaacatcgaagctaatgatgatgaaacgcaacggaaacaacgacggaaacgccgcggctacagggagggttagagtagaagcagtagcggaagcggtggcgcgtgcagcgtgtggacaagcgtttgaggttgtttattatccacgcgctagtacaccggagttttgcgtaaaagcagctgatgttagatcagcaatgaggataagatggtgtagtggtatgcgttttaaaatggcgtttgaaacagaggattcttctagaatcagttggtttatgggtactgtctccgccgttcaagtcgctgatccaattcgttggcctaattcaccatggcgtctccttcaggtagcttgggacgaaccggatttgttacaaaacgttaagcgggttagtccgtggttagtcgaattggtatcgaacatgcctacaatacatttatctccattctctccgaggaagaagattaggattccgcagccatttgagtttccattccacggtactaaattcccgattttctccccgggattcgccaacaatggcggtggcgagtccatgtgttatctgtcaaacgacaacaataatgctcctgcaggaatacagggagccaggcaagctcaacaactcttcggatcaccatctccgtctttgttgtctgatctcaatcttagtagttacaccggtaacaacaagttacattctccggcgatgtttctatcgagtttcaacccgaggcatcatcattatcaggctagggatagtgagaatagtaataacatttcgtgttctttaactatggggaatcctgctatggttcaggataagaagaagtctgttggttcggttaagactcatcagttcgtgttgttcggtcaaccgattttaaccgaacagcaagttatgaaccgaaaacggtttttggaagaagaggcggaagcggaggaggagaaaggtttagtggctcgtgggttaacatggaattatagtttgcaaggacttgagacgggtcattgtaaagttttcatggaatctgaggatgttggacgcacactcgatctctcggttattggctcgtaccaagaattgtaccggaaattggctgagatgtttcatatagaagagaggtcggatttgttgactcatgttgtgtaccgggatgcaaatggtgttatcaaacgtattggagacgaacctttcagtgatttcatgaaagcaactaaacggctaacaatcaagatggatattggtggcgacaacgtgagaaagacgtggataaccggaatcaggactggtgaaaatggtatagacgcttctacgaagactggtccgctcagcatcttcgcttgaacttgaagcatattgagg

SEQ ID NO: 47708 - protein, 693 aa, Arabidopsis thaliana
  peptide (1)..(693): Ceres Seq. ID no. 12600733
  misc_feature (114)..(219): Pfam Name: B3 DNA binding domain Pfam Description: B3 DNA binding domain
  misc_feature (5)..(543): Homolog of NCBI NO: 18411720 NR Description: auxin response factor, putative
  misc_feature (5)..(543): Homolog of NCBI NO: 12323297 NR Description: putative auxin response factor; 79762-82020
  misc_feature (5)..(543): Homolog of NCBI NO: 15810291 NR Description: auxin response factor ARF17 [Arabidopsis thaliana]
  misc_feature (578)..(665): Homolog of NCBI NO: 21741865 NR Description: OSJNBa0019D11.3 [Oryza sativa (japonica
  misc_feature (6)..(547): Homolog of NCBI NO: 21741865 NR Description: OSJNBa0019D11.3 [Oryza sativa (japonica
  misc_feature (4)..(644): Homolog of NCBI NO: 7484815 NR Description: auxin response factor 7 homolog F6G3.110 -
  misc_feature (4)..(665): Homolog of NCBI NO: 18417527 NR Description: transcription factor-like protein
  misc_feature (1)..(666): Homolog of NCBI NO: 37535416 NR Description: putative transcription factor
  misc_feature (577)..(667): Homolog of NCBI NO: 19352051 NR Description: auxin response factor 10 [Oryza sativa]
  misc_feature (2)..(545): Homolog of NCBI NO: 19352051 NR Description: auxin response factor 10 [Oryza sativa]
MEQEKSLDPQLWHACAGSMVQIPSLNSTVFYFAQGHTEHAHAPPDFHAPRVPPLILCRVVSVKFLADAETDEVFAKITLLPLPGNDLDLENDAVLGLTPPSSDGNGNGKEKPASFAKTLTQSDANNGGGFSVPRYCAETIFPRLDYSAEPPVQTVIAKDIHGETWKFRHIYRGTPRRHLLTTGWSTFVNQKKLIAGDSIVFLRSESGDLCVGIRRAKRGGLGSNAGSDNPYPGFSGFLRDDESTTTTSKLMMMKRNGNNDGNAAATGRVRVEAVAEAVARAACGQAFEVVYYPRASTPEFCVKAADVRSAMRIRWCSGMRFKMAFETEDSSRISWFMGTVSAVQVADPIRWPNSPWRLLQVAWDEPDLLQNVKRVSPWLVELVSNMPTIHLSPFSPRKKIRIPQPFEFPFHGTKFPIFSPGFANNGGGESMCYLSNDNNNAPAGIQGARQAQQLFGSPSPSLLSDLNLSSYTGNNKLHSPAMFLSSFNPRHHHYQARDSENSNNISCSLTMGNPAMVQDKKKSVGSVKTHQFVLFGQPILTEQQVMNRKRFLEEEAEAEEEKGLVARGLTWNYSLQGLETGHCKVFMESEDVGRTLDLSVIGSYQELYRKLAEMFHIEERSDLLTHVVYRDANGVIKRIGDEPFSDFMKATKRLTIKMDIGGDNVRKTWITGIRTGENGIDASTKTGPLSIFA

SEQ ID NO: 47709 - protein, 675 aa, Arabidopsis thaliana
  peptide (1)..(675): Ceres Seq. ID no. 12600734
  misc_feature (96)..(201): Pfam Name: B3 DNA binding domain Pfam Description: B3 DNA binding domain
  misc_feature (1)..(525): Homolog of NCBI NO: 18411720 NR Description: auxin response factor, putative
  misc_feature (1)..(525): Homolog of NCBI NO: 12323297 NR Description: putative auxin response factor; 79762-82020
  misc_feature (1)..(525): Homolog of NCBI NO: 15810291 NR Description: auxin response factor ARF17 [Arabidopsis thaliana]
  misc_feature (560)..(647): Homolog of NCBI NO: 21741865 NR Description: OSJNBa0019D11.3 [Oryza sativa (japonica
  misc_feature (1)..(529): Homolog of NCBI NO: 21741865 NR Description: OSJNBa0019D11.3 [Oryza sativa (japonica
  misc_feature (1)..(626): Homolog of NCBI NO: 7484815 NR Description: auxin response factor 7 homolog F6G3.110 -
  misc_feature (1)..(647): Homolog of NCBI NO: 18417527 NR Description: transcription factor-like protein
  misc_feature (1)..(648): Homolog of NCBI NO: 37535416 NR Description: putative transcription factor
  misc_feature (559)..(649): Homolog of NCBI NO: 19352051 NR Description: auxin response factor 10 [Oryza sativa]
  misc_feature (1)..(527): Homolog of NCBI NO: 19352051 NR Description: auxin response factor 10 [Oryza sativa]
MVQIPSLNSTVFYFAQGHTEHAHAPPDFHAPRVPPLILCRVVSVKFLADAETDEVFAKITLLPLPGNDLDLENDAVLGLTPPSSDGNGNGKEKPASFAKTLTQSDANNGGGFSVPRYCAETIFPRLDYSAEPPVQTVIAKDIHGETWKFRHIYRGTPRRHLLTTGWSTFVNQKKLIAGDSIVFLRSESGDLCVGIRRAKRGGLGSNAGSDNPYPGFSGFLRDDESTTTTSKLMMMKRNGNNDGNAAATGRVRVEAVAEAVARAACGQAFEVVYYPRASTPEFCVKAADVRSAMRIRWCSGMRFKMAFETEDSSRISWFMGTVSAVQVADPIRWPNSPWRLLQVAWDEPDLLQNVKRVSPWLVELVSNMPTIHLSPFSPRKKIRIPQPFEFPFHGTKFPIFSPGFANNGGGESMCYLSNDNNNAPAGIQGARQAQQLFGSPSPSLLSDLNLSSYTGNNKLHSPAMFLSSFNPRHHHYQARDSENSNNISCSLTMGNPAMVQDKKKSVGSVKTHQFVLFGQPILTEQQVMNRKRFLEEEAEAEEEKGLVARGLTWNYSLQGLETGHCKVFMESEDVGRTLDLSVIGSYQELYRKLAEMFHIEERSDLLTHVVYRDANGVIKRIGDEPFSDFMKATKRLTIKMDIGGDNVRKTWITGIRTGENGIDASTKTGPLSIFA

SEQ ID NO: 47710 - protein, 443 aa, Arabidopsis thaliana
  peptide (1)..(443): Ceres Seq. ID no. 12600735
  misc_feature (327)..(406): Pfam Name: AUX/IAA family Pfam Description: AUX/IAA family
  misc_feature (1)..(293): Homolog of NCBI NO: 18411720 NR Description: auxin response factor, putative
  misc_feature (1)..(293): Homolog of NCBI NO: 12323297 NR Description: putative auxin response factor; 79762-82020
  misc_feature (1)..(293): Homolog of NCBI NO: 15810291 NR Description: auxin response factor ARF17 [Arabidopsis thaliana]
  misc_feature (328)..(415): Homolog of NCBI NO: 21741865 NR Description: OSJNBa0019D11.3 [Oryza sativa (japonica
  misc_feature (1)..(297): Homolog of NCBI NO: 21741865 NR Description: OSJNBa0019D11.3 [Oryza sativa (japonica
  misc_feature (1)..(394): Homolog of NCBI NO: 7484815 NR Description: auxin response factor 7 homolog F6G3.110 -
  misc_feature (1)..(415): Homolog of NCBI NO: 18417527 NR Description: transcription factor-like protein
  misc_feature (1)..(416): Homolog of NCBI NO: 37535416 NR Description: putative transcription factor
  misc_feature (327)..(417): Homolog of NCBI NO: 19352051 NR Description: auxin response factor 10 [Oryza sativa]
  misc_feature (1)..(295): Homolog of NCBI NO: 19352051 NR Description: auxin response factor 10 [Oryza sativa]
MMMKRNGNNDGNAAATGRVRVEAVAEAVARAACGQAFEVVYYPRASTPEFCVKAADVRSAMRIRWCSGMRFKMAFETEDSSRISWFMGTVSAVQVADPIRWPNSPWRLLQVAWDEPDLLQNVKRVSPWLVELVSNMPTIHLSPFSPRKKIRIPQPFEFPFHGTKFPIFSPGFANNGGGESMCYLSNDNNNAPAGIQGARQAQQLFGSPSPSLLSDLNLSSYTGNNKLHSPAMFLSSFNPRHHHYQARDSENSNNISCSLTMGNPAMVQDKKKSVGSVKTHQFVLFGQPILTEQQVMNRKRFLEEEAEAEEEKGLVARGLTWNYSLQGLETGHCKVFMESEDVGRTLDLSVIGSYQELYRKLAEMFHIEERSDLLTHVVYRDANGVIKRIGDEPFSDFMKATKRLTIKMDIGGDNVRKTWITGIRTGENGIDASTKTGPLSIFA

SEQ ID NO: 47711 - DNA, 2235 bp, Arabidopsis thaliana; identical to SEQ ID NO: 38002
  misc_feature (1)..(2235): Ceres Seq. ID no. 12466389
  misc_feature: MA Experiment ID: 108433 Result: Up-regulated in Transcription
  misc_feature: MA Experiment 108433 PARAMETER Experiment Name: At_rhl_Mutant2_cDNA_P Parameter: Age (day) Value: 7
  misc_feature: MA Experiment 108433 PARAMETER Experiment Name: At_rhl_Mutant2_cDNA_P Parameter: Organism Value: A. thaliana
  misc_feature: MA Experiment 108433 PARAMETER Experiment Name: At_rhl_Mutant2_cDNA_P Parameter: Plant Line Value: rhl Mutant vs. wt landsburg
  misc_feature: MA Experiment 108433 PARAMETER Experiment Name: At_rhl_Mutant2_cDNA_P Parameter: Tissue Value: Roots
  misc_feature: MA Experiment ID: 108434 Result: Up-regulated in Transcription
  misc_feature: MA Experiment 108434 PARAMETER Experiment Name: At_Root_Tips_cDNA_P Parameter: Tissue Value: Root Tips
  misc_feature: MA Experiment ID: 108462 Result: Up-regulated in Transcription
  misc_feature: MA Experiment 108462 PARAMETER Experiment Name: At_Germinating_Seeds_cDNA_P Parameter: Age (day) Value: 2 vs. 0
  misc_feature: MA Experiment 108462 PARAMETER Experiment Name: At_Germinating_Seeds_cDNA_P Parameter: Tissue Value: Germinating Seeds
  misc_feature: MA Experiment ID: 108463 Result: Up-regulated in Transcription
  misc_feature: MA Experiment 108463 PARAMETER Experiment Name: At_Germinating_Seeds_cDNA_P Parameter: Age (day) Value: 3 vs. 0
  misc_feature: MA Experiment 108463 PARAMETER Experiment Name: At_Germinating_Seeds_cDNA_P Parameter: Tissue Value: Germinating Seeds
  misc_feature: MA Experiment ID: 108464 Result: Up-regulated in Transcription
  misc_feature: MA Experiment 108464 PARAMETER Experiment Name: At_Germinating_Seeds_cDNA_P Parameter: Age (day) Value: 4 vs. 0
  misc_feature: MA Experiment 108464 PARAMETER Experiment Name: At_Germinating_Seeds_cDNA_P Parameter: Tissue Value: Germinating Seeds
  misc_feature: MA Experiment ID: 108561 Result: Down-regulated in Transcription
  misc_feature: MA Experiment 108561 PARAMETER Experiment Name: At_100uM_ABA_cDNA_P Parameter: Timepoint (hr) Value: 6
  misc_feature: MA Experiment 108561 PARAMETER Experiment Name: At_100uM_ABA_cDNA_P Parameter: Tissue Value: Aerial
  misc_feature: MA Experiment 108561 PARAMETER Experiment Name: At_100uM_ABA_cDNA_P Parameter: Treatment Value: 100uM ABA vs. No Treatment
  misc_feature: MA Experiment ID: 108573 Result: Down-regulated in Transcription
  misc_feature: MA Experiment 108573 PARAMETER Experiment Name: At_Drought_cDNA_P Parameter: Timepoint (hr) Value: 6
  misc_feature: MA Experiment 108573 PARAMETER Experiment Name: At_Drought_cDNA_P Parameter: Tissue Value: Aerial
  misc_feature: MA Experiment 108573 PARAMETER Experiment Name: At_Drought_cDNA_P Parameter: Treatment Value: Drought vs. No Drought
  misc_feature: MA Experiment ID: 20000069 Result: Down-regulated in Transcription
  misc_feature: MA Experiment 20000069 PARAMETER Experiment Name: At_100uM_ABA_Mutants_cDNA_P Parameter: Plant Line Value: CS23
  misc_feature: MA Experiment 20000069 PARAMETER Experiment Name: At_100uM_ABA_Mutants_cDNA_P Parameter: Timepoint (hr) Value: 6
  misc_feature: MA Experiment 20000069 PARAMETER Experiment Name: At_100uM_ABA_Mutants_cDNA_P Parameter: Tissue Value: Aerial
  misc_feature: MA Experiment 20000069 PARAMETER Experiment Name: At_100uM_ABA_Mutants_cDNA_P Parameter: Treatment Value: 100uM ABA vs. No Treatment
  misc_feature: MA Experiment ID: 20000070 Result: Down-regulated in Transcription
  misc_feature: MA Experiment 20000070 PARAMETER Experiment Name: At_100uM_ABA_Mutants_cDNA_P Parameter: Plant Line Value: CS24
  misc_feature: MA Experiment 20000070 PARAMETER Experiment Name: At_100uM_ABA_Mutants_cDNA_P Parameter: Timepoint (hr) Value: 6
  misc_feature: MA Experiment 20000070 PARAMETER Experiment Name: At_100uM_ABA_Mutants_cDNA_P Parameter: Tissue Value: Aerial
  misc_feature: MA Experiment 20000070 PARAMETER Experiment Name: At_100uM_ABA_Mutants_cDNA_P Parameter: Treatment Value: 100uM ABA vs. No Treatment
  misc_feature: MA Experiment ID: 20000071 Result: Down-regulated in Transcription
  misc_feature: MA Experiment 20000071 PARAMETER Experiment Name: At_100uM_ABA_Mutants_cDNA_P Parameter: Plant Line Value: CS8104
  misc_feature: MA Experiment 20000071 PARAMETER Experiment Name: At_100uM_ABA_Mutants_cDNA_P Parameter: Timepoint (hr) Value: 6
  misc_feature: MA Experiment 20000071 PARAMETER Experiment Name: At_100uM_ABA_Mutants_cDNA_P Parameter: Tissue Value: Aerial
  misc_feature: MA Experiment 20000071 PARAMETER Experiment Name: At_100uM_ABA_Mutants_cDNA_P Parameter: Treatment Value: 100uM ABA vs. No Treatment
  misc_feature: MA Experiment ID: 20000072 Result: Down-regulated in Transcription
  misc_feature: MA Experiment 20000072 PARAMETER Experiment Name: At_100uM_ABA_Mutants_cDNA_P Parameter: Plant Line Value: CS8105
  misc_feature: MA Experiment 20000072 PARAMETER Experiment Name: At_100uM_ABA_Mutants_cDNA_P Parameter: Timepoint (hr) Value: 6
  misc_feature: MA Experiment 20000072 PARAMETER Experiment Name: At_100uM_ABA_Mutants_cDNA_P Parameter: Tissue Value: Aerial
  misc_feature: MA Experiment 20000072 PARAMETER Experiment Name: At_100uM_ABA_Mutants_cDNA_P Parameter: Treatment Value: 100uM ABA vs. No Treatment
  misc_feature: MA Experiment ID: 20000117 Result: Down-regulated in Transcription
  misc_feature: MA Experiment 20000117 PARAMETER Experiment Name: At_100uM_ABA_Mutants_cDNA_P Parameter: Plant Line Value: Columbia
  misc_feature: MA Experiment 20000117 PARAMETER Experiment Name: At_100uM_ABA_Mutants_cDNA_P Parameter: Timepoint (hr) Value: 6
  misc_feature: MA Experiment 20000117 PARAMETER Experiment Name: At_100uM_ABA_Mutants_cDNA_P Parameter: Tissue Value: Aerial
  misc_feature: MA Experiment 20000117 PARAMETER Experiment Name: At_100uM_ABA_Mutants_cDNA_P Parameter: Treatment Value: 100uM ABA vs. No Treatment
  misc_feature: MA Experiment ID: 20000180 Result: Up-regulated in Transcription
  misc_feature: MA Experiment 20000180 PARAMETER Experiment Name: At_Germinating_Seeds_P Parameter: Age (hr) Value: 24 vs. 0
  misc_feature: MA Experiment 20000180 PARAMETER Experiment Name: At_Germinating_Seeds_P Parameter: Tissue Value: Germinating Seeds
  misc_feature: MA Experiment ID: 20000234 Result: Up-regulated in Transcription
  misc_feature: MA Experiment 20000234 PARAMETER Experiment Name: At_Siliques_P Parameter: Age (day) Value: 21
  misc_feature: MA Experiment 20000234 PARAMETER Experiment Name: At_Siliques_P Parameter: Organism Value: A. thaliana
  misc_feature: MA Experiment 20000234 PARAMETER Experiment Name: At_Siliques_P Parameter: Plant Line Value: WS
  misc_feature: MA Experiment 20000234 PARAMETER Experiment Name: At_Siliques_P Parameter: Tissue Value: Less Than 5mm Siliques vs. Whole Plant
  misc_feature: MA Experiment ID: 20000235 Result: Up-regulated in Transcription
  misc_feature: MA Experiment 20000235 PARAMETER Experiment Name: At_Siliques_P Parameter: Age (day) Value: 21
  misc_feature: MA Experiment 20000235 PARAMETER Experiment Name: At_Siliques_P Parameter: Organism Value: A. thaliana
  misc_feature: MA Experiment 20000235 PARAMETER Experiment Name: At_Siliques_P Parameter: Plant Line Value: WS
  misc_feature: MA Experiment 20000235 PARAMETER Experiment Name: At_Siliques_P Parameter: Tissue Value: 5-10mm Siliques vs. Whole Plant
  misc_feature: MA Experiment ID: 20000264 Result: Up-regulated in Transcription
  misc_feature: MA Experiment 20000264 PARAMETER Experiment Name: At_Open_Flower_P Parameter: Age (day) Value: 21
  misc_feature: MA Experiment 20000264 PARAMETER Experiment Name: At_Open_Flower_P Parameter: Plant Line Value: WS
  misc_feature: MA Experiment 20000264 PARAMETER Experiment Name: At_Open_Flower_P Parameter: Tissue Value: Open Flower vs. Whole Plant
  misc_feature: MA Experiment ID: 20000265 Result: Up-regulated in Transcription
  misc_feature: MA Experiment 20000265 PARAMETER Experiment Name: At_Open_Flower_P Parameter: Age (day) Value: 21
  misc_feature: MA Experiment 20000265 PARAMETER Experiment Name: At_Open_Flower_P Parameter: Plant Line Value: WS
  misc_feature: MA Experiment 20000265 PARAMETER Experiment Name: At_Open_Flower_P Parameter: Tissue Value: Closed Flower vs. Whole Plant
  misc_feature: MA Experiment ID: 20000286 Result: Up-regulated in Transcription
  misc_feature: MA Experiment 20000286 PARAMETER Experiment Name: At_Open_Flower_P Parameter: Age (day) Value: 21
  misc_feature: MA Experiment 20000286 PARAMETER Experiment Name: At_Open_Flower_P Parameter: Plant Line Value: WS
  misc_feature: MA Experiment 20000286 PARAMETER Experiment Name: At_Open_Flower_P Parameter: Tissue Value: Half Open vs. Whole Plant
  misc_feature: MA Experiment ID: 20000437 Result: Down-regulated in Transcription
  misc_feature: MA Experiment 20000437 PARAMETER Experiment Name: At_Drought_P Parameter: Age (day) Value: 8
  misc_feature: MA Experiment 20000437 PARAMETER Experiment Name: At_Drought_P Parameter: Organism Value: A. thaliana
  misc_feature: MA Experiment 20000437 PARAMETER Experiment Name: At_Drought_P Parameter: Plant Line Value: WS
  misc_feature: MA Experiment 20000437 PARAMETER Experiment Name: At_Drought_P Parameter: Timepoint (hr) Value: 24
  misc_feature: MA Experiment 20000437 PARAMETER Experiment Name: At_Drought_P Parameter: Tissue Value: Whole Plant
  misc_feature: MA Experiment 20000437 PARAMETER Experiment Name: At_Drought_P Parameter: Treatment Value: Drought vs. No Drought
  misc_feature: MA Experiment ID: 20000438 Result: Up-regulated in Transcription
  misc_feature: MA Experiment 20000438 PARAMETER Experiment Name: At_Shoots__P Parameter: Age (day) Value: 14
  misc_feature: MA Experiment 20000438 PARAMETER Experiment Name: At_Shoots__P Parameter: Tissue Value: Shoots vs. Whole Plant
  misc_feature: MA Experiment ID: 20000573 Result: Down-regulated in Transcription
  misc_feature: MA Experiment 20000573 PARAMETER Experiment Name: At_100uM_ABA_Mutants__P Parameter: Organism Value: A. thaliana
  misc_feature: MA Experiment 20000573 PARAMETER Experiment Name: At_100uM_ABA_Mutants__P Parameter: Plant Line Value: CS22 vs. Ler wt
  misc_feature: MA Experiment 20000573 PARAMETER Experiment Name: At_100uM_ABA_Mutants__P Parameter: Timepoint (hr) Value: N/A
  misc_feature: MA Experiment 20000573 PARAMETER Experiment Name: At_100uM_ABA_Mutants__P Parameter: Tissue Value: Whole Plant
  misc_feature: MA Experiment 20000573 PARAMETER Experiment Name: At_100uM_ABA_Mutants__P Parameter: Treatment Value: None
  misc_feature: MA Experiment ID: 20000574 Result: Down-regulated in Transcription
  misc_feature: MA Experiment 20000574 PARAMETER Experiment Name: At_100uM_ABA_Mutants__P Parameter: Organism Value: A. thaliana
  misc_feature: MA Experiment 20000574 PARAMETER Experiment Name: At_100uM_ABA_Mutants__P Parameter: Plant Line Value: CS23 vs. Ler wt
  misc_feature: MA Experiment 20000574 PARAMETER Experiment Name: At_100uM_ABA_Mutants__P Parameter: Timepoint (hr) Value: N/A
  misc_feature: MA Experiment 20000574 PARAMETER Experiment Name: At_100uM_ABA_Mutants__P Parameter: Tissue Value: Whole Plant
  misc_feature: MA Experiment 20000574 PARAMETER Experiment Name: At_100uM_ABA_Mutants__P Parameter: Treatment Value: None
  misc_feature: MA Experiment ID: 20001906 Result: Down-regulated in Transcription
  misc_feature: MA Experiment 20001906 PARAMETER Experiment Name: At_Drought_Reproduction_P Parameter: Age (day) Value: 35
  misc_feature: MA Experiment 20001906 PARAMETER Experiment Name: At_Drought_Reproduction_P Parameter: Organism Value: A. thaliana
  misc_feature: MA Experiment 20001906 PARAMETER Experiment Name: At_Drought_Reproduction_P Parameter: Plant Line Value: WS
  misc_feature: MA Experiment 20001906 PARAMETER Experiment Name: At_Drought_Reproduction_P Parameter: Timepoint (day) Value: 5
  misc_feature: MA Experiment 20001906 PARAMETER Experiment Name: At_Drought_Reproduction_P Parameter: Tissue Value: Siliques
  misc_feature: MA Experiment 20001906 PARAMETER Experiment Name: At_Drought_Reproduction_P Parameter: Treatment Value: Drought vs. No Drought

SEQ ID NO: 47712 - protein, 639 aa, Arabidopsis thaliana; identical to SEQ ID NO: 38003
  peptide (1)..(639): Ceres Seq. ID no. 12466390
  misc_feature (119)..(631): Pfam Name: Putative methyltransferase Pfam Description: Putative methyltransferase
  misc_feature (119)..(631): Pfam Name: Putative methyltransferase Pfam Description: Putative methyltransferase
  misc_feature (24)..(635): Homolog of NCBI NO: 34898042 NR Description: OSJNBa0038F22.19 [Oryza sativa (japonica
  misc_feature (90)..(639): Homolog of NCBI NO: 6752888 NR Description: unknown [Malus x domestica]
  misc_feature (90)..(634): Homolog of NCBI NO: 18071395 NR Description: hypothetical protein [Oryza sativa]
  misc_feature (78)..(639): Homolog of NCBI NO: 18396075 NR Description: expressed protein
  misc_feature (87)..(638): Homolog of NCBI NO: 15236921 NR Description: hypothetical protein; protein id: At4g00750.1
  misc_feature (24)..(635): Homolog of NCBI NO: 34898042 NR Description: OSJNBa0038F22.19 [Oryza sativa (japonica
  misc_feature (90)..(634): Homolog of NCBI NO: 18071395 NR Description: hypothetical protein [Oryza sativa]
  misc_feature (87)..(638): Homolog of NCBI NO: 15236921 NR Description: hypothetical protein; protein id: At4g00750.1
  misc_feature (68)..(638): Homolog of NCBI NO: 15235080 NR Description: putative protein; protein id: At4g10440.1
  misc_feature (1)..(99): Homolog of NCBI NO: 15235080 NR Description: putative protein; protein id: At4g10440.1
  misc_feature (1)..(639): Homolog of NCBI NO: 37535962 NR Description: unknown protein [Oryza sativa (japonica
  misc_feature (1)..(636): Homolog of NCBI NO: 24413975 NR Description: hypothetical protein~similar to Oryza sativa
  misc_feature (89)..(638): Homolog of NCBI NO: 15225560 NR Description: hypothetical protein; protein id: At2g45750.1
  misc_feature (78)..(639): Homolog of NCBI NO: 18396075 NR Description: expressed protein
  misc_feature (90)..(639): Homolog of NCBI NO: 6752888 NR Description: unknown [Malus x domestica]
  misc_feature (89)..(638): Homolog of NCBI NO: 15225560 NR Description: hypothetical protein; protein id: At2g45750.1
  misc_feature (1)..(636): Homolog of NCBI NO: 24413975 NR Description: hypothetical protein~similar to Oryza sativa
  misc_feature (1)..(639): Homolog of NCBI NO: 37535962 NR Description: unknown protein [Oryza sativa (japonica
  misc_feature (1)..(99): Homolog of NCBI NO: 15235080 NR Description: putative protein; protein id: At4g10440.1
  misc_feature (68)..(638): Homolog of NCBI NO: 15235080 NR Description: putative protein; protein id: At4g10440.1

SEQ ID NO: 47713 - protein, 587 aa, Arabidopsis thaliana; identical to SEQ ID NO: 38004
  peptide (1)..(587): Ceres Seq. ID no. 12466391
  misc_feature (67)..(579): Pfam Name: Putative methyltransferase Pfam Description: Putative methyltransferase
  misc_feature (67)..(579): Pfam Name: Putative methyltransferase Pfam Description: Putative methyltransferase
  misc_feature (1)..(583): Homolog of NCBI NO: 34898042 NR Description: OSJNBa0038F22.19 [Oryza sativa (japonica
  misc_feature (38)..(587): Homolog of NCBI NO: 6752888 NR Description: unknown [Malus x domestica]
  misc_feature (38)..(582): Homolog of NCBI NO: 18071395 NR Description: hypothetical protein [Oryza sativa]
  misc_feature (26)..(587): Homolog of NCBI NO: 18396075 NR Description: expressed protein
  misc_feature (35)..(586): Homolog of NCBI NO: 15236921 NR Description: hypothetical protein; protein id: At4g00750.1
  misc_feature (1)..(583): Homolog of NCBI NO: 34898042 NR Description: OSJNBa0038F22.19 [Oryza sativa (japonica
  misc_feature (38)..(582): Homolog of NCBI NO: 18071395 NR Description: hypothetical protein [Oryza sativa]
  misc_feature (35)..(586): Homolog of NCBI NO: 15236921 NR Description: hypothetical protein; protein id: At4g00750.1
  misc_feature (16)..(586): Homolog of NCBI NO: 15235080 NR Description: putative protein; protein id: At4g10440.1
  misc_feature (1)..(47): Homolog of NCBI NO: 15235080 NR Description: putative protein; protein id: At4g10440.1
  misc_feature (1)..(587): Homolog of NCBI NO: 37535962 NR Description: unknown protein [Oryza sativa (japonica
  misc_feature (1)..(584): Homolog of NCBI NO: 24413975 NR Description: hypothetical protein~similar to Oryza sativa
  misc_feature (37)..(586): Homolog of NCBI NO: 15225560 NR Description: hypothetical protein; protein id: At2g45750.1
  misc_feature (26)..(587): Homolog of NCBI NO: 18396075 NR Description: expressed protein
  misc_feature (38)..(587): Homolog of NCBI NO: 6752888 NR Description: unknown [Malus x domestica]
  misc_feature (37)..(586): Homolog of NCBI NO: 15225560 NR Description: hypothetical protein; protein id: At2g45750.1
  misc_feature (1)..(584): Homolog of NCBI NO: 24413975 NR Description: hypothetical protein~similar to Oryza sativa
  misc_feature (1)..(587): Homolog of NCBI NO: 37535962 NR Description: unknown protein [Oryza sativa (japonica
  misc_feature (1)..(47): Homolog of NCBI NO: 15235080 NR Description: putative protein; protein id: At4g10440.1
  misc_feature (16)..(586): Homolog of NCBI NO: 15235080 NR Description: putative protein; protein id: At4g10440.1

SEQ ID NO: 47714 - protein, 525 aa, Arabidopsis thaliana; identical to SEQ ID NO: 38005
  peptide (1)..(525): Ceres Seq. ID no. 12466392
  misc_feature (5)..(517): Pfam Name: Putative methyltransferase Pfam Description: Putative methyltransferase
  misc_feature (5)..(517): Pfam Name: Putative methyltransferase Pfam Description: Putative methyltransferase
  misc_feature (1)..(520): Homolog of NCBI NO: 22328758 NR Description: putative protein
  misc_feature (1)..(521): Homolog of NCBI NO: 34898042 NR Description: OSJNBa0038F22.19 [Oryza sativa (japonica
  misc_feature (1)..(525): Homolog of NCBI NO: 6752888 NR Description: unknown [Malus x domestica]
  misc_feature (1)..(520): Homolog of NCBI NO: 18071395 NR Description: hypothetical protein [Oryza sativa]
  misc_feature (1)..(525): Homolog of NCBI NO: 18396075 NR Description: expressed protein
  misc_feature (1)..(520): Homolog of NCBI NO: 22328758 NR Description: putative protein
  misc_feature (1)..(525): Homolog of NCBI NO: 6752888 NR Description: unknown [Malus x domestica]
  misc_feature (1)..(525): Homolog of NCBI NO: 18396075 NR Description: expressed protein
  misc_feature (1)..(524): Homolog of NCBI NO: 15235080 NR Description: putative protein; protein id: At4g10440.1
  misc_feature (1)..(525): Homolog of NCBI NO: 37535962 NR Description: unknown protein [Oryza sativa (japonica
  misc_feature (1)..(522): Homolog of NCBI NO: 24413975 NR Description: hypothetical protein~similar to Oryza sativa
  misc_feature (1)..(524): Homolog of NCBI NO: 15225560 NR Description: hypothetical protein; protein id: At2g45750.1
  misc_feature (1)..(524): Homolog of NCBI NO: 15236921 NR Description: hypothetical protein; protein id: At4g00750.1
  misc_feature (1)..(520): Homolog of NCBI NO: 18071395 NR Description: hypothetical protein [Oryza sativa]
  misc_feature (1)..(521): Homolog of NCBI NO: 34898042 NR Description: OSJNBa0038F22.19 [Oryza sativa (japonica
  misc_feature (1)..(524): Homolog of NCBI NO: 15236921 NR Description: hypothetical protein; protein id: At4g00750.1
  misc_feature (1)..(524): Homolog of NCBI NO: 15225560 NR Description: hypothetical protein; protein id: At2g45750.1
  misc_feature (1)..(522): Homolog of NCBI NO: 24413975 NR Description: hypothetical protein~similar to Oryza sativa
  misc_feature (1)..(525): Homolog of NCBI NO: 37535962 NR Description: unknown protein [Oryza sativa (japonica
  misc_feature (1)..(524): Homolog of NCBI NO: 15235080 NR Description: putative protein; protein id: At4g10440.1

SEQ ID NO: 47715 - DNA, 1291 bp, Arabidopsis thaliana
  misc_feature (1)..(1291): Ceres Seq. ID no. 12683979
  misc_feature: MA Experiment ID: 20000185 Result: Up-regulated in Transcription
  misc_feature: MA Experiment 20000185 PARAMETER Experiment Name: At_Roots__P Parameter: Age (day) Value: 7 vs. 21
  misc_feature: MA Experiment 20000185 PARAMETER Experiment Name: At_Roots__P Parameter: Organism Value: A. thaliana
  misc_feature: MA Experiment 20000185 PARAMETER Experiment Name: At_Roots__P Parameter: Tissue Value: Roots vs. Whole Plant
  misc_feature: MA Experiment ID: 20000439 Result: Up-regulated in Transcription
  misc_feature: MA Experiment 20000439 PARAMETER Experiment Name: At_Roots__P Parameter: Age (day) Value: 14 vs. 21
  misc_feature: MA Experiment 20000439 PARAMETER Experiment Name: At_Roots__P Parameter: Organism Value: A. thaliana
  misc_feature: MA Experiment 20000439 PARAMETER Experiment Name: At_Roots__P Parameter: Tissue Value: Roots vs. Whole Plant
  misc_feature: MA Experiment ID: 20001905 Result: Up-regulated in Transcription
  misc_feature: MA Experiment 20001905 PARAMETER Experiment Name: At_Drought_Reproduction_P Parameter: Age (day) Value: 40
  misc_feature: MA Experiment 20001905 PARAMETER Experiment Name: At_Drought_Reproduction_P Parameter: Organism Value: A. thaliana
  misc_feature: MA Experiment 20001905 PARAMETER Experiment Name: At_Drought_Reproduction_P Parameter: Plant Line Value: WS
  misc_feature: MA Experiment 20001905 PARAMETER Experiment Name: At_Drought_Reproduction_P Parameter: Timepoint (day) Value: 10
  misc_feature: MA Experiment 20001905 PARAMETER Experiment Name: At_Drought_Reproduction_P Parameter: Tissue Value: Rosettes
  misc_feature: MA Experiment 20001905 PARAMETER Experiment Name: At_Drought_Reproduction_P Parameter: Treatment Value: Drought vs. No Drought
gaaaaaaaacaaatcagattctcaaatactgaaaataaaaagaagaagagagaaatctacggtggtgggtgattcgccggagttcaatttcgtagctagatttctcctccttttccccccgacgagctgtgcgagagagggaggggaatcatgcagaaacggagaacggtgaaggaatctacgaagataagaaatggtaaaggtatggattccggcgaaaagaagagatctgagaagagattgatgaagttcgaggagttacctaggtatttgaaagataacgagttcatacacaatcattatcgatgtgagtggtcaatcaaagaaactttcctcagcgctttctcatggcacaatgagactctcaacatctggacgcatttgtgtggatttgcgatatttacttggatgatggttgtgagttcaatggagacgacggagcttggcctcgccggctttgttagccttctctccggagcaacaattcgctggccatggccgtcaatggcaatgtcaaaagatgtttacttctccagcgatcaaactctgcatcacgacttaaacgtgacacacactcgctcgctcctgaattctcaaggagatgttaactacgaagccattccgaaatggccatggcttgtgttcttgaccggagcaatgggctgcttgatctgcagttccatgtcacacctcttcgcctgtcactccagacggttcaacctcttcttctggcgtctagactacgctggaatctccctcatgatcgtctgttcattcttcgcacctatctactatgcattctcatgccacacttactggcgactcttctacctctcatcgatctcaatcctcggtctcctcgccatcttcactctcctctctccatcactctcagctccacgtttcagatctttcagagcagctctgttcctaacaatgggattttctggcgtaataccagccacacatgtgctttaccttcataaggatcacccaaacgtgcttatagctctcgtatatgaacttgcgatggctgtgttgtatgcaacaggagcagcgttttatgttacccgcatacctgaaagatggaagcctggggcttttgatattgcaggacatagccatcagatattccatgtgtttgtagtcttaggagctcttgctcatagtgttgccagtcttcttatcatggattttcgacgggcttctccttcttgtgccttttaactcgaaaacacattgtaaaacatttagtaatacttcattcaatgtatcaatgtatgtttgtccc

SEQ ID NO: 47716 - protein, 358 aa, Arabidopsis thaliana
  peptide (1)..(358): Ceres Seq. ID no. 12683980
  misc_feature (65)..(344): Pfam Name: Uncharacterised protein family (Hly-III / UPF0073) Pfam Description: Uncharacterised protein family (Hly-III /
  misc_feature (12)..(92): Homolog of NCBI NO: 15235657 NR Description: expressed protein
  misc_feature (136)..(350): Homolog of NCBI NO: 15235657 NR Description: expressed protein
  misc_feature (125)..(358): Homolog of NCBI NO: 18400468 NR Description: expressed protein
  misc_feature (125)..(358): Homolog of NCBI NO: 13272399 NR Description: hypothetical protein [Arabidopsis thaliana]
  misc_feature (13)..(109): Homolog of NCBI NO: 25309925 NR Description: hypothetical protein At2g24150 [imported] -
  misc_feature (176)..(358): Homolog of NCBI NO: 25309925 NR Description: hypothetical protein At2g24150 [imported] -
  misc_feature (1)..(109): Homolog of NCBI NO: 25407688 NR Description: hypothetical protein AT4g30850 [imported] -
  misc_feature (159)..(355): Homolog of NCBI NO: 25407688 NR Description: hypothetical protein AT4g30850 [imported] -
  misc_feature (1)..(358): Homolog of NCBI NO: 18377749 NR Description: unknown protein [Arabidopsis thaliana]
  misc_feature (1)..(358): Homolog of NCBI NO: 30688829 NR Description: expressed protein [Arabidopsis thaliana]
MQKRRTVKESTKIRNGKGMDSGEKKRSEKRLMKFEELPRYLKDNEFIHNHYRCEWSIKETFLSAFSWHNETLNIWTHLCGFAIFTWMMVVSSMETTELGLAGFVSLLSGATIRWPWPSMAMSKDVYFSSDQTLHHDLNVTHTRSLLNSQGDVNYEAIPKWPWLVFLTGAMGCLICSSMSHLFACHSRRFNLFFWRLDYAGISLMIVCSFFAPIYYAFSCHTYWRLFYLSSISILGLLAIFTLLSPSLSAPRFRSFRAALFLTMGFSGVIPATHVLYLHKDHPNVLIALVYELAMAVLYATGAAFYVTRIPERWKPGAFDIAGHSHQIFHVFVVLGALAHSVASLLIMDFRRASPSCAF

SEQ ID NO: 47717 - protein, 340 aa, Arabidopsis thaliana
  peptide (1)..(340): Ceres Seq. ID no. 12683981
  misc_feature (47)..(326): Pfam Name: Uncharacterised protein family (Hly-III / UPF0073) Pfam Description: Uncharacterised protein family (Hly-III /
  misc_feature (1)..(74): Homolog of NCBI NO: 15235657 NR Description: expressed protein
  misc_feature (118)..(332): Homolog of NCBI NO: 15235657 NR Description: expressed protein
  misc_feature (107)..(340): Homolog of NCBI NO: 18400468 NR Description: expressed protein
  misc_feature (107)..(340): Homolog of NCBI NO: 13272399 NR Description: hypothetical protein [Arabidopsis thaliana]
  misc_feature (1)..(91): Homolog of NCBI NO: 25309925 NR Description: hypothetical protein At2g24150 [imported] -
  misc_feature (158)..(340): Homolog of NCBI NO: 25309925 NR Description: hypothetical protein At2g24150 [imported] -
  misc_feature (1)..(91): Homolog of NCBI NO: 25407688 NR Description: hypothetical protein AT4g30850 [imported] -
  misc_feature (141)..(337): Homolog of NCBI NO: 25407688 NR Description: hypothetical protein AT4g30850 [imported] -
  misc_feature (1)..(340): Homolog of NCBI NO: 18377749 NR Description: unknown protein [Arabidopsis thaliana]
  misc_feature (1)..(340): Homolog of NCBI NO: 30688829 NR Description: expressed protein [Arabidopsis thaliana]
MDSGEKKRSEKRLMKFEELPRYLKDNEFIHNHYRCEWSIKETFLSAFSWHNETLNIWTHLCGFAIFTWMMVVSSMETTELGLAGFVSLLSGATIRWPWPSMAMSKDVYFSSDQTLHHDLNVTHTRSLLNSQGDVNYEAIPKWPWLVFLTGAMGCLICSSMSHLFACHSRRFNLFFWRLDYAGISLMIVCSFFAPIYYAFSCHTYWRLFYLSSISILGLLAIFTLLSPSLSAPRFRSFRAALFLTMGFSGVIPATHVLYLHKDHPNVLIALVYELAMAVLYATGAAFYVTRIPERWKPGAFDIAGHSHQIFHVFVVLGALAHSVASLLIMDFRRASPSCAF

SEQ ID NO: 47718 - protein, 327 aa, Arabidopsis thaliana
  peptide (1)..(327): Ceres Seq. ID no. 12683982
  misc_feature (34)..(313): Pfam Name: Uncharacterised protein family (Hly-III / UPF0073) Pfam Description: Uncharacterised protein family (Hly-III /
  misc_feature (1)..(61): Homolog of NCBI NO: 15235657 NR Description: expressed protein
  misc_feature (105)..(319): Homolog of NCBI NO: 15235657 NR Description: expressed protein
  misc_feature (94)..(327): Homolog of NCBI NO: 18400468 NR Description: expressed protein
  misc_feature (94)..(327): Homolog of NCBI NO: 13272399 NR Description: hypothetical protein [Arabidopsis thaliana]
  misc_feature (1)..(78): Homolog of NCBI NO: 25309925 NR Description: hypothetical protein At2g24150 [imported] -
  misc_feature (145)..(327): Homolog of NCBI NO: 25309925 NR Description: hypothetical protein At2g24150 [imported] -
  misc_feature (1)..(78): Homolog of NCBI NO: 25407688 NR Description: hypothetical protein AT4g30850 [imported] -
  misc_feature (128)..(324): Homolog of NCBI NO: 25407688 NR Description: hypothetical protein AT4g30850 [imported] -
  misc_feature (1)..(327): Homolog of NCBI NO: 18377749 NR Description: unknown protein [Arabidopsis thaliana]
  misc_feature (1)..(327): Homolog of NCBI NO: 30688829 NR Description: expressed protein [Arabidopsis thaliana]
MKFEELPRYLKDNEFIHNHYRCEWSIKETFLSAFSWHNETLNIWTHLCGFAIFTWMMVVSSMETTELGLAGFVSLLSGATIRWPWPSMAMSKDVYFSSDQTLHHDLNVTHTRSLLNSQGDVNYEAIPKWPWLVFLTGAMGCLICSSMSHLFACHSRRFNLFFWRLDYAGISLMIVCSFFAPIYYAFSCHTYWRLFYLSSISILGLLAIFTLLSPSLSAPRFRSFRAALFLTMGFSGVIPATHVLYLHKDHPNVLIALVYELAMAVLYATGAAFYVTRIPERWKPGAFDIAGHSHQIFHVFVVLGALAHSVASLLIMDFRRASPSCAF

SEQ ID NO: 47719 - DNA, 1800 bp, Arabidopsis thaliana
  misc_feature (1)..(1800): Ceres Seq. ID no. 13647568
  misc_feature: MA Experiment ID: 20000173 Result: Down-regulated in Transcription
  misc_feature: MA Experiment 20000173 PARAMETER Experiment Name: At_42deg_Heat_P Parameter: Age (day) Value: 14
  misc_feature: MA Experiment 20000173 PARAMETER Experiment Name: At_42deg_Heat_P Parameter: Organism Value: A. thaliana
  misc_feature: MA Experiment 20000173 PARAMETER Experiment Name: At_42deg_Heat_P Parameter: Plant Line Value: WS
  misc_feature: MA Experiment 20000173 PARAMETER Experiment Name: At_42deg_Heat_P Parameter: Temperature (deg C) Value: 42 vs. 22
  misc_feature: MA Experiment 20000173 PARAMETER Experiment Name: At_42deg_Heat_P Parameter: Timepoint (hr) Value: 6
  misc_feature: MA Experiment 20000173 PARAMETER Experiment Name: At_42deg_Heat_P Parameter: Tissue Value: Aerial
  misc_feature: MA Experiment ID: 20000184 Result: Down-regulated in Transcription
  misc_feature: MA Experiment 20000184 PARAMETER Experiment Name: At_Shoots__P Parameter: Age (day) Value: 7
  misc_feature: MA Experiment 20000184 PARAMETER Experiment Name: At_Shoots__P Parameter: Tissue Value: Shoots vs. Whole Plant
  misc_feature: MA Experiment ID: 20000185 Result: Down-regulated in Transcription
  misc_feature: MA Experiment 20000185 PARAMETER Experiment Name: At_Roots__P Parameter: Age (day) Value: 7 vs. 21
  misc_feature: MA Experiment 20000185 PARAMETER Experiment Name: At_Roots__P Parameter: Organism Value: A. thaliana
  misc_feature: MA Experiment 20000185 PARAMETER Experiment Name: At_Roots__P Parameter: Tissue Value: Roots vs. Whole Plant
  misc_feature: MA Experiment ID: 20000437 Result: Up-regulated in Transcription
  misc_feature: MA Experiment 20000437 PARAMETER Experiment Name: At_Drought_P Parameter: Age (day) Value: 8
  misc_feature: MA Experiment 20000437 PARAMETER Experiment Name: At_Drought_P Parameter: Organism Value: A. thaliana
  misc_feature: MA Experiment 20000437 PARAMETER Experiment Name: At_Drought_P Parameter: Plant Line Value: WS
  misc_feature: MA Experiment 20000437 PARAMETER Experiment Name: At_Drought_P Parameter: Timepoint (hr) Value: 24
  misc_feature: MA Experiment 20000437 PARAMETER Experiment Name: At_Drought_P Parameter: Tissue Value: Whole Plant
  misc_feature: MA Experiment 20000437 PARAMETER Experiment Name: At_Drought_P Parameter: Treatment Value: Drought vs. No Drought
  misc_feature: MA Experiment ID: 20000438 Result: Down-regulated in Transcription
  misc_feature: MA Experiment 20000438 PARAMETER Experiment Name: At_Shoots__P Parameter: Age (day) Value: 14
  misc_feature: MA Experiment 20000438 PARAMETER Experiment Name: At_Shoots__P Parameter: Tissue Value: Shoots vs. Whole Plant
  misc_feature: MA Experiment ID: 20000794 Result: Up-regulated in Transcription
  misc_feature: MA Experiment 20000794 PARAMETER Experiment Name: At_Petals_P Parameter: Age (day) Value: 23-25 days
  misc_feature: MA Experiment 20000794 PARAMETER Experiment Name: At_Petals_P Parameter: Plant Line Value: WS
  misc_feature: MA Experiment 20000794 PARAMETER Experiment Name: At_Petals_P Parameter: Tissue Value: Petals vs. Whole plant
  misc_feature: MA Experiment ID: 20001247 Result: Down-regulated in Transcription
  misc_feature: MA Experiment 20001247 PARAMETER Experiment Name: At_Far-red-induction_P Parameter: Age (day) Value: 7
  misc_feature: MA Experiment 20001247 PARAMETER Experiment Name: At_Far-red-induction_P Parameter: Light Value: Far-red vs. White
  misc_feature: MA Experiment 20001247 PARAMETER Experiment Name: At_Far-red-induction_P Parameter: Organism Value: A. thaliana
  misc_feature: MA Experiment 20001247 PARAMETER Experiment Name: At_Far-red-induction_P Parameter: Plant Line Value: Columbia
  misc_feature: MA Experiment 20001247 PARAMETER Experiment Name: At_Far-red-induction_P Parameter: Timepoint (hr) Value: 1
  misc_feature: MA Experiment 20001247 PARAMETER Experiment Name: At_Far-red-induction_P Parameter: Tissue Value: Whole Plant
  misc_feature: MA Experiment ID: 20001451 Result: Down-regulated in Transcription
  misc_feature: MA Experiment 20001451 PARAMETER Experiment Name: At_Far-red-induction_P Parameter: Age (day) Value: 7
  misc_feature: MA Experiment 20001451 PARAMETER Experiment Name: At_Far-red-induction_P Parameter: Light Value: Far-red vs. White
  misc_feature: MA Experiment 20001451 PARAMETER Experiment Name: At_Far-red-induction_P Parameter: Organism Value: A. thaliana
  misc_feature: MA Experiment 20001451 PARAMETER Experiment Name: At_Far-red-induction_P Parameter: Plant Line Value: Columbia
  misc_feature: MA Experiment 20001451 PARAMETER Experiment Name: At_Far-red-induction_P Parameter: Timepoint (hr) Value: 24
  misc_feature: MA Experiment 20001451 PARAMETER Experiment Name: At_Far-red-induction_P Parameter: Tissue Value: Whole Plant
  misc_feature: MA Experiment ID: 20001559 Result: Up-regulated in Transcription
  misc_feature: MA Experiment 20001559 PARAMETER Experiment Name: At_Drought_Soil_Dry_P Parameter: Age (day) Value: 28
  misc_feature: MA Experiment 20001559 PARAMETER Experiment Name: At_Drought_Soil_Dry_P Parameter: Organism Value: A. thaliana
  misc_feature: MA Experiment 20001559 PARAMETER Experiment Name: At_Drought_Soil_Dry_P Parameter: Plant Line Value: WS
  misc_feature: MA Experiment 20001559 PARAMETER Experiment Name: At_Drought_Soil_Dry_P Parameter: Post Timepoint (hr) Value: 29
  misc_feature: MA Experiment 20001559 PARAMETER Experiment Name: At_Drought_Soil_Dry_P Parameter: Post-Treatment Value: Re-Water vs. No Drought
  misc_feature: MA Experiment 20001559 PARAMETER Experiment Name: At_Drought_Soil_Dry_P Parameter: Timepoint (day) Value: 14
  misc_feature: MA Experiment 20001559 PARAMETER Experiment Name: At_Drought_Soil_Dry_P Parameter: Treatment Value: Drought vs. No Drought
gaacaatctcagaaaaggaaaaaaaaagaagcacagttgaaagaaccaaaaatggagaaactaacttttctcagccttctcctgcatttcgtcgtcttcatcgcttcaacgataccgtcttcatcgttcctcttgaatgatcgcacctttgagagatcgaacttgccgtctacgcgcgcggagaagctgatccgtgagctaaaccttttcccgcagcaggatctgaatgtgatcgatgtcgctgatttgcctctcactgctgcggagggaccggggattgttgaacggaagttcgtattcccgaatatacttgccgatggtggccctactgtcgacgatttaggtcatcatgctggttattacaagctcccgaaatctcgtggcgcaagcatgttctacttcttcttcgagtcacggaacaagaaggatgctcctgttgtgatttggttgacgggagggcctggatgtagtagtgagttggctgtgttctatgagaatggtcctttcaagatcactagtaacatgtctcttgcttggaatgagtatggatgggatcaggtttccaatcttctgtatgttgatcagcctgttggaactggtttcagctacacgacagataaaagtgatatccgtcatgacgaaactggagttagcaatgatctttatgattttctgcaggctttctttgcggagcaccctaagttggcaaaaaacgacttttatattactggagagtcatatgctgggcactatatcccagcttttgcttcccgagtccataaaggaaacaaggctaatgagggagttcatattaacctaaagggattcgctattggaaatgggcttacagatcctgcactccaatacccagcctatcctgactacgctttggaaatgggtctaatcacgcaaaaagagcatgatcgcttagaaaagattgtcccactgtgcgaactatcaatcaagctttgtggaactgatggcacaacttcttgtttggcatcatatcttgtctgcaactctttgttcagtggtgtaatgagtcatgctggtggagtaaactattacgacatcaggaagaagtgcgtgggaagtttgtgctacgatttctcaaacatggagaaatttttgaatctgcaatctgtgaggaagtcacttggtgttggggacatagactttgtctcctgcagtacttcagtctatcaggcaatgcttgtagattggatgaggaatctcgaggttggaattcccacgctcttggaagatggaatcagcctccttgtgtatgctggagaatatgatcttatctgcaactggctcggtaactcgaggtgggtgaatgcaatggagtggtcagggaaaacaaactttggggcggctaaagaagttccgtttattgtggatggcaaagaagcaggcttgttaaagacttatgaacaactcagtttcctcaaggtgagagatgcaggacacatggttccaatggaccagcctaaagctgcattgaaaatgctgaagcgatggatggagaattcacttatcgaagatgctactgtgactgttgctgctcagggaggagaggaactggttgctcagatgtgatcacatcttcttttgcgttgcatgaaaacaaaaggcagcaaacataaaacaatgtgtgagcaattgacgttttcttctgtaatttgatctcataagtcataagaaagatacagtatatgtaggggttgcccaatttcgttataaaatcaaactctgctgacaccaaaaacataataattactacgaaatgtgttatct

SEQ ID NO: 47720 - protein, 533 aa, Arabidopsis thaliana
  peptide (1)..(533): Ceres Seq. ID no. 13647569
  misc_feature (101)..(511): Pfam Name: Serine carboxypeptidase Pfam Description: Serine carboxypeptidase
  misc_feature (75)..(510): Homolog of NCBI NO: 35181448 NR Description: serine carboxypeptidase precursor [Trypanosoma
  misc_feature (53)..(515): Homolog of NCBI NO: 2851577 NR Description: Serine carboxypeptidase III precursor (CP-MIII)
  misc_feature (24)..(516): Homolog of NCBI NO: 584893 NR Description: Serine carboxypeptidase III precursor
  misc_feature (20)..(513): Homolog of NCBI NO: 16323071 NR Description: AT3g45010/F14D17_80 [Arabidopsis thaliana]
  misc_feature (20)..(513): Homolog of NCBI NO: 15230577 NR Description: serine carboxypeptidase III, putative
  misc_feature (30)..(515): Homolog of NCBI NO: 6960455 NR Description: serine carboxypeptidase precursor [Matricaria
  misc_feature (13)..(517): Homolog of NCBI NO: 21901929 NR Description: carboxypeptidase type III [Theobroma cacao]
  misc_feature (18)..(533): Homolog of NCBI NO: 18447763 NR Description: putative serine carboxypeptidase precursor
  misc_feature (18)..(533): Homolog of NCBI NO: 15228281 NR Description: serine carboxypeptidase III, putative
  misc_feature (18)..(531): Homolog of NCBI NO: 166674 NR Description: carboxypeptidase Y-like protein
EQSQKRKKKEAQLKEPKMEKLTFLSLLLHFVVFIASTIPSSSFLLNDRTFERSNLPSTRAEKLIRELNLFPQQDLNVIDVADLPLTAAEGPGIVERKFVFPNILADGGPTVDDLGHHAGYYKLPKSRGASMFYFFFESRNKKDAPVVIWLTGGPGCSSELAVFYENGPFKITSNMSLAWNEYGWDQVSNLLYVDQPVGTGFSYTTDKSDIRHDETGVSNDLYDFLQAFFAEHPKLAKNDFYITGESYAGHYIPAFASRVHKGNKANEGVHINLKGFAIGNGLTDPALQYPAYPDYALEMGLITQKEHDRLEKIVPLCELSIKLCGTDGTTSCLASYLVCNSLFSGVMSHAGGVNYYDIRKKCVGSLCYDFSNMEKFLNLQSVRKSLGVGDIDFVSCSTSVYQAMLVDWMRNLEVGIPTLLEDGISLLVYAGEYDLICNWLGNSRWVNAMEWSGKTNFGAAKEVPFIVDGKEAGLLKTYEQLSFLKVRDAGHMVPMDQPKAALKMLKRWMENSLIEDATVTVAAQGGEELVAQM

SEQ ID NO: 47721 - protein, 516 aa, Arabidopsis thaliana
  peptide (1)..(516): Ceres Seq. ID no. 13647570
  misc_feature (84)..(494): Pfam Name: Serine carboxypeptidase Pfam Description: Serine carboxypeptidase
  misc_feature (58)..(493): Homolog of NCBI NO: 35181448 NR Description: serine carboxypeptidase precursor [Trypanosoma
  misc_feature (36)..(498): Homolog of NCBI NO: 2851577 NR Description: Serine carboxypeptidase III precursor (CP-MIII)
  misc_feature (7)..(499): Homolog of NCBI NO: 584893 NR Description: Serine carboxypeptidase III precursor
  misc_feature (3)..(496): Homolog of NCBI NO: 16323071 NR Description: AT3g45010/F14D17_80 [Arabidopsis thaliana]
  misc_feature (3)..(496): Homolog of NCBI NO: 15230577 NR Description: serine carboxypeptidase III, putative
  misc_feature (13)..(498): Homolog of NCBI NO: 6960455 NR Description: serine carboxypeptidase precursor [Matricaria
  misc_feature (1)..(500): Homolog of NCBI NO: 21901929 NR Description: carboxypeptidase type III [Theobroma cacao]
  misc_feature (1)..(516): Homolog of NCBI NO: 18447763 NR Description: putative serine carboxypeptidase precursor
  misc_feature (1)..(516): Homolog of NCBI NO: 15228281 NR Description: serine carboxypeptidase III, putative
  misc_feature (1)..(514): Homolog of NCBI NO: 166674 NR Description: carboxypeptidase Y-like protein
MEKLTFLSLLLHFVVFIASTIPSSSFLLNDRTFERSNLPSTRAEKLIRELNLFPQQDLNVIDVADLPLTAAEGPGIVERKFVFPNILADGGPTVDDLGHHAGYYKLPKSRGASMFYFFFESRNKKDAPVVIWLTGGPGCSSELAVFYENGPFKITSNMSLAWNEYGWDQVSNLLYVDQPVGTGFSYTTDKSDIRHDETGVSNDLYDFLQAFFAEHPKLAKNDFYITGESYAGHYIPAFASRVHKGNKANEGVHINLKGFAIGNGLTDPALQYPAYPDYALEMGLITQKEHDRLEKIVPLCELSIKLCGTDGTTSCLASYLVCNSLFSGVMSHAGGVNYYDIRKKCVGSLCYDFSNMEKFLNLQSVRKSLGVGDIDFVSCSTSVYQAMLVDWMRNLEVGIPTLLEDGISLLVYAGEYDLICNWLGNSRWVNAMEWSGKTNFGAAKEVPFIVDGKEAGLLKTYEQLSFLKVRDAGHMVPMDQPKAALKMLKRWMENSLIEDATVTVAAQGGEELVAQM

SEQ ID NO: 47722 - protein, 403 aa, Arabidopsis thaliana
  peptide (1)..(403): Ceres Seq. ID no. 13647571
  misc_feature (1)..(381): Pfam Name: Serine carboxypeptidase Pfam Description: Serine carboxypeptidase
  misc_feature (1)..(380): Homolog of NCBI NO: 35181448 NR Description: serine carboxypeptidase precursor [Trypanosoma
  misc_feature (1)..(385): Homolog of NCBI NO: 2851577 NR Description: Serine carboxypeptidase III precursor (CP-MIII)
  misc_feature (1)..(386): Homolog of NCBI NO: 584893 NR Description: Serine carboxypeptidase III precursor
  misc_feature (1)..(383): Homolog of NCBI NO: 16323071 NR Description: AT3g45010/F14D17_80 [Arabidopsis thaliana]
  misc_feature (1)..(383): Homolog of NCBI NO: 15230577 NR Description: serine carboxypeptidase III, putative
  misc_feature (1)..(385): Homolog of NCBI NO: 6960455 NR Description: serine carboxypeptidase precursor [Matricaria
  misc_feature (1)..(387): Homolog of NCBI NO: 21901929 NR Description: carboxypeptidase type III [Theobroma cacao]
  misc_feature (1)..(403): Homolog of NCBI NO: 18447763 NR Description: putative serine carboxypeptidase precursor
  misc_feature (1)..(403): Homolog of NCBI NO: 15228281 NR Description: serine carboxypeptidase III, putative
  misc_feature (1)..(401): Homolog of NCBI NO: 166674 NR Description: carboxypeptidase Y-like protein
MFYFFFESRNKKDAPVVIWLTGGPGCSSELAVFYENGPFKITSNMSLAWNEYGWDQVSNLLYVDQPVGTGFSYTTDKSDIRHDETGVSNDLYDFLQAFFAEHPKLAKNDFYITGESYAGHYIPAFASRVHKGNKANEGVHINLKGFAIGNGLTDPALQYPAYPDYALEMGLITQKEHDRLEKIVPLCELSIKLCGTDGTTSCLASYLVCNSLFSGVMSHAGGVNYYDIRKKCVGSLCYDFSNMEKFLNLQSVRKSLGVGDIDFVSCSTSVYQAMLVDWMRNLEVGIPTLLEDGISLLVYAGEYDLICNWLGNSRWVNAMEWSGKTNFGAAKEVPFIVDGKEAGLLKTYEQLSFLKVRDAGHMVPMDQPKAALKMLKRWMENSLIEDATVTVAAQGGEELVAQM

SEQ ID NO: 47723 - DNA, 3579 bp, Arabidopsis thaliana
  misc_feature (1)..(3579): Ceres Seq. ID no. 13647525
  misc_feature: MA Experiment ID: 20000171 Result: Down-regulated in Transcription
  misc_feature: MA Experiment 20000171 PARAMETER Experiment Name: At_42deg_Heat_P Parameter: Age (day) Value: 14
  misc_feature: MA Experiment 20000171 PARAMETER Experiment Name: At_42deg_Heat_P Parameter: Organism Value: A. thaliana
  misc_feature: MA Experiment 20000171 PARAMETER Experiment Name: At_42deg_Heat_P Parameter: Plant Line Value: WS
  misc_feature: MA Experiment 20000171 PARAMETER Experiment Name: At_42deg_Heat_P Parameter: Temperature (deg C) Value: 42 vs. 22
  misc_feature: MA Experiment 20000171 PARAMETER Experiment Name: At_42deg_Heat_P Parameter: Timepoint (hr) Value: 1
  misc_feature: MA Experiment 20000171 PARAMETER Experiment Name: At_42deg_Heat_P Parameter: Tissue Value: Aerial
  misc_feature: MA Experiment ID: 20000173 Result: Down-regulated in Transcription
  misc_feature: MA Experiment 20000173 PARAMETER Experiment Name: At_42deg_Heat_P Parameter: Age (day) Value: 14
  misc_feature: MA Experiment 20000173 PARAMETER Experiment Name: At_42deg_Heat_P Parameter: Organism Value: A. thaliana
  misc_feature: MA Experiment 20000173 PARAMETER Experiment Name: At_42deg_Heat_P Parameter: Plant Line Value: WS
  misc_feature: MA Experiment 20000173 PARAMETER Experiment Name: At_42deg_Heat_P Parameter: Temperature (deg C) Value: 42 vs. 22
  misc_feature: MA Experiment 20000173 PARAMETER Experiment Name: At_42deg_Heat_P Parameter: Timepoint (hr) Value: 6
  misc_feature: MA Experiment 20000173 PARAMETER Experiment Name: At_42deg_Heat_P Parameter: Tissue Value: Aerial
  misc_feature: MA Experiment ID: 20000227 Result: Up-regulated in Transcription
  misc_feature: MA Experiment 20000227 PARAMETER Experiment Name: At_Root-Tips-vs-Tops_P Parameter: Tissue Value: Root Tips vs. Root Tops
  misc_feature: MA Experiment ID: 20000234 Result: Up-regulated in Transcription
  misc_feature: MA Experiment 20000234 PARAMETER Experiment Name: At_Siliques_P Parameter: Age (day) Value: 21
  misc_feature: MA Experiment 20000234 PARAMETER Experiment Name: At_Siliques_P Parameter: Organism Value: A. thaliana
  misc_feature: MA Experiment 20000234 PARAMETER Experiment Name: At_Siliques_P Parameter: Plant Line Value: WS
  misc_feature: MA Experiment 20000234 PARAMETER Experiment Name: At_Siliques_P Parameter: Tissue Value: Less Than 5mm Siliques vs. Whole Plant
  misc_feature: MA Experiment ID: 20000235 Result: Up-regulated in Transcription
  misc_feature: MA Experiment 20000235 PARAMETER Experiment Name: At_Siliques_P Parameter: Age (day) Value: 21
  misc_feature: MA Experiment 20000235 PARAMETER Experiment Name: At_Siliques_P Parameter: Organism Value: A. thaliana
  misc_feature: MA Experiment 20000235 PARAMETER Experiment Name: At_Siliques_P Parameter: Plant Line Value: WS
  misc_feature: MA Experiment 20000235 PARAMETER Experiment Name: At_Siliques_P Parameter: Tissue Value: 5-10mm Siliques vs. Whole Plant
  misc_feature: MA Experiment ID: 20000439 Result: Up-regulated in Transcription
  misc_feature: MA Experiment 20000439 PARAMETER Experiment Name: At_Roots__P Parameter: Age (day) Value: 14 vs. 21
  misc_feature: MA Experiment 20000439 PARAMETER Experiment Name: At_Roots__P Parameter: Organism Value: A. thaliana
  misc_feature: MA Experiment 20000439 PARAMETER Experiment Name: At_Roots__P Parameter: Tissue Value: Roots vs. Whole Plant
  misc_feature: MA Experiment ID: 20000496 Result: Up-regulated in Transcription
  misc_feature: MA Experiment 20000496 PARAMETER Experiment Name: At_Guard_Cells_P Parameter: Harvest Date Value: 7/19/2002
  misc_feature: MA Experiment 20000496 PARAMETER Experiment Name: At_Guard_Cells_P Parameter: Organism Value: Canola
  misc_feature: MA Experiment 20000496 PARAMETER Experiment Name: At_Guard_Cells_P Parameter: Tissue Value: Guard Cells vs. Leaves
  misc_feature: MA Experiment ID: 20000794 Result: Up-regulated in Transcription
  misc_feature: MA Experiment 20000794 PARAMETER Experiment Name: At_Petals_P Parameter: Age (day) Value: 23-25 days
  misc_feature: MA Experiment 20000794 PARAMETER Experiment Name: At_Petals_P Parameter: Plant Line Value: WS
  misc_feature: MA Experiment 20000794 PARAMETER Experiment Name: At_Petals_P Parameter: Tissue Value: Petals vs. Whole plant
atggacattctttttgctcagatccaggcggacctccgttcaaatgacgcgcttcgccagtcatcggcgcttcttcaggcgctgcagcaatccgccgccggaagagatatctctgtgatcgctaagtctgctgtggaggagattgttgcttctccggcttcagctgtttgtaagaagctggcattcgatctcatccgatctacccgcctcactccggatctttgggacaccgtttgctcaggtgtcaaaacggatcttcattttccggacccggatgttaccgccgctgccgtctccatccttgcggctctccctgccttctcgcttcctaaactcatctctgattgcagctctgagattgcttcctgcttcgattctccatctgacaaccttcgtttttccatcaccgagacacttggctgcatcctcgcgcgtgatgatctcgttactttgtgcgagaacaatgtgggtctcctcgacaaggtctccaactggtgggctcggatcggccagaacatgctcgacaaatccgacgccgtctccaaggttgcctttgagtccgtcggcagactcttccaggagttcgactccaagcggatgagccgtcttgctggcgataagctcgttgacagcgagaactccctcgccatcaggtccaagtgggtctcttccatggttgacattgtatggagaaagaggagcgctttgatggctaggtctttagtccttcctgtcgaaaccttcagagccactgttttccctcttgtctttgctgtcaaagctgttgcttccggtagtgtcgaagtgattagacagctttccaaggcttcctctgctgctgctgcagctaatgccaccgttgtggactccaacgccgagaagctggttggcgtctcagatttggttacccatttggcgccattcttggcttcctctttggatccagctttgatttttgaagtgggaattaacatgctctacctggcagatgttgccggaggcaagccagagtgggcttcacagtccattattgcaattttaacactctgggaccgccaagaattttcctctgctagagagagtatagtcagggccgttgttacgaacctgcacttgcttgatctgcatatgcagctgtggcctatgatttctgaatcattctttttggaatttgttacgaaggtttcgttgtttagaagactgctgcttatggtgagaaacttgagagcagaatcggacaggatgcacgcattagcctgtatctgtcggacagctctctgtgttcacctttttgccagagaaagtgcccgaagaggtcagaagcctctgcctgggacagatattatttctctctttgaagatgcaaggattaaagatgatctcaatagtgttaccagtaagagcttatttcgggaagagctggtggcaatgcttgtggaaagctgcttccagttgtctctacctttgcctgaacaaaaaaactcgggtatggagagcagagtgattggtgcgttagcatatggtactggttatggtgctctgaactggacagaaccagcccttgaggttgtggaagtttgtaggccttgtgtcaaatgggattgtgatggcaggacgtacgctgtagattgctatttgaaattgcttgttaggctgtgccatatctatgatacccgtggaggagtgaagaggctgaaagatggtgcttcccaggatcaaatattaaatgagacacgattgcagaacttgcaacgtgagcttgttaaggatctccaagaggtaaataccccaagaatcctcgggcgtcttatatggacaatcgcagaacatattgatctagaaggtctagatccacttttagctgatgaccccgatgatccattgaatattatcatagcaaacatacataaggttctcttcaacttggatgccgctgctactacatcgaataggctacaagatgttcaggcagtcttattatgcgcccagaggatgggatcgcgtcatgcaagagctggccagttattaaccaaagagcttgaagagtataggaaccatgctgctgcagatacagttagcaaacatcaaacccgtttaatattgcagaggatcaaatatgtttcaaatcttcctgaaagaaagtgggctggagttagtgagacaagaggagattacccgtttagccaccataagcttactgttcagttttacgaaccatcagctgctcaagacaggaaattagaaggtctaattcacaaggccattctcgagctttggaggccaaagcccactgaattaactctcttccttacaaaaggggtcgactcaacttctatcaaggttcctcccacagcatatcctttgaccggaagcagtgatccttgctatatagaagcttaccatttagcagatacaaatgatggaagggtcactttgcacttgaagattattaatttgacagaacttgaactgaatcgtgtggatatacgggttggattatctggtgccctatacttcatggatggctctcctcaagcagtgcggcagttgcgtaatcttgtctcacaggatcctgtacaatgcagtgtcaccgttggtgtgtcccaatttgaaagatgtggtttctgggttcaagtcctctactatccattccgtggtgctaggggagaatatgacggtgactacatagaagaggatccacagatcatgaagcagaagagaggttcaaaagcagaactcggagagcctgtgatcttaagatgtcagccttacaagatcccactgactgagcttcttctaccgcacaaaatctcaccagtcgagttctttcgtttgtggcctagcttgccagctgttgcagagtacactggcacatatatgtatgaaggaagcggcttcatggcgaccgccgcacaacagtatggggcttcaccatttttaagcggactcaaatcattatcctcgaagccattccacagagtctgttcccacattatacgcacagttgctggctttcagctttgttacgctgcaaaaacgtggcatggaggttttgtgggtatgatgatctttggcgctagtgaagtgagcaggaacatggatctgggtgacgagactaccaccatgatgtgcaagtttgtggttagagcatcagaagcatcaatcacaaagcaaatagagtcggatattcagggatggtgtgatgatctaactgacgggggcgttgagtacatgccagaggacgaagtgaaggcaaccgcggccgagaagctgaagatctctatggagaggatagctttgttgaaggcagctcagccgaagaagacttcaaagatagaggaggaatcagaaaacgaagaagaagaagaaggagaagaagaagatgatgatgaagaagtaaaagagaaaaaggagaaagaagagggaaaggacaaggaagagaagaagaaaaaagagaaggaaaaaggaacattttctaagctgacagcagaagaaacagagcacatggcgcttcaggcagcagtgctccaagaatggcacatcttgtgcaaagatagaaaatataccaaagttaactaa

SEQ ID NO: 47724 - protein, 1192 aa, Arabidopsis thaliana
  peptide (1)..(1192): Ceres Seq. ID no. 13647526
  misc_feature (1076)..(1155): Pfam Name: Hsp90 protein Pfam Description: Hsp90 protein
  misc_feature (1073)..(1167): Homolog of NCBI NO: 20089413 NR Description: conserved hypothetical protein
MDILFAQIQADLRSNDALRQSSALLQALQQSAAGRDISVIAKSAVEEIVASPASAVCKKLAFDLIRSTRLTPDLWDTVCSGVKTDLHFPDPDVTAAAVSILAALPAFSLPKLISDCSSEIASCFDSPSDNLRFSITETLGCILARDDLVTLCENNVGLLDKVSNWWARIGQNMLDKSDAVSKVAFESVGRLFQEFDSKRMSRLAGDKLVDSENSLAIRSKWVSSMVDIVWRKRSALMARSLVLPVETFRATVFPLVFAVKAVASGSVEVIRQLSKASSAAAAANATVVDSNAEKLVGVSDLVTHLAPFLASSLDPALIFEVGINMLYLADVAGGKPEWASQSIIAILTLWDRQEFSSARESIVRAVVTNLHLLDLHMQLWPMISESFFLEFVTKVSLFRRLLLMVRNLRAESDRMHALACICRTALCVHLFARESARRGQKPLPGTDIISLFEDARIKDDLNSVTSKSLFREELVAMLVESCFQLSLPLPEQKNSGMESRVIGALAYGTGYGALNWTEPALEVVEVCRPCVKWDCDGRTYAVDCYLKLLVRLCHIYDTRGGVKRLKDGASQDQILNETRLQNLQRELVKDLQEVNTPRILGRLIWTIAEHIDLEGLDPLLADDPDDPLNIIIANIHKVLFNLDAAATTSNRLQDVQAVLLCAQRMGSRHARAGQLLTKELEEYRNHAAADTVSKHQTRLILQRIKYVSNLPERKWAGVSETRGDYPFSHHKLTVQFYEPSAAQDRKLEGLIHKAILELWRPKPTELTLFLTKGVDSTSIKVPPTAYPLTGSSDPCYIEAYHLADTNDGRVTLHLKIINLTELELNRVDIRVGLSGALYFMDGSPQAVRQLRNLVSQDPVQCSVTVGVSQFERCGFWVQVLYYPFRGARGEYDGDYIEEDPQIMKQKRGSKAELGEPVILRCQPYKIPLTELLLPHKISPVEFFRLWPSLPAVAEYTGTYMYEGSGFMATAAQQYGASPFLSGLKSLSSKPFHRVCSHIIRTVAGFQLCYAAKTWHGGFVGMMIFGASEVSRNMDLGDETTTMMCKFVVRASEASITKQIESDIQGWCDDLTDGGVEYMPEDEVKATAAEKLKISMERIALLKAAQPKKTSKIEEESENEEEEEGEEEDDDEEVKEKKEKEEGKDKEEKKKKEKEKGTFSKLTAEETEHMALQAAVLQEWHILCKDRKYTKVN

SEQ ID NO: 47725 - protein, 1020 aa, Arabidopsis thaliana
  peptide (1)..(1020): Ceres Seq. ID no. 13647527
  misc_feature (904)..(983): Pfam Name: Hsp90 protein Pfam Description: Hsp90 protein
  misc_feature (901)..(995): Homolog of NCBI NO: 20089413 NR Description: conserved hypothetical protein
MLDKSDAVSKVAFESVGRLFQEFDSKRMSRLAGDKLVDSENSLAIRSKWVSSMVDIVWRKRSALMARSLVLPVETFRATVFPLVFAVKAVASGSVEVIRQLSKASSAAAAANATVVDSNAEKLVGVSDLVTHLAPFLASSLDPALIFEVGINMLYLADVAGGKPEWASQSIIAILTLWDRQEFSSARESIVRAVVTNLHLLDLHMQLWPMISESFFLEFVTKVSLFRRLLLMVRNLRAESDRMHALACICRTALCVHLFARESARRGQKPLPGTDIISLFEDARIKDDLNSVTSKSLFREELVAMLVESCFQLSLPLPEQKNSGMESRVIGALAYGTGYGALNWTEPALEVVEVCRPCVKWDCDGRTYAVDCYLKLLVRLCHIYDTRGGVKRLKDGASQDQILNETRLQNLQRELVKDLQEVNTPRILGRLIWTIAEHIDLEGLDPLLADDPDDPLNIIIANIHKVLFNLDAAATTSNRLQDVQAVLLCAQRMGSRHARAGQLLTKELEEYRNHAAADTVSKHQTRLILQRIKYVSNLPERKWAGVSETRGDYPFSHHKLTVQFYEPSAAQDRKLEGLIHKAILELWRPKPTELTLFLTKGVDSTSIKVPPTAYPLTGSSDPCYIEAYHLADTNDGRVTLHLKIINLTELELNRVDIRVGLSGALYFMDGSPQAVRQLRNLVSQDPVQCSVTVGVSQFERCGFWVQVLYYPFRGARGEYDGDYIEEDPQIMKQKRGSKAELGEPVILRCQPYKIPLTELLLPHKISPVEFFRLWPSLPAVAEYTGTYMYEGSGFMATAAQQYGASPFLSGLKSLSSKPFHRVCSHIIRTVAGFQLCYAAKTWHGGFVGMMIFGASEVSRNMDLGDETTTMMCKFVVRASEASITKQIESDIQGWCDDLTDGGVEYMPEDEVKATAAEKLKISMERIALLKAAQPKKTSKIEEESENEEEEEGEEEDDDEEVKEKKEKEEGKDKEEKKKKEKEKGTFSKLTAEETEHMALQAAVLQEWHILCKDRKYTKVN

SEQ ID NO: 47726 - protein, 993 aa, Arabidopsis thaliana
  peptide (1)..(993): Ceres Seq. ID no. 13647528
  misc_feature (877)..(956): Pfam Name: Hsp90 protein Pfam Description: Hsp90 protein
  misc_feature (874)..(968): Homolog of NCBI NO: 20089413 NR Description: conserved hypothetical protein
MSRLAGDKLVDSENSLAIRSKWVSSMVDIVWRKRSALMARSLVLPVETFRATVFPLVFAVKAVASGSVEVIRQLSKASSAAAAANATVVDSNAEKLVGVSDLVTHLAPFLASSLDPALIFEVGINMLYLADVAGGKPEWASQSIIAILTLWDRQEFSSARESIVRAVVTNLHLLDLHMQLWPMISESFFLEFVTKVSLFRRLLLMVRNLRAESDRMHALACICRTALCVHLFARESARRGQKPLPGTDIISLFEDARIKDDLNSVTSKSLFREELVAMLVESCFQLSLPLPEQKNSGMESRVIGALAYGTGYGALNWTEPALEVVEVCRPCVKWDCDGRTYAVDCYLKLLVRLCHIYDTRGGVKRLKDGASQDQILNETRLQNLQRELVKDLQEVNTPRILGRLIWTIAEHIDLEGLDPLLADDPDDPLNIIIANIHKVLFNLDAAATTSNRLQDVQAVLLCAQRMGSRHARAGQLLTKELEEYRNHAAADTVSKHQTRLILQRIKYVSNLPERKWAGVSETRGDYPFSHHKLTVQFYEPSAAQDRKLEGLIHKAILELWRPKPTELTLFLTKGVDSTSIKVPPTAYPLTGSSDPCYIEAYHLADTNDGRVTLHLKIINLTELELNRVDIRVGLSGALYFMDGSPQAVRQLRNLVSQDPVQCSVTVGVSQFERCGFWVQVLYYPFRGARGEYDGDYIEEDPQIMKQKRGSKAELGEPVILRCQPYKIPLTELLLPHKISPVEFFRLWPSLPAVAEYTGTYMYEGSGFMATAAQQYGASPFLSGLKSLSSKPFHRVCSHIIRTVAGFQLCYAAKTWHGGFVGMMIFGASEVSRNMDLGDETTTMMCKFVVRASEASITKQIESDIQGWCDDLTDGGVEYMPEDEVKATAAEKLKISMERIALLKAAQPKKTSKIEEESENEEEEEGEEEDDDEEVKEKKEKEEGKDKEEKKKKEKEKGTFSKLTAEETEHMALQAAVLQEWHILCKDRKYTKVN

SEQ ID NO: 47727 - DNA, 2943 bp, Arabidopsis thaliana
  misc_feature (1)..(2943): Ceres Seq. ID no. 13647533
  misc_feature: MA Experiment ID: 20000286 Result: Up-regulated in Transcription
  misc_feature: MA Experiment 20000286 PARAMETER Experiment Name: At_Open_Flower_P Parameter: Age (day) Value: 21
  misc_feature: MA Experiment 20000286 PARAMETER Experiment Name: At_Open_Flower_P Parameter: Plant Line Value: WS
  misc_feature: MA Experiment 20000286 PARAMETER Experiment Name: At_Open_Flower_P Parameter: Tissue Value: Half Open vs. Whole Plant
  misc_feature: MA Experiment ID: 20000438 Result: Up-regulated in Transcription
  misc_feature: MA Experiment 20000438 PARAMETER Experiment Name: At_Shoots__P Parameter: Age (day) Value: 14
  misc_feature: MA Experiment 20000438 PARAMETER Experiment Name: At_Shoots__P Parameter: Tissue Value: Shoots vs. Whole Plant
atggcgtctatagacaatgttttctcactcggtactcggttctcaatcccagaaaaccccaagagatcgatattgaaacacgcgactacatcgagtttctccgcgagaactcaaactcgatggagagctccaattctgcgtcggtcgtttacagttttgtgcgaattgaaaactgggtcatctagctccggcgagacgaacaattcccctgctgctgacgatttcgtaactagggttttgaaggagaatcctagccaagtggaacctcgttaccgagttggtgataagctgtataatctgaaggagagagaagatttaagcaaaggcaccaatgcggcgacgggtgcgtttgaatttatcaaaaggaagtttgattcgaagaagaaaacagagacagacaaaagcgaagagtctgtttatttgagtgatattttgagggagtacaaaggaaagctttatgttccggagcaagtttttgggccagagttatctgaagaagaggagtttgagaaaaatgtgaaagatttaccaaagatgagtttggaagattttagaaaagctatggagaatgataaagttaagctgcttacatcgaaggaagtttctggtgtttcttatacgagtggctatagaggttttattgttgatcttaaggagattcctggagtcaagagcttacagagaaccaaatggtcaatgaagcttgaagttggagaagctcaagctcttctgaaagaatacacgggtccgcagtacgaaattgaaaggcacatgacgtcttgggttggaaaagtggcggacttcccaaaccctgttgcgtcttctatttcaagtagagtgatggttgagctgggaatggtgacagcagttattgctgcagccgcagttgttgttggaggattcttagcctcagctgtttttgcagtcactagtttcgcctttgtcactacagtatatgttgtttggcctatagcaaagccattcctcaaactttttgttggcgtcttccttggtgttcttgaaaaatcatgggattacattgttgatgttctcgccgatgggggcatcttctcaaggatttctgatttctatacatttggtggtgtagcatcaagtctggagatgctcaaaccaatcctacttgttgtcatgactatggttcttcttgttcgtttcacactgtcacggagaccaaagaactttaggaaatgggatttatggcaagggattgctttttctcagtctaaagcagaagctcgtgttgatggttcaaccggtgttaaattcgctgatgttgcagggattgatgaagcagttgatgaacttcaagagcttgtaaagtacttgaagaatcccgacctgtttgataaaatgggaattaaacctccccatggagttcttctggagggtccccctggttgtggcaagacactcgttgcaaaagccattgcgggggaagctggtgtaccgttctaccaaatggcaggatctgaattcgtcgaagttcttgttggagttgggtcagctcgtatcagagatctgtttaaaagagctaaggtaaacaagccatccgttattttcatcgatgaaattgatgccttagcaactcgacgtcaagggattttcaaggaaaactcagaccagttgtacaatgcggccacacaagaaagagaaaccacattgaaccagctactcatcgagcttgatggttttgacacaggcaaaggtgtgattttcttgggtgccaccaatcgcagagatttgttagaccctgctcttctacgtccaggtcgatttgatcgaaagataagagtccgtccccctaatgcgaaagggagattggatattctgaagattcatgccagcaaagtcaagatgtcggattctgttgacttatcatcttatgcaagtaacttaccaggatggtccggagcaaaactggcacagttggttcaagaggctgctcttgtagctgtcaggaaaacgcataactcgattcttcaatcagacatggacgacgctgtggaccgactcactgttggtccgacacgtattggtttagaattgggacatcaaggtcagtgtcgtagagccacaactgaagtcggagtggcaatcacttcacatcttttattgcggtatgagaatgcaaagattgagcggtgcgatcgcgtttctatcattcctcgtggtcagacactgtctcaagttgtgtttcatcggcttgatgatgagtcctacatgtttggtcgtcttccacaactgcttcatcgtcttcaggtcttgctcggaggaagagctgcagaagaagtgatctacggttcagatacttcaaaggcatcagtcgattatctctctgacgcctcatggctagctcgtaaaatcttaaccatatggaacctggagaacccaatggtgatacatggcgaaccaccaccatggagaaagagacctcagttcgtgggaccacgcttagactttgaaggatctctctatgacgactatgacctcgtcgagccgccagttaacttcaacatggatgatgaagtcgcacatagaagcgaagaactcattagccagatgtataacaaaacagtttctctcctcaggcaaaaccaaaccgctctcctcaaaaccgttaaggttctattgaaccagaaagagataagtggagaagcaatagacttcatacttgaccattaccctcctcagactccgttaaattctctcttacaagagcaaaatccgggaagtcttccttttgtccctgaacatctccggcgtgaatccggcgactttgtccttgttaatcactctaccgacgtcaatgctcaagtatgattccggcgtcccagagacatcaaatcactaagcttaggtttattcattgtccgtcattgtaacttcgactcaatctctgaagtttcggacagttaaatttac

SEQ ID NO: 47728 - protein, 946 aa, Arabidopsis thaliana
  peptide (1)..(946): Ceres Seq. ID no. 13647534
  misc_feature (666)..(897): Pfam Name: Peptidase family M41 Pfam Description: Peptidase family M41
  misc_feature (347)..(803): Homolog of NCBI NO: 15606261 NR Description: cell division protein FtsH [Aquifex aeolicus]
  misc_feature (381)..(803): Homolog of NCBI NO: 16331432 NR Description: cell division protein; FtsH [Synechocystis sp.
  misc_feature (371)..(797): Homolog of NCBI NO: 16329797 NR Description: cell division protein; FtsH [Synechocystis sp.
  misc_feature (408)..(805): Homolog of NCBI NO: 39996908 NR Description: cell division protein FtsH [Geobacter
  misc_feature (408)..(805): Homolog of NCBI NO: 23056302 NR Description: hypothetical protein [Geobacter metallireducens]
  misc_feature (347)..(797): Homolog of NCBI NO: 23126986 NR Description: hypothetical protein [Nostoc punctiforme]
  misc_feature (381)..(803): Homolog of NCBI NO: 23123765 NR Description: hypothetical protein [Nostoc punctiforme]
  misc_feature (408)..(801): Homolog of NCBI NO: 37522710 NR Description: cell division protein [Gloeobacter violaceus]
  misc_feature (381)..(803): Homolog of NCBI NO: 17231134 NR Description: cell division protein [Nostoc sp. PCC 7120]
  misc_feature (366)..(797): Homolog of NCBI NO: 37522147 NR Description: cell division protein [Gloeobacter violaceus]
MASIDNVFSLGTRFSIPENPKRSILKHATTSSFSARTQTRWRAPILRRSFTVLCELKTGSSSSGETNNSPAADDFVTRVLKENPSQVEPRYRVGDKLYNLKEREDLSKGTNAATGAFEFIKRKFDSKKKTETDKSEESVYLSDILREYKGKLYVPEQVFGPELSEEEEFEKNVKDLPKMSLEDFRKAMENDKVKLLTSKEVSGVSYTSGYRGFIVDLKEIPGVKSLQRTKWSMKLEVGEAQALLKEYTGPQYEIERHMTSWVGKVADFPNPVASSISSRVMVELGMVTAVIAAAAVVVGGFLASAVFAVTSFAFVTTVYVVWPIAKPFLKLFVGVFLGVLEKSWDYIVDVLADGGIFSRISDFYTFGGVASSLEMLKPILLVVMTMVLLVRFTLSRRPKNFRKWDLWQGIAFSQSKAEARVDGSTGVKFADVAGIDEAVDELQELVKYLKNPDLFDKMGIKPPHGVLLEGPPGCGKTLVAKAIAGEAGVPFYQMAGSEFVEVLVGVGSARIRDLFKRAKVNKPSVIFIDEIDALATRRQGIFKENSDQLYNAATQERETTLNQLLIELDGFDTGKGVIFLGATNRRDLLDPALLRPGRFDRKIRVRPPNAKGRLDILKIHASKVKMSDSVDLSSYASNLPGWSGAKLAQLVQEAALVAVRKTHNSILQSDMDDAVDRLTVGPTRIGLELGHQGQCRRATTEVGVAITSHLLLRYENAKIERCDRVSIIPRGQTLSQVVFHRLDDESYMFGRLPQLLHRLQVLLGGRAAEEVIYGSDTSKASVDYLSDASWLARKILTIWNLENPMVIHGEPPPWRKRPQFVGPRLDFEGSLYDDYDLVEPPVNFNMDDEVAHRSEELISQMYNKTVSLLRQNQTALLKTVKVLLNQKEISGEAIDFILDHYPPQTPLNSLLQEQNPGSLPFVPEHLRRESGDFVLVNHSTDVNAQV

SEQ ID NO: 47729 - protein, 768 aa, Arabidopsis thaliana
  peptide (1)..(768): Ceres Seq. ID no. 13647535
  misc_feature (488)..(719): Pfam Name: Peptidase family M41 Pfam Description: Peptidase family M41
  misc_feature (169)..(625): Homolog of NCBI NO: 15606261 NR Description: cell division protein FtsH [Aquifex aeolicus]
  misc_feature (203)..(625): Homolog of NCBI NO: 16331432 NR Description: cell division protein; FtsH [Synechocystis sp.
  misc_feature (193)..(619): Homolog of NCBI NO: 16329797 NR Description: cell division protein; FtsH [Synechocystis sp.
  misc_feature (230)..(627): Homolog of NCBI NO: 39996908 NR Description: cell division protein FtsH [Geobacter
  misc_feature (230)..(627): Homolog of NCBI NO: 23056302 NR Description: hypothetical protein [Geobacter metallireducens]
  misc_feature (169)..(619): Homolog of NCBI NO: 23126986 NR Description: hypothetical protein [Nostoc punctiforme]
  misc_feature (203)..(625): Homolog of NCBI NO: 23123765 NR Description: hypothetical protein [Nostoc punctiforme]
  misc_feature (230)..(623): Homolog of NCBI NO: 37522710 NR Description: cell division protein [Gloeobacter violaceus]
  misc_feature (203)..(625): Homolog of NCBI NO: 17231134 NR Description: cell division protein [Nostoc sp. PCC 7120]
  misc_feature (188)..(619): Homolog of NCBI NO: 37522147 NR Description: cell division protein [Gloeobacter violaceus]
MSLEDFRKAMENDKVKLLTSKEVSGVSYTSGYRGFIVDLKEIPGVKSLQRTKWSMKLEVGEAQALLKEYTGPQYEIERHMTSWVGKVADFPNPVASSISSRVMVELGMVTAVIAAAAVVVGGFLASAVFAVTSFAFVTTVYVVWPIAKPFLKLFVGVFLGVLEKSWDYIVDVLADGGIFSRISDFYTFGGVASSLEMLKPILLVVMTMVLLVRFTLSRRPKNFRKWDLWQGIAFSQSKAEARVDGSTGVKFADVAGIDEAVDELQELVKYLKNPDLFDKMGIKPPHGVLLEGPPGCGKTLVAKAIAGEAGVPFYQMAGSEFVEVLVGVGSARIRDLFKRAKVNKPSVIFIDEIDALATRRQGIFKENSDQLYNAATQERETTLNQLLIELDGFDTGKGVIFLGATNRRDLLDPALLRPGRFDRKIRVRPPNAKGRLDILKIHASKVKMSDSVDLSSYASNLPGWSGAKLAQLVQEAALVAVRKTHNSILQSDMDDAVDRLTVGPTRIGLELGHQGQCRRATTEVGVAITSHLLLRYENAKIERCDRVSIIPRGQTLSQVVFHRLDDESYMFGRLPQLLHRLQVLLGGRAAEEVIYGSDTSKASVDYLSDASWLARKILTIWNLENPMVIHGEPPPWRKRPQFVGPRLDFEGSLYDDYDLVEPPVNFNMDDEVAHRSEELISQMYNKTVSLLRQNQTALLKTVKVLLNQKEISGEAIDFILDHYPPQTPLNSLLQEQNPGSLPFVPEHLRRESGDFVLVNHSTDVNAQV

SEQ ID NO: 47730 - protein, 759 aa, Arabidopsis thaliana
  peptide (1)..(759): Ceres Seq. ID no. 13647536
  misc_feature (479)..(710): Pfam Name: Peptidase family M41 Pfam Description: Peptidase family M41
  misc_feature (160)..(616): Homolog of NCBI NO: 15606261 NR Description: cell division protein FtsH [Aquifex aeolicus]
  misc_feature (194)..(616): Homolog of NCBI NO: 16331432 NR Description: cell division protein; FtsH [Synechocystis sp.
  misc_feature (184)..(610): Homolog of NCBI NO: 16329797 NR Description: cell division protein; FtsH [Synechocystis sp.
  misc_feature (221)..(618): Homolog of NCBI NO: 39996908 NR Description: cell division protein FtsH [Geobacter
  misc_feature (221)..(618): Homolog of NCBI NO: 23056302 NR Description: hypothetical protein [Geobacter metallireducens]
  misc_feature (160)..(610): Homolog of NCBI NO: 23126986 NR Description: hypothetical protein [Nostoc punctiforme]
  misc_feature (194)..(616): Homolog of NCBI NO: 23123765 NR Description: hypothetical protein [Nostoc punctiforme]
  misc_feature (221)..(614): Homolog of NCBI NO: 37522710 NR Description: cell division protein [Gloeobacter violaceus]
  misc_feature (194)..(616): Homolog of NCBI NO: 17231134 NR Description: cell division protein [Nostoc sp. PCC 7120]
  misc_feature (179)..(610): Homolog of NCBI NO: 37522147 NR Description: cell division protein [Gloeobacter violaceus]
MENDKVKLLTSKEVSGVSYTSGYRGFIVDLKEIPGVKSLQRTKWSMKLEVGEAQALLKEYTGPQYEIERHMTSWVGKVADFPNPVASSISSRVMVELGMVTAVIAAAAVVVGGFLASAVFAVTSFAFVTTVYVVWPIAKPFLKLFVGVFLGVLEKSWDYIVDVLADGGIFSRISDFYTFGGVASSLEMLKPILLVVMTMVLLVRFTLSRRPKNFRKWDLWQGIAFSQSKAEARVDGSTGVKFADVAGIDEAVDELQELVKYLKNPDLFDKMGIKPPHGVLLEGPPGCGKTLVAKAIAGEAGVPFYQMAGSEFVEVLVGVGSARIRDLFKRAKVNKPSVIFIDEIDALATRRQGIFKENSDQLYNAATQERETTLNQLLIELDGFDTGKGVIFLGATNRRDLLDPALLRPGRFDRKIRVRPPNAKGRLDILKIHASKVKMSDSVDLSSYASNLPGWSGAKLAQLVQEAALVAVRKTHNSILQSDMDDAVDRLTVGPTRIGLELGHQGQCRRATTEVGVAITSHLLLRYENAKIERCDRVSIIPRGQTLSQVVFHRLDDESYMFGRLPQLLHRLQVLLGGRAAEEVIYGSDTSKASVDYLSDASWLARKILTIWNLENPMVIHGEPPPWRKRPQFVGPRLDFEGSLYDDYDLVEPPVNFNMDDEVAHRSEELISQMYNKTVSLLRQNQTALLKTVKVLLNQKEISGEAIDFILDHYPPQTPLNSLLQEQNPGSLPFVPEHLRRESGDFVLVNHSTDVNAQV

SEQ ID NO: 47731 - DNA, 3324 bp, Arabidopsis thaliana
  misc_feature (1)..(3324): Ceres Seq. ID no. 13647541
  misc_feature: MA Experiment ID: 20000171 Result: Up-regulated in Transcription
  misc_feature: MA Experiment 20000171 PARAMETER Experiment Name: At_42deg_Heat_P Parameter: Age (day) Value: 14
  misc_feature: MA Experiment 20000171 PARAMETER Experiment Name: At_42deg_Heat_P Parameter: Organism Value: A. thaliana
  misc_feature: MA Experiment 20000171 PARAMETER Experiment Name: At_42deg_Heat_P Parameter: Plant Line Value: WS
  misc_feature: MA Experiment 20000171 PARAMETER Experiment Name: At_42deg_Heat_P Parameter: Temperature (deg C) Value: 42 vs. 22
  misc_feature: MA Experiment 20000171 PARAMETER Experiment Name: At_42deg_Heat_P Parameter: Timepoint (hr) Value: 1
  misc_feature: MA Experiment 20000171 PARAMETER Experiment Name: At_42deg_Heat_P Parameter: Tissue Value: Aerial
  misc_feature: MA Experiment ID: 20001451 Result: Down-regulated in Transcription
  misc_feature: MA Experiment 20001451 PARAMETER Experiment Name: At_Far-red-induction_P Parameter: Age (day) Value: 7
  misc_feature: MA Experiment 20001451 PARAMETER Experiment Name: At_Far-red-induction_P Parameter: Light Value: Far-red vs. White
  misc_feature: MA Experiment 20001451 PARAMETER Experiment Name: At_Far-red-induction_P Parameter: Organism Value: A. thaliana
  misc_feature: MA Experiment 20001451 PARAMETER Experiment Name: At_Far-red-induction_P Parameter: Plant Line Value: Columbia
  misc_feature: MA Experiment 20001451 PARAMETER Experiment Name: At_Far-red-induction_P Parameter: Timepoint (hr) Value: 24
  misc_feature: MA Experiment 20001451 PARAMETER Experiment Name: At_Far-red-induction_P Parameter: Tissue Value: Whole Plant
  misc_feature: MA Experiment ID: 20001558 Result: Up-regulated in Transcription
  misc_feature: MA Experiment 20001558 PARAMETER Experiment Name: At_Drought_Soil_Dry_P Parameter: Age (day) Value: 27
  misc_feature: MA Experiment 20001558 PARAMETER Experiment Name: At_Drought_Soil_Dry_P Parameter: Organism Value: A. thaliana
  misc_feature: MA Experiment 20001558 PARAMETER Experiment Name: At_Drought_Soil_Dry_P Parameter: Plant Line Value: WS
  misc_feature: MA Experiment 20001558 PARAMETER Experiment Name: At_Drought_Soil_Dry_P Parameter: Post Timepoint (hr) Value: 6
  misc_feature: MA Experiment 20001558 PARAMETER Experiment Name: At_Drought_Soil_Dry_P Parameter: Post-Treatment Value: Re-Water vs. No Drought
  misc_feature: MA Experiment 20001558 PARAMETER Experiment Name: At_Drought_Soil_Dry_P Parameter: Timepoint (day) Value: 13
  misc_feature: MA Experiment 20001558 PARAMETER Experiment Name: At_Drought_Soil_Dry_P Parameter: Treatment Value: Drought vs. No Drought
atggcggctcttctctatttccctaaaatctcttcgcaaatgacttcctcacatttcatctctttctcaccaatggatttgaggagactttctcgcgcaagctacttattcactcgccgcttgaaattcatagcgaaatctcgaaaatgctttcatacaagccgatacctgcaacagtgtgttcatcggccggataaatcggaagagacttcctctgatcggcatttacacgaacgattatcttcagttttgtcgaagagatctctagattacgagcagtgtaaacaactgataactgttctatcgcctctcgaattcgataggttgtttcctgagtttcgatccaaagttaatcccaagacggctttggatttcttccgattagcttctgattcgtttagtttctcctttagtctccgttcttattgtttattgataggtttattgcttgatgcgaatctgttatcggctgctagggtagttttgattcgtttgatcaatgggaatgtaccggttttgccttgtggtttgagagatagtcgagttgcgattgcggatgcaatggcgagtttgagtttgtgttttgatgaagaaatcagaaggaaaatgtcggatttgttgattgaagtttattgcacacagttcaagcgtgatggttgttatttagctcttgatgtatttcctgttcttgcaaacaagggtatgtttccttctaagacgacttgcaacattttgttgacttctctagtgagagctaatgagtttcagaagtgttgtgaagcttttgatgttgtttgcaaaggggtttctccggatgtttacttgttcactacagcgattaatgcgttttgcaagggaggtaaagttgaggaggccgttaagttgttctcaaaaatggaagaagcgggtgttgcaccaaacgttgtcacttttaatactgttattgatggacttgggatgtgtggaaggtatgatgaggcgtttatgtttaaagaaaagatggtagaaagaggcatggaaccaactcttatcacttatagtattcttgtcaagggtttgaccagggctaagaggattggtgatgcttattttgtcttgaaggaaatgacaaagaaagggtttcctcctaatgttattgtatataataatttgattgatagtttcatcgaggctggaagtttgaacaaagctattgagataaaggatctcatggtttcgaaagggttgtctctcacatcgtcgacgtataatactctcataaagggatactgcaagaacggtcaagcagataatgcggagcgtctcctgaaggaaatgctgtcgattggttttaatgtaaatcagggctcctttacatctgtgatttgcttgttgtgcagtcatcttatgtttgactcagcacttcgttttgttggagagatgctattacgcaacatgagtcctggtggtggattacttactacattgatttctggtctctgtaagcatgggaaacactcaaaggcactagaactttggtttcaatttctaaataaaggttttgtagtggacacgaggacttcaaatgctttacttcatggactctgtgaagcagggaagctggatgaagcttttaggattcaaaaggagatattagggcgtggctgtgttatggatagagtttcctataacacgttgatttctggatgttgcggaaagaagaaactagatgaagcttttatgttcttggatgaaatggttaagagaggacttaagcctgacaattatacttatagcatattgatttgcgggctgtttaatatgaataaagttgaggaggccatacagttttgggatgattgtaaacggaatggcatgcttccagatgtttatacatattcggtgatgatagatggatgttgtaaagctgaaagaacagaagagggtcaggaattttttgatgagatgatgagcaaaaacgtgcagccaaatactgttgtttacaatcatcttatcagagcatactgtagaagcggaaggctatcgatggccttggaactccgtgaagatatgaaacacaaaggaatttcacctaattctgctacatacacttcactaataaaggggatgtcaatcattagccgtgttgaggaggcaaaactcctcttcgaggagatgaggatggagggtttggaaccgaatgtctttcattatacagcacttattgatggatatggtaaattgggtcagatggtcaaagttgaatgtcttctgcgtgagatgcattcaaagaacgtacacccaaataagattacctacactgtgatgattggtgggtatgctagagatgggaatgtaacggaagcttctaggcttctaaatgagatgagggaaaaaggaattgttccggatagtatcacatacaaagaatttatatacggatatcttaagcagggaggtgtgttggaagcttttaaaggttctgatgaagaaaattatgcagcaatcattgaaggatggaacaaactcattcagtaactgatgaataagaagaagaacagttggaaattgaaatctagtagccatctcagttttgattcacgccggggatctacgtcttcttcttagaggagcacgttaggatggagttacttggtaaatgatgcatatggttcattgcatcttacaagtagggtagtgtgttctacttgattctccagcccattcagttaacagctttggcctgcttcaatcttaatgagaaaagttgtttcttttagcatcaaaggctatatgggtttatgatttacaaatccacattactggtactcgtcaggtttaggattgagtgccacagaatcaaaggcatatgatagattctggatcagagcaggtacttcagacagcagtcctgaaaagattatacagatttagacacacatcatggatagtcaattaaaagtttacacatggatattcatgggagctatgagaatggatcaataggaggctcctcggtttacaggtcacataaatagagcttaagcgaattctcatcggagtagtttagaactaattcatgcctgacacatcgctggggagaatttcctcagccgtgcagaattttttgcccaaggagattaatggactgatttgaaaggtaacagtttacaacggtatcaactaattcgacaacattcaccttagagtatagactttcagtggggtgaatactgtttattcatcttgtttacgattctttaaatttgttaattctcttaaagaggtggaaaaagtgttttagatgtacgtagaaagaaagaaggaaaacaagaataaaatttg

SEQ ID NO: 47732 - protein, 838 aa, Arabidopsis thaliana
  peptide (1)..(838): Ceres Seq. ID no. 15218682
  misc_feature (589)..(623): Pfam Name: PPR repeat Pfam Description: PPR repeat
  misc_feature (288)..(823): Homolog of NCBI NO: 15228763 NR Description: pentatricopeptide (PPR) repeat-containing protein
  misc_feature (288)..(823): Homolog of NCBI NO: 11994279 NR Description: gb|AAD43616.1~gene_id:F16J14.3~strong similarity
  misc_feature (276)..(824): Homolog of NCBI NO: 15238505 NR Description: pentatricopeptide (PPR) repeat-containing protein
  misc_feature (157)..(815): Homolog of NCBI NO: 34394343 NR Description: putative fertility restorer homologue
  misc_feature (206)..(754): Homolog of NCBI NO: 32527604 NR Description: pentatricopeptide repeat-containing protein
  misc_feature (206)..(754): Homolog of NCBI NO: 32452381 NR Description: fertility restorer homologue A [Raphanus sativus]
  misc_feature (223)..(807): Homolog of NCBI NO: 30840221 NR Description: fertility restorer [Raphanus sativus]
  misc_feature (223)..(807): Homolog of NCBI NO: 30840327 NR Description: fertility restorer homologue [Raphanus sativus]
  misc_feature (80)..(838): Homolog of NCBI NO: 34394343 NR Description: putative fertility restorer homologue
  misc_feature (141)..(805): Homolog of NCBI NO: 38175588 NR Description: pentatricopeptide (PPR) repeat-containing
MAALLYFPKISSQMTSSHFISFSPMDLRRLSRASYLFTRRLKFIAKSRKCFHTSRYLQQCVHRPDKSEETSSDRHLHERLSSVLSKRSLDYEQCKQLITVLSPLEFDRLFPEFRSKVNPKTALDFFRLASDSFSFSFSLRSYCLLIGLLLDANLLSAARVVLIRLINGNVPVLPCGLRDSRVAIADAMASLSLCFDEEIRRKMSDLLIEVYCTQFKRDGCYLALDVFPVLANKGMFPSKTTCNILLTSLVRANEFQKCCEAFDVVCKGVSPDVYLFTTAINAFCKGGKVEEAVKLFSKMEEAGVAPNVVTFNTVIDGLGMCGRYDEAFMFKEKMVERGMEPTLITYSILVKGLTRAKRIGDAYFVLKEMTKKGFPPNVIVYNNLIDSFIEAGSLNKAIEIKDLMVSKGLSLTSSTYNTLIKGYCKNGQADNAERLLKEMLSIGFNVNQGSFTSVICLLCSHLMFDSALRFVGEMLLRNMSPGGGLLTTLISGLCKHGKHSKALELWFQFLNKGFVVDTRTSNALLHGLCEAGKLDEAFRIQKEILGRGCVMDRVSYNTLISGCCGKKKLDEAFMFLDEMVKRGLKPDNYTYSILICGLFNMNKVEEAIQFWDDCKRNGMLPDVYTYSVMIDGCCKAERTEEGQEFFDEMMSKNVQPNTVVYNHLIRAYCRSGRLSMALELREDMKHKGISPNSATYTSLIKGMSIISRVEEAKLLFEEMRMEGLEPNVFHYTALIDGYGKLGQMVKVECLLREMHSKNVHPNKITYTVMIGGYARDGNVTEASRLLNEMREKGIVPDSITYKEFIYGYLKQGGVLEAFKGSDEENYAAIIEGWNKLIQ

SEQ ID NO: 47733 - protein, 825 aa, Arabidopsis thaliana
  peptide (1)..(825): Ceres Seq. ID no. 15218683
  misc_feature (576)..(610): Pfam Name: PPR repeat Pfam Description: PPR repeat
  misc_feature (275)..(810): Homolog of NCBI NO: 15228763 NR Description: pentatricopeptide (PPR) repeat-containing protein
  misc_feature (275)..(810): Homolog of NCBI NO: 11994279 NR Description: gb|AAD43616.1~gene_id:F16J14.3~strong similarity
  misc_feature (263)..(811): Homolog of NCBI NO: 15238505 NR Description: pentatricopeptide (PPR) repeat-containing protein
  misc_feature (144)..(802): Homolog of NCBI NO: 34394343 NR Description: putative fertility restorer homologue
  misc_feature (193)..(741): Homolog of NCBI NO: 32527604 NR Description: pentatricopeptide repeat-containing protein
  misc_feature (193)..(741): Homolog of NCBI NO: 32452381 NR Description: fertility restorer homologue A [Raphanus sativus]
  misc_feature (210)..(794): Homolog of NCBI NO: 30840221 NR Description: fertility restorer [Raphanus sativus]
  misc_feature (210)..(794): Homolog of NCBI NO: 30840327 NR Description: fertility restorer homologue [Raphanus sativus]
  misc_feature (67)..(825): Homolog of NCBI NO: 34394343 NR Description: putative fertility restorer homologue
  misc_feature (128)..(792): Homolog of NCBI NO: 38175588 NR Description: pentatricopeptide (PPR) repeat-containing
MTSSHFISFSPMDLRRLSRASYLFTRRLKFIAKSRKCFHTSRYLQQCVHRPDKSEETSSDRHLHERLSSVLSKRSLDYEQCKQLITVLSPLEFDRLFPEFRSKVNPKTALDFFRLASDSFSFSFSLRSYCLLIGLLLDANLLSAARVVLIRLINGNVPVLPCGLRDSRVAIADAMASLSLCFDEEIRRKMSDLLIEVYCTQFKRDGCYLALDVFPVLANKGMFPSKTTCNILLTSLVRANEFQKCCEAFDVVCKGVSPDVYLFTTAINAFCKGGKVEEAVKLFSKMEEAGVAPNVVTFNTVIDGLGMCGRYDEAFMFKEKMVERGMEPTLITYSILVKGLTRAKRIGDAYFVLKEMTKKGFPPNVIVYNNLIDSFIEAGSLNKAIEIKDLMVSKGLSLTSSTYNTLIKGYCKNGQADNAERLLKEMLSIGFNVNQGSFTSVICLLCSHLMFDSALRFVGEMLLRNMSPGGGLLTTLISGLCKHGKHSKALELWFQFLNKGFVVDTRTSNALLHGLCEAGKLDEAFRIQKEILGRGCVMDRVSYNTLISGCCGKKKLDEAFMFLDEMVKRGLKPDNYTYSILICGLFNMNKVEEAIQFWDDCKRNGMLPDVYTYSVMIDGCCKAERTEEGQEFFDEMMSKNVQPNTVVYNHLIRAYCRSGRLSMALELREDMKHKGISPNSATYTSLIKGMSIISRVEEAKLLFEEMRMEGLEPNVFHYTALIDGYGKLGQMVKVECLLREMHSKNVHPNKITYTVMIGGYARDGNVTEASRLLNEMREKGIVPDSITYKEFIYGYLKQGGVLEAFKGSDEENYAAIIEGWNKLIQ

SEQ ID NO: 47734 - protein, 814 aa, Arabidopsis thaliana
  peptide (1)..(814): Ceres Seq. ID no. 15218684
  misc_feature (565)..(599): Pfam Name: PPR repeat Pfam Description: PPR repeat
  misc_feature (264)..(799): Homolog of NCBI NO: 15228763 NR Description: pentatricopeptide (PPR) repeat-containing protein
  misc_feature (264)..(799): Homolog of NCBI NO: 11994279 NR Description: gb|AAD43616.1~gene_id:F16J14.3~strong similarity
  misc_feature (252)..(800): Homolog of NCBI NO: 15238505 NR Description: pentatricopeptide (PPR) repeat-containing protein
  misc_feature (133)..(791): Homolog of NCBI NO: 34394343 NR Description: putative fertility restorer homologue
  misc_feature (182)..(730): Homolog of NCBI NO: 32527604 NR Description: pentatricopeptide repeat-containing protein
  misc_feature (182)..(730): Homolog of NCBI NO: 32452381 NR Description: fertility restorer homologue A [Raphanus sativus]
  misc_feature (199)..(783): Homolog of NCBI NO: 30840221 NR Description: fertility restorer [Raphanus sativus]
  misc_feature (199)..(783): Homolog of NCBI NO: 30840327 NR Description: fertility restorer homologue [Raphanus sativus]
  misc_feature (56)..(814): Homolog of NCBI NO: 34394343 NR Description: putative fertility restorer homologue
  misc_feature (117)..(781): Homolog of NCBI NO: 38175588 NR Description: pentatricopeptide (PPR) repeat-containing
MDLRRLSRASYLFTRRLKFIAKSRKCFHTSRYLQQCVHRPDKSEETSSDRHLHERLSSVLSKRSLDYEQCKQLITVLSPLEFDRLFPEFRSKVNPKTALDFFRLASDSFSFSFSLRSYCLLIGLLLDANLLSAARVVLIRLINGNVPVLPCGLRDSRVAIADAMASLSLCFDEEIRRKMSDLLIEVYCTQFKRDGCYLALDVFPVLANKGMFPSKTTCNILLTSLVRANEFQKCCEAFDVVCKGVSPDVYLFTTAINAFCKGGKVEEAVKLFSKMEEAGVAPNVVTFNTVIDGLGMCGRYDEAFMFKEKMVERGMEPTLITYSILVKGLTRAKRIGDAYFVLKEMTKKGFPPNVIVYNNLIDSFIEAGSLNKAIEIKDLMVSKGLSLTSSTYNTLIKGYCKNGQADNAERLLKEMLSIGFNVNQGSFTSVICLLCSHLMFDSALRFVGEMLLRNMSPGGGLLTTLISGLCKHGKHSKALELWFQFLNKGFVVDTRTSNALLHGLCEAGKLDEAFRIQKEILGRGCVMDRVSYNTLISGCCGKKKLDEAFMFLDEMVKRGLKPDNYTYSILICGLFNMNKVEEAIQFWDDCKRNGMLPDVYTYSVMIDGCCKAERTEEGQEFFDEMMSKNVQPNTVVYNHLIRAYCRSGRLSMALELREDMKHKGISPNSATYTSLIKGMSIISRVEEAKLLFEEMRMEGLEPNVFHYTALIDGYGKLGQMVKVECLLREMHSKNVHPNKITYTVMIGGYARDGNVTEASRLLNEMREKGIVPDSITYKEFIYGYLKQGGVLEAFKGSDEENYAAIIEGWNKLIQ

SEQ ID NO: 47735 - DNA, 670 bp, Arabidopsis thaliana
  misc_feature (1)..(670): Ceres Seq. ID no. 13647557
  misc_feature: MA Experiment ID: 20000173 Result: Up-regulated in Transcription
  misc_feature: MA Experiment 20000173 PARAMETER Experiment Name: At_42deg_Heat_P Parameter: Age (day) Value: 14
  misc_feature: MA Experiment 20000173 PARAMETER Experiment Name: At_42deg_Heat_P Parameter: Organism Value: A. thaliana
  misc_feature: MA Experiment 20000173 PARAMETER Experiment Name: At_42deg_Heat_P Parameter: Plant Line Value: WS
  misc_feature: MA Experiment 20000173 PARAMETER Experiment Name: At_42deg_Heat_P Parameter: Temperature (deg C) Value: 42 vs. 22
  misc_feature: MA Experiment 20000173 PARAMETER Experiment Name: At_42deg_Heat_P Parameter: Timepoint (hr) Value: 6
  misc_feature: MA Experiment 20000173 PARAMETER Experiment Name: At_42deg_Heat_P Parameter: Tissue Value: Aerial
  misc_feature: MA Experiment ID: 20000182 Result: Up-regulated in Transcription
  misc_feature: MA Experiment 20000182 PARAMETER Experiment Name: At_2mM_SA_P Parameter: Age (day) Value: 14
  misc_feature: MA Experiment 20000182 PARAMETER Experiment Name: At_2mM_SA_P Parameter: Organism Value: A. thaliana
  misc_feature: MA Experiment 20000182 PARAMETER Experiment Name: At_2mM_SA_P Parameter: Plant Line Value: WS
  misc_feature: MA Experiment 20000182 PARAMETER Experiment Name: At_2mM_SA_P Parameter: Timepoint (hr) Value: 6
  misc_feature: MA Experiment 20000182 PARAMETER Experiment Name: At_2mM_SA_P Parameter: Tissue Value: Aerial
  misc_feature: MA Experiment 20000182 PARAMETER Experiment Name: At_2mM_SA_P Parameter: Treatment Value: 2mM SA vs. No Treatment
  misc_feature: MA Experiment ID: 20000184 Result: Down-regulated in Transcription
  misc_feature: MA Experiment 20000184 PARAMETER Experiment Name: At_Shoots__P Parameter: Age (day) Value: 7
  misc_feature: MA Experiment 20000184 PARAMETER Experiment Name: At_Shoots__P Parameter: Tissue Value: Shoots vs. Whole Plant
  misc_feature: MA Experiment ID: 20000227 Result: Down-regulated in Transcription
  misc_feature: MA Experiment 20000227 PARAMETER Experiment Name: At_Root-Tips-vs-Tops_P Parameter: Tissue Value: Root Tips vs. Root Tops
  misc_feature: MA Experiment ID: 20001557 Result: Down-regulated in Transcription
  misc_feature: MA Experiment 20001557 PARAMETER Experiment Name: At_Drought_Soil_Dry_P Parameter: Age (day) Value: 27
  misc_feature: MA Experiment 20001557 PARAMETER Experiment Name: At_Drought_Soil_Dry_P Parameter: Organism Value: A. thaliana
  misc_feature: MA Experiment 20001557 PARAMETER Experiment Name: At_Drought_Soil_Dry_P Parameter: Plant Line Value: WS
  misc_feature: MA Experiment 20001557 PARAMETER Experiment Name: At_Drought_Soil_Dry_P Parameter: Post Timepoint (hr) Value: 3
  misc_feature: MA Experiment 20001557 PARAMETER Experiment Name: At_Drought_Soil_Dry_P Parameter: Post-Treatment Value: Re-Water vs. No Drought
  misc_feature: MA Experiment 20001557 PARAMETER Experiment Name: At_Drought_Soil_Dry_P Parameter: Timepoint (day) Value: 13
  misc_feature: MA Experiment 20001557 PARAMETER Experiment Name: At_Drought_Soil_Dry_P Parameter: Treatment Value: Drought vs. No Drought
  misc_feature: MA Experiment ID: 20001558 Result: Down-regulated in Transcription
  misc_feature: MA Experiment 20001558 PARAMETER Experiment Name: At_Drought_Soil_Dry_P Parameter: Age (day) Value: 27
  misc_feature: MA Experiment 20001558 PARAMETER Experiment Name: At_Drought_Soil_Dry_P Parameter: Organism Value: A. thaliana
  misc_feature: MA Experiment 20001558 PARAMETER Experiment Name: At_Drought_Soil_Dry_P Parameter: Plant Line Value: WS
  misc_feature: MA Experiment 20001558 PARAMETER Experiment Name: At_Drought_Soil_Dry_P Parameter: Post Timepoint (hr) Value: 6
  misc_feature: MA Experiment 20001558 PARAMETER Experiment Name: At_Drought_Soil_Dry_P Parameter: Post-Treatment Value: Re-Water vs. No Drought
  misc_feature: MA Experiment 20001558 PARAMETER Experiment Name: At_Drought_Soil_Dry_P Parameter: Timepoint (day) Value: 13
  misc_feature: MA Experiment 20001558 PARAMETER Experiment Name: At_Drought_Soil_Dry_P Parameter: Treatment Value: Drought vs. No Drought
gagaaagagcgatcagatcacggagaaagagatgggtcacggagaagaagataaaagcaaaggatttgcttcggaagaaggtaaccagcatcatcaatacggtacctttcaaggtgtttccaattaccctccgccgcagaattctgctccggtcactgggtttcctcaaccttctgcgccacctggcgtttacgattctggagctccttattacgctcatggatatcaaactgttccagtccatggtggtgttgctgaaggaagacctgtcagacaacgtcgccttccttgctgtggaattggtcttggatggttcctgttcattgttggatttttccttggagcaatcccttggtatgtcggattgttcatcatgatgtttggaaggagaatcgattacagggagaaaccaggatacattgcctgcactatcgctgctattctagcaacaatcgctgtgattctgggtgtatctaaaggagcagacgactggtgatggatcaatcatcttgtggggttactctaaaaatgtttgtataggtttctttatcgtgtgttgtattatctacttccttttttacttactctatgaagaaacaagaaaaaaaaaagtgtaaacttcacaagaattatttgagttttgttatctaaataagaagaagtcaaagat

SEQ ID NO: 47736 - protein, 164 aa, Arabidopsis thaliana
  peptide (1)..(164): Ceres Seq. ID no. 13647558
  misc_feature (43)..(164): Homolog of NCBI NO: 21554784 NR Description: unknown [Arabidopsis thaliana]
  misc_feature (43)..(164): Homolog of NCBI NO: 18400450 NR Description: expressed protein [Arabidopsis thaliana]
  misc_feature (28)..(145): Homolog of NCBI NO: 25518134 NR Description: probable 60S ribosomal protein L18A - Arabidopsis
  misc_feature (28)..(164): Homolog of NCBI NO: 18397305 NR Description: expressed protein [Arabidopsis thaliana]
  misc_feature (28)..(164): Homolog of NCBI NO: 21593837 NR Description: 60S ribosomal protein L18A, putative [Arabidopsis
  misc_feature (11)..(164): Homolog of NCBI NO: 18404524 NR Description: expressed protein [Arabidopsis thaliana]
  misc_feature (11)..(164): Homolog of NCBI NO: 21554011 NR Description: unknown [Arabidopsis thaliana]
  misc_feature (11)..(164): Homolog of NCBI NO: 18394436 NR Description: expressed protein [Arabidopsis thaliana]
RKSDQITEKEMGHGEEDKSKGFASEEGNQHHQYGTFQGVSNYPPPQNSAPVTGFPQPSAPPGVYDSGAPYYAHGYQTVPVHGGVAEGRPVRQRRLPCCGIGLGWFLFIVGFFLGAIPWYVGLFIMMFGRRIDYREKPGYIACTIAAILATIAVILGVSKGADDW

SEQ ID NO: 47737 - protein, 154 aa, Arabidopsis thaliana
  peptide (1)..(154): Ceres Seq. ID no. 13647559
  misc_feature (33)..(154): Homolog of NCBI NO: 21554784 NR Description: unknown [Arabidopsis thaliana]
  misc_feature (33)..(154): Homolog of NCBI NO: 18400450 NR Description: expressed protein [Arabidopsis thaliana]
  misc_feature (18)..(135): Homolog of NCBI NO: 25518134 NR Description: probable 60S ribosomal protein L18A - Arabidopsis
  misc_feature (18)..(154): Homolog of NCBI NO: 18397305 NR Description: expressed protein [Arabidopsis thaliana]
  misc_feature (18)..(154): Homolog of NCBI NO: 21593837 NR Description: 60S ribosomal protein L18A, putative [Arabidopsis
  misc_feature (1)..(154): Homolog of NCBI NO: 18404524 NR Description: expressed protein [Arabidopsis thaliana]
  misc_feature (1)..(154): Homolog of NCBI NO: 21554011 NR Description: unknown [Arabidopsis thaliana]
  misc_feature (1)..(154): Homolog of NCBI NO: 18394436 NR Description: expressed protein [Arabidopsis thaliana]
MGHGEEDKSKGFASEEGNQHHQYGTFQGVSNYPPPQNSAPVTGFPQPSAPPGVYDSGAPYYAHGYQTVPVHGGVAEGRPVRQRRLPCCGIGLGWFLFIVGFFLGAIPWYVGLFIMMFGRRIDYREKPGYIACTIAAILATIAVILGVSKGADDW

SEQ ID NO: 47738 - protein, 124 aa, Arabidopsis thaliana
  peptide (1)..(124): Ceres Seq. ID no. 13647560
ERAIRSRRKRWVTEKKIKAKDLLRKKVTSIINTVPFKVFPITLRRRILLRSLGFLNLLRHLAFTILELLITLMDIKLFQSMVVLLKEDLSDNVAFLAVELVLDGSCSLLDFSLEQSLGMSDCSS

SEQ ID NO: 47739 - DNA, 1332 bp, Arabidopsis thaliana
  misc_feature (1)..(1332): Ceres Seq. ID no. 12668514
  misc_feature: MA Experiment ID: 20000166 Result: Down-regulated in Transcription
  misc_feature: MA Experiment 20000166 PARAMETER Experiment Name: At_100uM_ABA_P Parameter: Age (day) Value: 14
  misc_feature: MA Experiment 20000166 PARAMETER Experiment Name: At_100uM_ABA_P Parameter: Organism Value: A. thaliana
  misc_feature: MA Experiment 20000166 PARAMETER Experiment Name: At_100uM_ABA_P Parameter: Plant Line Value: WS
  misc_feature: MA Experiment 20000166 PARAMETER Experiment Name: At_100uM_ABA_P Parameter: Timepoint (hr) Value: 1
  misc_feature: MA Experiment 20000166 PARAMETER Experiment Name: At_100uM_ABA_P Parameter: Tissue Value: Aerial
  misc_feature: MA Experiment 20000166 PARAMETER Experiment Name: At_100uM_ABA_P Parameter: Treatment Value: 100uM ABA vs. No Treatment
  misc_feature: MA Experiment ID: 20000171 Result: Down-regulated in Transcription
  misc_feature: MA Experiment 20000171 PARAMETER Experiment Name: At_42deg_Heat_P Parameter: Age (day) Value: 14
  misc_feature: MA Experiment 20000171 PARAMETER Experiment Name: At_42deg_Heat_P Parameter: Organism Value: A. thaliana
  misc_feature: MA Experiment 20000171 PARAMETER Experiment Name: At_42deg_Heat_P Parameter: Plant Line Value: WS
  misc_feature: MA Experiment 20000171 PARAMETER Experiment Name: At_42deg_Heat_P Parameter: Temperature (deg C) Value: 42 vs. 22
  misc_feature: MA Experiment 20000171 PARAMETER Experiment Name: At_42deg_Heat_P Parameter: Timepoint (hr) Value: 1
  misc_feature: MA Experiment 20000171 PARAMETER Experiment Name: At_42deg_Heat_P Parameter: Tissue Value: Aerial
  misc_feature: MA Experiment ID: 20000173 Result: Down-regulated in Transcription
  misc_feature: MA Experiment 20000173 PARAMETER Experiment Name: At_42deg_Heat_P Parameter: Age (day) Value: 14
  misc_feature: MA Experiment 20000173 PARAMETER Experiment Name: At_42deg_Heat_P Parameter: Organism Value: A. thaliana
  misc_feature: MA Experiment 20000173 PARAMETER Experiment Name: At_42deg_Heat_P Parameter: Plant Line Value: WS
  misc_feature: MA Experiment 20000173 PARAMETER Experiment Name: At_42deg_Heat_P Parameter: Temperature (deg C) Value: 42 vs. 22
  misc_feature: MA Experiment 20000173 PARAMETER Experiment Name: At_42deg_Heat_P Parameter: Timepoint (hr) Value: 6
  misc_feature: MA Experiment 20000173 PARAMETER Experiment Name: At_42deg_Heat_P Parameter: Tissue Value: Aerial
  misc_feature: MA Experiment ID: 20000179 Result: Up-regulated in Transcription
  misc_feature: MA Experiment 20000179 PARAMETER Experiment Name: At_Germinating_Seeds_P Parameter: Age (hr) Value: 6 vs. 0
  misc_feature: MA Experiment 20000179 PARAMETER Experiment Name: At_Germinating_Seeds_P Parameter: Tissue Value: Germinating Seeds
  misc_feature: MA Experiment ID: 20000184 Result: Up-regulated in Transcription
  misc_feature: MA Experiment 20000184 PARAMETER Experiment Name: At_Shoots__P Parameter: Age (day) Value: 7
  misc_feature: MA Experiment 20000184 PARAMETER Experiment Name: At_Shoots__P Parameter: Tissue Value: Shoots vs. Whole Plant
  misc_feature: MA Experiment ID: 20000234 Result: Down-regulated in Transcription
  misc_feature: MA Experiment 20000234 PARAMETER Experiment Name: At_Siliques_P Parameter: Age (day) Value: 21
  misc_feature: MA Experiment 20000234 PARAMETER Experiment Name: At_Siliques_P Parameter: Organism Value: A. thaliana
  misc_feature: MA Experiment 20000234 PARAMETER Experiment Name: At_Siliques_P Parameter: Plant Line Value: WS
  misc_feature: MA Experiment 20000234 PARAMETER Experiment Name: At_Siliques_P Parameter: Tissue Value: Less Than 5mm Siliques vs. Whole Plant
  misc_feature: MA Experiment ID: 20000235 Result: Down-regulated in Transcription
  misc_feature: MA Experiment 20000235 PARAMETER Experiment Name: At_Siliques_P Parameter: Age (day) Value: 21
  misc_feature: MA Experiment 20000235 PARAMETER Experiment Name: At_Siliques_P Parameter: Organism Value: A. thaliana
  misc_feature: MA Experiment 20000235 PARAMETER Experiment Name: At_Siliques_P Parameter: Plant Line Value: WS
  misc_feature: MA Experiment 20000235 PARAMETER Experiment Name: At_Siliques_P Parameter: Tissue Value: 5-10mm Siliques vs. Whole Plant
  misc_feature: MA Experiment ID: 20000264 Result: Down-regulated in Transcription
  misc_feature: MA Experiment 20000264 PARAMETER Experiment Name: At_Open_Flower_P Parameter: Age (day) Value: 21
  misc_feature: MA Experiment 20000264 PARAMETER Experiment Name: At_Open_Flower_P Parameter: Plant Line Value: WS
  misc_feature: MA Experiment 20000264 PARAMETER Experiment Name: At_Open_Flower_P Parameter: Tissue Value: Open Flower vs. Whole Plant
  misc_feature: MA Experiment ID: 20000265 Result: Down-regulated in Transcription
  misc_feature: MA Experiment 20000265 PARAMETER Experiment Name: At_Open_Flower_P Parameter: Age (day) Value: 21
  misc_feature: MA Experiment 20000265 PARAMETER Experiment Name: At_Open_Flower_P Parameter: Plant Line Value: WS
  misc_feature: MA Experiment 20000265 PARAMETER Experiment Name: At_Open_Flower_P Parameter: Tissue Value: Closed Flower vs. Whole Plant
  misc_feature: MA Experiment ID: 20000268 Result: Down-regulated in Transcription
  misc_feature: MA Experiment 20000268 PARAMETER Experiment Name: At_100mM_NaCl__P Parameter: Age (day) Value: 14
  misc_feature: MA Experiment 20000268 PARAMETER Experiment Name: At_100mM_NaCl__P Parameter: Organism Value: A. thaliana
  misc_feature: MA Experiment 20000268 PARAMETER Experiment Name: At_100mM_NaCl__P Parameter: Plant Line Value: WS
  misc_feature: MA Experiment 20000268 PARAMETER Experiment Name: At_100mM_NaCl__P Parameter: Timepoint (hr) Value: 6
  misc_feature: MA Experiment 20000268 PARAMETER Experiment Name: At_100mM_NaCl__P Parameter: Tissue Value: Whole Plant
  misc_feature: MA Experiment 20000268 PARAMETER Experiment Name: At_100mM_NaCl__P Parameter: Treatment Value: 100mM NaCl vs. No Treatment
  misc_feature: MA Experiment ID: 20000286 Result: Down-regulated in Transcription
  misc_feature: MA Experiment 20000286 PARAMETER Experiment Name: At_Open_Flower_P Parameter: Age (day) Value: 21
  misc_feature: MA Experiment 20000286 PARAMETER Experiment Name: At_Open_Flower_P Parameter: Plant Line Value: WS
  misc_feature: MA Experiment 20000286 PARAMETER Experiment Name: At_Open_Flower_P Parameter: Tissue Value: Half Open vs. Whole Plant
  misc_feature: MA Experiment ID: 20000437 Result: Down-regulated in Transcription
  misc_feature: MA Experiment 20000437 PARAMETER Experiment Name: At_Drought_P Parameter: Age (day) Value: 8
  misc_feature: MA Experiment 20000437 PARAMETER Experiment Name: At_Drought_P Parameter: Organism Value: A. thaliana
  misc_feature: MA Experiment 20000437 PARAMETER Experiment Name: At_Drought_P Parameter: Plant Line Value: WS
  misc_feature: MA Experiment 20000437 PARAMETER Experiment Name: At_Drought_P Parameter: Timepoint (hr) Value: 24
  misc_feature: MA Experiment 20000437 PARAMETER Experiment Name: At_Drought_P Parameter: Tissue Value: Whole Plant
  misc_feature: MA Experiment 20000437 PARAMETER Experiment Name: At_Drought_P Parameter: Treatment Value: Drought vs. No Drought
  misc_feature: MA Experiment ID: 20000438 Result: Up-regulated in Transcription
  misc_feature: MA Experiment 20000438 PARAMETER Experiment Name: At_Shoots__P Parameter: Age (day) Value: 14
  misc_feature: MA Experiment 20000438 PARAMETER Experiment Name: At_Shoots__P Parameter: Tissue Value: Shoots vs. Whole Plant
  misc_feature: MA Experiment ID: 20000451 Result: Up-regulated in Transcription
  misc_feature: MA Experiment 20000451 PARAMETER Experiment Name: At_CS6879_Shoots-Roots_P Parameter: Age (day) Value: 14
  misc_feature: MA Experiment 20000451 PARAMETER Experiment Name: At_CS6879_Shoots-Roots_P Parameter: Organism Value: A. thaliana
  misc_feature: MA Experiment 20000451 PARAMETER Experiment Name: At_CS6879_Shoots-Roots_P Parameter: Plant Line Value: CS6879 vs. WS
  misc_feature: MA Experiment 20000451 PARAMETER Experiment Name: At_CS6879_Shoots-Roots_P Parameter: Tissue Value: Roots
  misc_feature: MA Experiment ID: 20000527 Result: Down-regulated in Transcription
  misc_feature: MA Experiment 20000527 PARAMETER Experiment Name: At_10percent_PEG_P Parameter: Age (day) Value: 20
  misc_feature: MA Experiment 20000527 PARAMETER Experiment Name: At_10percent_PEG_P Parameter: Organism Value: A. thaliana
  misc_feature: MA Experiment 20000527 PARAMETER Experiment Name: At_10percent_PEG_P Parameter: Plant Line Value: WS
  misc_feature: MA Experiment 20000527 PARAMETER Experiment Name: At_10percent_PEG_P Parameter: Timepoint (day) Value: 20
  misc_feature: MA Experiment 20000527 PARAMETER Experiment Name: At_10percent_PEG_P Parameter: Tissue Value: Whole Plant
  misc_feature: MA Experiment 20000527 PARAMETER Experiment Name: At_10percent_PEG_P Parameter: Treatment Value: 10percent PEG vs. No Treatment
  misc_feature: MA Experiment ID: 20000794 Result: Down-regulated in Transcription
  misc_feature: MA Experiment 20000794 PARAMETER Experiment Name: At_Petals_P Parameter: Age (day) Value: 23-25 days
  misc_feature: MA Experiment 20000794 PARAMETER Experiment Name: At_Petals_P Parameter: Plant Line Value: WS
  misc_feature: MA Experiment 20000794 PARAMETER Experiment Name: At_Petals_P Parameter: Tissue Value: Petals vs. Whole plant
  misc_feature: MA Experiment ID: 20001451 Result: Up-regulated in Transcription
  misc_feature: MA Experiment 20001451 PARAMETER Experiment Name: At_Far-red-induction_P Parameter: Age (day) Value: 7
  misc_feature: MA Experiment 20001451 PARAMETER Experiment Name: At_Far-red-induction_P Parameter: Light Value: Far-red vs. White
  misc_feature: MA Experiment 20001451 PARAMETER Experiment Name: At_Far-red-induction_P Parameter: Organism Value: A. thaliana
  misc_feature: MA Experiment 20001451 PARAMETER Experiment Name: At_Far-red-induction_P Parameter: Plant Line Value: Columbia
  misc_feature: MA Experiment 20001451 PARAMETER Experiment Name: At_Far-red-induction_P Parameter: Timepoint (hr) Value: 24
  misc_feature: MA Experiment 20001451 PARAMETER Experiment Name: At_Far-red-induction_P Parameter: Tissue Value: Whole Plant
  misc_feature: MA Experiment ID: 20001906 Result: Up-regulated in Transcription
  misc_feature: MA Experiment 20001906 PARAMETER Experiment Name: At_Drought_Reproduction_P Parameter: Age (day) Value: 35
  misc_feature: MA Experiment 20001906 PARAMETER Experiment Name: At_Drought_Reproduction_P Parameter: Organism Value: A. thaliana
  misc_feature: MA Experiment 20001906 PARAMETER Experiment Name: At_Drought_Reproduction_P Parameter: Plant Line Value: WS
  misc_feature: MA Experiment 20001906 PARAMETER Experiment Name: At_Drought_Reproduction_P Parameter: Timepoint (day) Value: 5
  misc_feature: MA Experiment 20001906 PARAMETER Experiment Name: At_Drought_Reproduction_P Parameter: Tissue Value: Siliques
  misc_feature: MA Experiment 20001906 PARAMETER Experiment Name: At_Drought_Reproduction_P Parameter: Treatment Value: Drought vs. No Drought
gagtgacaaagacgaacgaagaccacgactagctcttcccatggcttcttcactgaagaagcttatctcaagctttctacttgtcttatactctaccaccatcattgttgcttcatcagaatctcgatgtcggcgctttacatctatcatcagctttggtgattccatcgcagacaccggaaatattctccatctctccgacgtcaatcatcttcctcaaaccgccttttttccttatggtgaaagcttcttccatcctccctctggtcgtgcctctgatggccgtctcatcatcgacttcatcgctgaattcttgggactaccgtatgttccaccttactttggatcccaaaacgttagctttgaacaagggatcaatttcgcggtgtatggagcaaccgcattggaccgagcgtattttgtggcaaaaggaattgaatctgatttcaccaacgttagtttaggtgttcagcttgacatcttcaagcagattttgcctaacctttgtgcctcatcttctcgtgattgcagagagatgcttggagactcgctgatactcatgggagagattggaggtaacgactttttttacccatcctccgaaggcaaaagtatcaatgaaaccaaactacaggatttgatcatcaaagctatttcttctgcaattgtggatttgatcgctttagggggcaaaacatttttggtacccggaggcttcccagcaggatgttccgcagcgtgtcttactcaatatcagaacgcgacagaagaagactacgaccccttgacaggttgtatcccacggctcaatgaacttggagagcacgacaacgaacaacttaagacagaactcaaacgactccaaaaactctatcctgatgtcaacatcatttacgctgactaccataactccttataccggttttatcaagaaccagctaaatatgggtttaagaacaaacctttagctgcttgctgtggagtcggaggtaaatacaacttcactattggtaaggagtgtggatacgaaggagttagctattgtcaaaatccttccgagtatgtgaattgggatggttatcatttaaccgaagccgcctaccagaagatggctgagggtatactcaacggtccctatgcaactcctgctttcgactggtcctgccttggctctggtacagtggatacataaaaggagcagttagaattcatttgttgtaaaaaaaaaaaaagaggaagaaaattgtgtgatgatgattaacaaaaagattgcttgtacggcaggatttgactagtgacaaaaatttcgaggatatatgcatcaatcttatc

SEQ ID NO: 47740 - protein, 396 aa, Arabidopsis thaliana
  peptide (1)..(396): Ceres Seq. ID no. 12668515
  misc_feature (49)..(374): Pfam Name: GDSL-like Lipase/Acylhydrolase Pfam Description: GDSL-like Lipase/Acylhydrolase
  misc_feature (39)..(376): Homolog of NCBI NO: 10764854 NR Description: F1K23.13 [Arabidopsis thaliana]
  misc_feature (57)..(196): Homolog of NCBI NO: 10764854 NR Description: F1K23.13 [Arabidopsis thaliana]
  misc_feature (229)..(391): Homolog of NCBI NO: 10764854 NR Description: F1K23.13 [Arabidopsis thaliana]
  misc_feature (18)..(391): Homolog of NCBI NO: 15218753 NR Description: lipase, putative; protein id: At1g28650.1
  misc_feature (14)..(395): Homolog of NCBI NO: 15218751 NR Description: lipase, putative; protein id: At1g28640.1
  misc_feature (12)..(395): Homolog of NCBI NO: 10764854 NR Description: F1K23.13 [Arabidopsis thaliana]
  misc_feature (14)..(393): Homolog of NCBI NO: 10764854 NR Description: F1K23.13 [Arabidopsis thaliana]
  misc_feature (14)..(396): Homolog of NCBI NO: 15218756 NR Description: lipase; protein id: At1g28670.1, supported by
  misc_feature (14)..(396): Homolog of NCBI NO: 30690523 NR Description: lipase, putative [Arabidopsis thaliana]
  misc_feature (14)..(396): Homolog of NCBI NO: 18396873 NR Description: expressed protein
SDKDERRPRLALPMASSLKKLISSFLLVLYSTTIIVASSESRCRRFTSIISFGDSIADTGNILHLSDVNHLPQTAFFPYGESFFHPPSGRASDGRLIIDFIAEFLGLPYVPPYFGSQNVSFEQGINFAVYGATALDRAYFVAKGIESDFTNVSLGVQLDIFKQILPNLCASSSRDCREMLGDSLILMGEIGGNDFFYPSSEGKSINETKLQDLIIKAISSAIVDLIALGGKTFLVPGGFPAGCSAACLTQYQNATEEDYDPLTGCIPRLNELGEHDNEQLKTELKRLQKLYPDVNIIYADYHNSLYRFYQEPAKYGFKNKPLAACCGVGGKYNFTIGKECGYEGVSYCQNPSEYVNWDGYHLTEAAYQKMAEGILNGPYATPAFDWSCLGSGTVDT

SEQ ID NO: 47741 - protein, 383 aa, Arabidopsis thaliana
  peptide (1)..(383): Ceres Seq. ID no. 12668516
  misc_feature (36)..(361): Pfam Name: GDSL-like Lipase/Acylhydrolase Pfam Description: GDSL-like Lipase/Acylhydrolase
  misc_feature (26)..(363): Homolog of NCBI NO: 10764854 NR Description: F1K23.13 [Arabidopsis thaliana]
  misc_feature (44)..(183): Homolog of NCBI NO: 10764854 NR Description: F1K23.13 [Arabidopsis thaliana]
  misc_feature (216)..(378): Homolog of NCBI NO: 10764854 NR Description: F1K23.13 [Arabidopsis thaliana]
  misc_feature (5)..(378): Homolog of NCBI NO: 15218753 NR Description: lipase, putative; protein id: At1g28650.1
  misc_feature (1)..(382): Homolog of NCBI NO: 15218751 NR Description: lipase, putative; protein id: At1g28640.1
  misc_feature (1)..(382): Homolog of NCBI NO: 10764854 NR Description: F1K23.13 [Arabidopsis thaliana]
  misc_feature (1)..(380): Homolog of NCBI NO: 10764854 NR Description: F1K23.13 [Arabidopsis thaliana]
  misc_feature (1)..(383): Homolog of NCBI NO: 15218756 NR Description: lipase; protein id: At1g28670.1, supported by
  misc_feature (1)..(383): Homolog of NCBI NO: 30690523 NR Description: lipase, putative [Arabidopsis thaliana]
  misc_feature (1)..(383): Homolog of NCBI NO: 18396873 NR Description: expressed protein
MASSLKKLISSFLLVLYSTTIIVASSESRCRRFTSIISFGDSIADTGNILHLSDVNHLPQTAFFPYGESFFHPPSGRASDGRLIIDFIAEFLGLPYVPPYFGSQNVSFEQGINFAVYGATALDRAYFVAKGIESDFTNVSLGVQLDIFKQILPNLCASSSRDCREMLGDSLILMGEIGGNDFFYPSSEGKSINETKLQDLIIKAISSAIVDLIALGGKTFLVPGGFPAGCSAACLTQYQNATEEDYDPLTGCIPRLNELGEHDNEQLKTELKRLQKLYPDVNIIYADYHNSLYRFYQEPAKYGFKNKPLAACCGVGGKYNFTIGKECGYEGVSYCQNPSEYVNWDGYHLTEAAYQKMAEGILNGPYATPAFDWSCLGSGTVDT

SEQ ID NO: 47742 - protein, 218 aa, Arabidopsis thaliana
  peptide (1)..(218): Ceres Seq. ID no. 12668517
  misc_feature (1)..(196): Pfam Name: GDSL-like Lipase/Acylhydrolase Pfam Description: GDSL-like Lipase/Acylhydrolase
  misc_feature (1)..(198): Homolog of NCBI NO: 10764854 NR Description: F1K23.13 [Arabidopsis thaliana]
  misc_feature (1)..(18): Homolog of NCBI NO: 10764854 NR Description: F1K23.13 [Arabidopsis thaliana]
  misc_feature (51)..(213): Homolog of NCBI NO: 10764854 NR Description: F1K23.13 [Arabidopsis thaliana]
  misc_feature (1)..(213): Homolog of NCBI NO: 15218753 NR Description: lipase, putative; protein id: At1g28650.1
  misc_feature (1)..(217): Homolog of NCBI NO: 15218751 NR Description: lipase, putative; protein id: At1g28640.1
  misc_feature (1)..(217): Homolog of NCBI NO: 10764854 NR Description: F1K23.13 [Arabidopsis thaliana]
  misc_feature (1)..(215): Homolog of NCBI NO: 10764854 NR Description: F1K23.13 [Arabidopsis thaliana]
  misc_feature (1)..(218): Homolog of NCBI NO: 15218756 NR Description: lipase; protein id: At1g28670.1, supported by
  misc_feature (1)..(218): Homolog of NCBI NO: 30690523 NR Description: lipase, putative [Arabidopsis thaliana]
  misc_feature (1)..(218): Homolog of NCBI NO: 18396873 NR Description: expressed protein
MLGDSLILMGEIGGNDFFYPSSEGKSINETKLQDLIIKAISSAIVDLIALGGKTFLVPGGFPAGCSAACLTQYQNATEEDYDPLTGCIPRLNELGEHDNEQLKTELKRLQKLYPDVNIIYADYHNSLYRFYQEPAKYGFKNKPLAACCGVGGKYNFTIGKECGYEGVSYCQNPSEYVNWDGYHLTEAAYQKMAEGILNGPYATPAFDWSCLGSGTVDT

SEQ ID NO: 47743 - DNA, 2369 bp, Arabidopsis thaliana
  misc_feature (1)..(2369): Ceres Seq. ID no. 13647576
  misc_feature: MA Experiment ID: 20000184 Result: Up-regulated in Transcription
  misc_feature: MA Experiment 20000184 PARAMETER Experiment Name: At_Shoots__P Parameter: Age (day) Value: 7
  misc_feature: MA Experiment 20000184 PARAMETER Experiment Name: At_Shoots__P Parameter: Tissue Value: Shoots vs. Whole Plant
gacggccaggcttcactgtcctcctcgtcctcctcaattacccctaacccctttttccgggattcatctccaacccacatccttccaaattctcaccccctcactgagtttttgctttttctcctcatcggagatcgtgaagacgatcaagtaatttaagaatcccaccattgataaaagagtctagcttttctactaccaaacctttttctgtttggaaattttcgattttggatttaacccttttcttaccttatttataaccatgcaatctcacgaccaacaacccttcaatctccatggcggaatccggcgatttcaacggtggtcaacctcctcctcatagtcctctgagaacaacttcttccggtagtagcagcagcaacaaccgtggtcctcctcctcctcctcctcctcctttagtgatggtgagaaaaagattagcttccgagatgtcttctaaccctgactacaacaactcctctcgtcctcctcgccgtgtctctcaccttcttgactccaactacaatactgtcacaccacaacaaccaccgtctcttacggcggcggctactgtatcttctcaaccaaacccaccactctctgtttgtggcttctctggtcttcccgtttttccttcagaccgtggtggtcggaatgttatgatgtccgtacaaccaatggatcaagactcttcatcttcttctgcttcacctactgtatgggttgacgccattatcagagaccttatccattcctcaacttcagtctctattcctcaacttatccaaaacgttagagacattatcttcccttgtaacccaaatctcggtgctcttcttgaatacaggctccgatctctcatgctccttgatccttcctcttcctctgacccttctcctcaaactttcgaacctctctatcagatctccaacaatccttctcctccacaacagcaacagcagcaccaacaacaacaacaacagcataagcctcctcctcctccgattcagcagcaagaaagagaaaattcttctaccgatgcaccaccgcaaccagagacagtgacggccactgttcccgccgtccaaacaaatacggcggaggctttaagagagaggaaggaagagattaagaggcagaagcaagacgaagaaggattacaccttctcacattgctgctacagtgtgctgaagctgtctctgctgataatctcgaagaagcaaacaagcttcttcttgagatctctcagttatcaactccttacgggacctcagcgcagagagtagctgcttacttctcggaagctatgtcagcgagattactcaactcgtgtctcggaatttacgcggctttgccttcacggtggatgcctcaaacgcatagcttgaaaatggtctctgcgtttcaggtctttaatgggataagccctttagtgaaattctcacactttacagcgaatcaggcgattcaagaagcatttgagaaagaagacagtgtacacatcattgacttggacatcatgcagggacttcaatggcctggtttattccacattcttgcttctagacctggaggacctccacacgtgcgactcacgggacttggtacttccatggaagctcttcaggctacagggaaacgtctttcggatttcgcagataagcttggcctgccttttgagttctgccctttagctgagaaagttggaaacttggacactgagagactcaatgtgaggaaaagggaagctgtggctgttcactggcttcaacattctctttatgatgtcactggctctgatgcacacactctctggttactccaaagattagctcctaaagttgtgacagtagtggaacaagatttgagccacgctggttctttcttaggaagatttgtagaagcaatacattactactctgcactctttgactcactgggagcaagctacggcgaagagagtgaagagagacatgtcgtggaacagcagctattatcgaaagagatacggaatgtattagcggttggaggaccatcgagaagcggtgaagtgaagtttgagagctggagggagaaaatgcaacaatgtgggtttaaaggtatatctttagctggaaatgcagctacacaagcgactctactgttgggaatgtttccttcggatggttacactttggttgatgataatggtacacttaagcttggatggaaagatctttcgttactcactgcttcagcttggacgcctcgttcttagttttcttctcctttttcacaaacaatgtgcccataaatagatttacctgttttttttttgttatgtatcaaaaagagaggattttttgaagtcaaattgttctcaccc

SEQ ID NO: 47744 - protein, 653 aa, Arabidopsis thaliana
  peptide (1)..(653): Ceres Seq. ID no. 15218838
  misc_feature (264)..(560): Pfam Name: GRAS family transcription factor Pfam Description: GRAS family transcription factor
  misc_feature (236)..(649): Homolog of NCBI NO: 3021336 NR Description: RGA-like [Arabidopsis thaliana]
  misc_feature (459)..(651): Homolog of NCBI NO: 34393287 NR Description: SCARECROW protein-like protein
  misc_feature (499)..(652): Homolog of NCBI NO: 15222965 NR Description: scarecrow-like transcription factor 3 (SCL3)
  misc_feature (241)..(488): Homolog of NCBI NO: 15222965 NR Description: scarecrow-like transcription factor 3 (SCL3)
  misc_feature (194)..(649): Homolog of NCBI NO: 20334379 NR Description: GAI-like protein 1 [Vitis vinifera]
  misc_feature (273)..(649): Homolog of NCBI NO: 15238234 NR Description: scarecrow transcription factor family
  misc_feature (284)..(651): Homolog of NCBI NO: 34899818 NR Description: putative SCARECROW protein
  misc_feature (12)..(651): Homolog of NCBI NO: 10178637 NR Description: SCARECROW [Zea mays]
  misc_feature (1)..(195): Homolog of NCBI NO: 13365610 NR Description: SCARECROW [Pisum sativum]
  misc_feature (232)..(651): Homolog of NCBI NO: 13365610 NR Description: SCARECROW [Pisum sativum]
MAESGDFNGGQPPPHSPLRTTSSGSSSSNNRGPPPPPPPPLVMVRKRLASEMSSNPDYNNSSRPPRRVSHLLDSNYNTVTPQQPPSLTAAATVSSQPNPPLSVCGFSGLPVFPSDRGGRNVMMSVQPMDQDSSSSSASPTVWVDAIIRDLIHSSTSVSIPQLIQNVRDIIFPCNPNLGALLEYRLRSLMLLDPSSSSDPSPQTFEPLYQISNNPSPPQQQQQHQQQQQQHKPPPPPIQQQERENSSTDAPPQPETVTATVPAVQTNTAEALRERKEEIKRQKQDEEGLHLLTLLLQCAEAVSADNLEEANKLLLEISQLSTPYGTSAQRVAAYFSEAMSARLLNSCLGIYAALPSRWMPQTHSLKMVSAFQVFNGISPLVKFSHFTANQAIQEAFEKEDSVHIIDLDIMQGLQWPGLFHILASRPGGPPHVRLTGLGTSMEALQATGKRLSDFADKLGLPFEFCPLAEKVGNLDTERLNVRKREAVAVHWLQHSLYDVTGSDAHTLWLLQRLAPKVVTVVEQDLSHAGSFLGRFVEAIHYYSALFDSLGASYGEESEERHVVEQQLLSKEIRNVLAVGGPSRSGEVKFESWREKMQQCGFKGISLAGNAATQATLLLGMFPSDGYTLVDDNGTLKLGWKDLSLLTASAWTPRS

SEQ ID NO: 47745 - protein, 611 aa, Arabidopsis thaliana
  peptide (1)..(611): Ceres Seq. ID no. 15218839
  misc_feature (222)..(518): Pfam Name: GRAS family transcription factor Pfam Description: GRAS family transcription factor
  misc_feature (194)..(607): Homolog of NCBI NO: 3021336 NR Description: RGA-like [Arabidopsis thaliana]
  misc_feature (417)..(609): Homolog of NCBI NO: 34393287 NR Description: SCARECROW protein-like protein
  misc_feature (457)..(610): Homolog of NCBI NO: 15222965 NR Description: scarecrow-like transcription factor 3 (SCL3)
  misc_feature (199)..(446): Homolog of NCBI NO: 15222965 NR Description: scarecrow-like transcription factor 3 (SCL3)
  misc_feature (152)..(607): Homolog of NCBI NO: 20334379 NR Description: GAI-like protein 1 [Vitis vinifera]
  misc_feature (231)..(607): Homolog of NCBI NO: 15238234 NR Description: scarecrow transcription factor family
  misc_feature (242)..(609): Homolog of NCBI NO: 34899818 NR Description: putative SCARECROW protein
  misc_feature (1)..(609): Homolog of NCBI NO: 10178637 NR Description: SCARECROW [Zea mays]
  misc_feature (1)..(153): Homolog of NCBI NO: 13365610 NR Description: SCARECROW [Pisum sativum]
  misc_feature (190)..(609): Homolog of NCBI NO: 13365610 NR Description: SCARECROW [Pisum sativum]
MVRKRLASEMSSNPDYNNSSRPPRRVSHLLDSNYNTVTPQQPPSLTAAATVSSQPNPPLSVCGFSGLPVFPSDRGGRNVMMSVQPMDQDSSSSSASPTVWVDAIIRDLIHSSTSVSIPQLIQNVRDIIFPCNPNLGALLEYRLRSLMLLDPSSSSDPSPQTFEPLYQISNNPSPPQQQQQHQQQQQQHKPPPPPIQQQERENSSTDAPPQPETVTATVPAVQTNTAEALRERKEEIKRQKQDEEGLHLLTLLLQCAEAVSADNLEEANKLLLEISQLSTPYGTSAQRVAAYFSEAMSARLLNSCLGIYAALPSRWMPQTHSLKMVSAFQVFNGISPLVKFSHFTANQAIQEAFEKEDSVHIIDLDIMQGLQWPGLFHILASRPGGPPHVRLTGLGTSMEALQATGKRLSDFADKLGLPFEFCPLAEKVGNLDTERLNVRKREAVAVHWLQHSLYDVTGSDAHTLWLLQRLAPKVVTVVEQDLSHAGSFLGRFVEAIHYYSALFDSLGASYGEESEERHVVEQQLLSKEIRNVLAVGGPSRSGEVKFESWREKMQQCGFKGISLAGNAATQATLLLGMFPSDGYTLVDDNGTLKLGWKDLSLLTASAWTPRS

SEQ ID NO: 47746 - protein, 602 aa, Arabidopsis thaliana
  peptide (1)..(602): Ceres Seq. ID no. 15218840
  misc_feature (213)..(509): Pfam Name: GRAS family transcription factor Pfam Description: GRAS family transcription factor
  misc_feature (185)..(598): Homolog of NCBI NO: 3021336 NR Description: RGA-like [Arabidopsis thaliana]
  misc_feature (408)..(600): Homolog of NCBI NO: 34393287 NR Description: SCARECROW protein-like protein
  misc_feature (448)..(601): Homolog of NCBI NO: 15222965 NR Description: scarecrow-like transcription factor 3 (SCL3)
  misc_feature (190)..(437): Homolog of NCBI NO: 15222965 NR Description: scarecrow-like transcription factor 3 (SCL3)
  misc_feature (143)..(598): Homolog of NCBI NO: 20334379 NR Description: GAI-like protein 1 [Vitis vinifera]
  misc_feature (222)..(598): Homolog of NCBI NO: 15238234 NR Description: scarecrow transcription factor family
  misc_feature (233)..(600): Homolog of NCBI NO: 34899818 NR Description: putative SCARECROW protein
  misc_feature (1)..(600): Homolog of NCBI NO: 10178637 NR Description: SCARECROW [Zea mays]
  misc_feature (1)..(144): Homolog of NCBI NO: 13365610 NR Description: SCARECROW [Pisum sativum]
  misc_feature (181)..(600): Homolog of NCBI NO: 13365610 NR Description: SCARECROW [Pisum sativum]
MSSNPDYNNSSRPPRRVSHLLDSNYNTVTPQQPPSLTAAATVSSQPNPPLSVCGFSGLPVFPSDRGGRNVMMSVQPMDQDSSSSSASPTVWVDAIIRDLIHSSTSVSIPQLIQNVRDIIFPCNPNLGALLEYRLRSLMLLDPSSSSDPSPQTFEPLYQISNNPSPPQQQQQHQQQQQQHKPPPPPIQQQERENSSTDAPPQPETVTATVPAVQTNTAEALRERKEEIKRQKQDEEGLHLLTLLLQCAEAVSADNLEEANKLLLEISQLSTPYGTSAQRVAAYFSEAMSARLLNSCLGIYAALPSRWMPQTHSLKMVSAFQVFNGISPLVKFSHFTANQAIQEAFEKEDSVHIIDLDIMQGLQWPGLFHILASRPGGPPHVRLTGLGTSMEALQATGKRLSDFADKLGLPFEFCPLAEKVGNLDTERLNVRKREAVAVHWLQHSLYDVTGSDAHTLWLLQRLAPKVVTVVEQDLSHAGSFLGRFVEAIHYYSALFDSLGASYGEESEERHVVEQQLLSKEIRNVLAVGGPSRSGEVKFESWREKMQQCGFKGISLAGNAATQATLLLGMFPSDGYTLVDDNGTLKLGWKDLSLLTASAWTPRS

SEQ ID NO: 47747 - DNA, 978 bp, Arabidopsis thaliana
  misc_feature (1)..(978): Ceres Seq. ID no. 13647584
  misc_feature: MA Experiment ID: 20000355 Result: Down-regulated in Transcription
  misc_feature: MA Experiment 20000355 PARAMETER Experiment Name: At_Siliques_Sub_P Parameter: Age (day) Value: 21
  misc_feature: MA Experiment 20000355 PARAMETER Experiment Name: At_Siliques_Sub_P Parameter: Organism Value: A. thaliana
  misc_feature: MA Experiment 20000355 PARAMETER Experiment Name: At_Siliques_Sub_P Parameter: Plant Line Value: WS
  misc_feature: MA Experiment 20000355 PARAMETER Experiment Name: At_Siliques_Sub_P Parameter: Tissue Value: Less Than 5mm Siliques vs. Whole Plant
attatcttctaaactcatttccttttcctctcgaaatctcaaagatagataaattttaaaggcatatttttttcatttcgactcagatgggttttgatgatacatgcaacacaggtcttgttcttggattaggtccctcaccaattccaaataattacaatagtaccatcagacaatcctccgtttacaagctcgagccgtcgttgactctatgcctctcgggcgatccctcggttaccgtggtgaccggagctgaccagctatgccgtcagacgtcatctcacagcggagtctcttctttctcaagcgggagggtggtgaaaagagagagagacggtggcgaagagtcgccggaggaggaagagatgacggagagagttataagtgattaccatgaagatgaagaaggtattagtgctagaaaaaaacttaggcttacgaaacaacaatctgctcttcttgaggaaagcttcaaggatcatagcacccttaatcccaaacaaaagcaagttctggctagacagctgaatctaaggcctagacaagttgaagtatggtttcaaaatagaagagccaggacaaagctgaagcaaacagaagtagattgtgagtttttgaagaagtgttgtgaaacattagcagatgagaacataagacttcagaaagagattcaagaactcaaaaccctaaaattgactcagcccttttacatgcacatgcctgcatcgactctaacgaagtgtccttcttgtgagagaatcggcggcggcggcgggggtaatggaggaggaggtggcggcagcggggctaccgcggtgattgtagatggaagtacggccaaaggagctttctctatctcctcaaagcctcacttcttcaacccttttactaacccatctgcagcttgttgaatagtagtaattcgtttaattttattacttaaaatattaattttcttttttttttgggtggcatttt

SEQ ID NO: 47748 - protein, 274 aa, Arabidopsis thaliana
  peptide (1)..(274): Ceres Seq. ID no. 13647585
  misc_feature (113)..(167): Pfam Name: Homeobox domain Pfam Description: Homeobox domain
  misc_feature (48)..(225): Homolog of NCBI NO: 29028870 NR Description: At5g06710 [Arabidopsis thaliana]
  misc_feature (48)..(225): Homolog of NCBI NO: 22326632 NR Description: homeobox-leucine zipper protein HAT14 (HD-Zip
  misc_feature (48)..(225): Homolog of NCBI NO: 12230908 NR Description: Homeobox-leucine zipper protein HAT14 (HD-ZIP
  misc_feature (7)..(234): Homolog of NCBI NO: 7446246 NR Description: homeobox leucine zipper protein Hb-2,
  misc_feature (36)..(274): Homolog of NCBI NO: 27311238 NR Description: Hypothetical protein [Oryza sativa (japonica
  misc_feature (1)..(274): Homolog of NCBI NO: 15235712 NR Description: Homeobox-leucine zipper protein HAT22 (HD-ZIP
  misc_feature (1)..(274): Homolog of NCBI NO: 25386244 NR Description: homeobox protein HAT9 [imported] - Arabidopsis
  misc_feature (1)..(274): Homolog of NCBI NO: 25386242 NR Description: homeobox protein HAT9 [imported] - Arabidopsis
  misc_feature (1)..(274): Homolog of NCBI NO: 15227754 NR Description: homeobox-leucine zipper protein HAT9 (HD-Zip
MGFDDTCNTGLVLGLGPSPIPNNYNSTIRQSSVYKLEPSLTLCLSGDPSVTVVTGADQLCRQTSSHSGVSSFSSGRVVKRERDGGEESPEEEEMTERVISDYHEDEEGISARKKLRLTKQQSALLEESFKDHSTLNPKQKQVLARQLNLRPRQVEVWFQNRRARTKLKQTEVDCEFLKKCCETLADENIRLQKEIQELKTLKLTQPFYMHMPASTLTKCPSCERIGGGGGGNGGGGGGSGATAVIVDGSTAKGAFSISSKPHFFNPFTNPSAAC

SEQ ID NO: 47749 - protein, 181 aa, Arabidopsis thaliana
  peptide (1)..(181): Ceres Seq. ID no. 13647586
  misc_feature (20)..(74): Pfam Name: Homeobox domain Pfam Description: Homeobox domain
  misc_feature (1)..(132): Homolog of NCBI NO: 29028870 NR Description: At5g06710 [Arabidopsis thaliana]
  misc_feature (1)..(132): Homolog of NCBI NO: 22326632 NR Description: homeobox-leucine zipper protein HAT14 (HD-Zip
  misc_feature (1)..(132): Homolog of NCBI NO: 12230908 NR Description: Homeobox-leucine zipper protein HAT14 (HD-ZIP
  misc_feature (1)..(141): Homolog of NCBI NO: 7446246 NR Description: homeobox leucine zipper protein Hb-2,
  misc_feature (1)..(181): Homolog of NCBI NO: 27311238 NR Description: Hypothetical protein [Oryza sativa (japonica
  misc_feature (1)..(181): Homolog of NCBI NO: 15235712 NR Description: Homeobox-leucine zipper protein HAT22 (HD-ZIP
  misc_feature (1)..(181): Homolog of NCBI NO: 25386244 NR Description: homeobox protein HAT9 [imported] - Arabidopsis
  misc_feature (1)..(181): Homolog of NCBI NO: 25386242 NR Description: homeobox protein HAT9 [imported] - Arabidopsis
  misc_feature (1)..(181): Homolog of NCBI NO: 15227754 NR Description: homeobox-leucine zipper protein HAT9 (HD-Zip
MTERVISDYHEDEEGISARKKLRLTKQQSALLEESFKDHSTLNPKQKQVLARQLNLRPRQVEVWFQNRRARTKLKQTEVDCEFLKKCCETLADENIRLQKEIQELKTLKLTQPFYMHMPASTLTKCPSCERIGGGGGGNGGGGGGSGATAVIVDGSTAKGAFSISSKPHFFNPFTNPSAAC

SEQ ID NO: 47750 - DNA, 1597 bp, Arabidopsis thaliana
  misc_feature (1)..(1597): Ceres Seq. ID no. 12734454
  misc_feature: MA Experiment ID: 20000173 Result: Down-regulated in Transcription
  misc_feature: MA Experiment 20000173 PARAMETER Experiment Name: At_42deg_Heat_P Parameter: Age (day) Value: 14
  misc_feature: MA Experiment 20000173 PARAMETER Experiment Name: At_42deg_Heat_P Parameter: Organism Value: A. thaliana
  misc_feature: MA Experiment 20000173 PARAMETER Experiment Name: At_42deg_Heat_P Parameter: Plant Line Value: WS
  misc_feature: MA Experiment 20000173 PARAMETER Experiment Name: At_42deg_Heat_P Parameter: Temperature (deg C) Value: 42 vs. 22
  misc_feature: MA Experiment 20000173 PARAMETER Experiment Name: At_42deg_Heat_P Parameter: Timepoint (hr) Value: 6
  misc_feature: MA Experiment 20000173 PARAMETER Experiment Name: At_42deg_Heat_P Parameter: Tissue Value: Aerial
  misc_feature: MA Experiment ID: 20000180 Result: Up-regulated in Transcription
  misc_feature: MA Experiment 20000180 PARAMETER Experiment Name: At_Germinating_Seeds_P Parameter: Age (hr) Value: 24 vs. 0
  misc_feature: MA Experiment 20000180 PARAMETER Experiment Name: At_Germinating_Seeds_P Parameter: Tissue Value: Germinating Seeds
  misc_feature: MA Experiment ID: 20000439 Result: Up-regulated in Transcription
  misc_feature: MA Experiment 20000439 PARAMETER Experiment Name: At_Roots__P Parameter: Age (day) Value: 14 vs. 21
  misc_feature: MA Experiment 20000439 PARAMETER Experiment Name: At_Roots__P Parameter: Organism Value: A. thaliana
  misc_feature: MA Experiment 20000439 PARAMETER Experiment Name: At_Roots__P Parameter: Tissue Value: Roots vs. Whole Plant
  misc_feature: MA Experiment ID: 20000495 Result: Down-regulated in Transcription
  misc_feature: MA Experiment 20000495 PARAMETER Experiment Name: At_Guard_Cells_P Parameter: Harvest Date Value: 8/2/2002
  misc_feature: MA Experiment 20000495 PARAMETER Experiment Name: At_Guard_Cells_P Parameter: Organism Value: A. thaliana
  misc_feature: MA Experiment 20000495 PARAMETER Experiment Name: At_Guard_Cells_P Parameter: Tissue Value: Guard Cells vs. Leaves
aatcgctgctacgaacagcaagcttcggcgaaaatgggattcattacgactctttaactcatcgatcccaatttgaaaactcgcatttccattgattcctttgatcagttctcaagtcgaaggtaattttgaatcaggcgcgatactccaagttaggatcttcggttcgagcttttgtgtgatcgatctaaaaggctatagaatatggtgaaaccatcggatttcaaagcaattcaagggtttattcggctgcattacactcgggtcaaccctgtcacaattggccgatcaaacccatcagctttgtcttctccagctattccctccaatggtgtttctcagcttcagcctaagtttagcttccacagcttatcctcgaaacccacttccaaaaacgtgggattatatcagattctgtcgtctcctaagctcaatcctaagttgcagcaagctttgggtttgcctcgtgtgaatgtgagttttgcatcggcgtttagattggtatccactaagagctctggatttcgaaaggttgatgggagttttgcgagaaaggttgttgataagcctgtcaaagctgttagttctacttttgctagataccgtgaggctatagggttgcacattgatgcattttggaaaaagaatagtcttgttgtgtttggagctgcaggtgtttttgtatgtattttcctttggcggattatgtttggaattgctagtacgtttgttggcctctcagagggcatggccaagtatgggtttcttgcactctcctcagccattgtagcattttctggattatacctccgctcaaggtttacaattaatccggataaagtttatagaatgaccatgaggaagatcaacacggcagctgaaattctagaagttatgggtgctcctctgtcaggatcagatttacgagcgtatgtgatgtcaggtggtggcataacatttaagaaattcaagccaacaattaggagcaagcgctgctttcttctattccccgttcagggttctgagcaaaagggccttgttagcgttgaagttaagaagaagaaaggccagtatgacatgaagcttttggcggtagatattccaatggcatctggtcccgaccaacggttatttctgattggcgatgaagaagagtacagaattggtggtggtttaatctctgtgttaagagaccctgttgtgaaagcaatggcagcaactaaggagttcgataatcttgatagaatcgaagaggaagaagacgctgaaagagaacttcaagaagctgaaagaaagcatcgtgaagagatcgagaaactcgagaaggagggctcataactcgtattttcttccccagaaatattttcttcttcggtggatataagaacaacaccatgaatcttttccaaaacccagttttttttttgtttttgctaactttcgagaaataaatttccctggctatgttgatcagaggatgctattgtgattactgattcttcttcatacaagatgtatctccttgttagagcagcctgtgctgtgaaaaaccgtttggtttagaacttttgtcttccaaagtataaactggtgtaag

SEQ ID NO: 47751 - protein, 377 aa, Arabidopsis thaliana
  peptide (1)..(377): Ceres Seq. ID no. 12734455
  misc_feature (1)..(79): Homolog of NCBI NO: 15228922 NR Description: putative protein; protein id: At3g56430.1
  misc_feature (45)..(375): Homolog of NCBI NO: 34896160 NR Description: hypothetical protein~similar to Arabidopsis
  misc_feature (340)..(374): Homolog of NCBI NO: 15228922 NR Description: putative protein; protein id: At3g56430.1
  misc_feature (36)..(375): Homolog of NCBI NO: 15228922 NR Description: putative protein; protein id: At3g56430.1
  misc_feature (1)..(377): Homolog of NCBI NO: 15226745 NR Description: unknown protein
MVKPSDFKAIQGFIRLHYTRVNPVTIGRSNPSALSSPAIPSNGVSQLQPKFSFHSLSSKPTSKNVGLYQILSSPKLNPKLQQALGLPRVNVSFASAFRLVSTKSSGFRKVDGSFARKVVDKPVKAVSSTFARYREAIGLHIDAFWKKNSLVVFGAAGVFVCIFLWRIMFGIASTFVGLSEGMAKYGFLALSSAIVAFSGLYLRSRFTINPDKVYRMTMRKINTAAEILEVMGAPLSGSDLRAYVMSGGGITFKKFKPTIRSKRCFLLFPVQGSEQKGLVSVEVKKKKGQYDMKLLAVDIPMASGPDQRLFLIGDEEEYRIGGGLISVLRDPVVKAMAATKEFDNLDRIEEEEDAERELQEAERKHREEIEKLEKEGS

SEQ ID NO: 47752 - protein, 210 aa, Arabidopsis thaliana
  peptide (1)..(210): Ceres Seq. ID no. 12734456
  misc_feature (1)..(208): Homolog of NCBI NO: 34896160 NR Description: hypothetical protein~similar to Arabidopsis
  misc_feature (173)..(207): Homolog of NCBI NO: 15228922 NR Description: putative protein; protein id: At3g56430.1
  misc_feature (1)..(208): Homolog of NCBI NO: 15228922 NR Description: putative protein; protein id: At3g56430.1
  misc_feature (1)..(210): Homolog of NCBI NO: 15226745 NR Description: unknown protein
MFGIASTFVGLSEGMAKYGFLALSSAIVAFSGLYLRSRFTINPDKVYRMTMRKINTAAEILEVMGAPLSGSDLRAYVMSGGGITFKKFKPTIRSKRCFLLFPVQGSEQKGLVSVEVKKKKGQYDMKLLAVDIPMASGPDQRLFLIGDEEEYRIGGGLISVLRDPVVKAMAATKEFDNLDRIEEEEDAERELQEAERKHREEIEKLEKEGS

SEQ ID NO: 47753 - protein, 196 aa, Arabidopsis thaliana
  peptide (1)..(196): Ceres Seq. ID no. 12734457
  misc_feature (1)..(194): Homolog of NCBI NO: 34896160 NR Description: hypothetical protein~similar to Arabidopsis
  misc_feature (159)..(193): Homolog of NCBI NO: 15228922 NR Description: putative protein; protein id: At3g56430.1
  misc_feature (1)..(194): Homolog of NCBI NO: 15228922 NR Description: putative protein; protein id: At3g56430.1
  misc_feature (1)..(196): Homolog of NCBI NO: 15226745 NR Description: unknown protein
MAKYGFLALSSAIVAFSGLYLRSRFTINPDKVYRMTMRKINTAAEILEVMGAPLSGSDLRAYVMSGGGITFKKFKPTIRSKRCFLLFPVQGSEQKGLVSVEVKKKKGQYDMKLLAVDIPMASGPDQRLFLIGDEEEYRIGGGLISVLRDPVVKAMAATKEFDNLDRIEEEEDAERELQEAERKHREEIEKLEKEGS

SEQ ID NO: 47754 - DNA, 1725 bp, Arabidopsis thaliana
  misc_feature (1)..(1725): Ceres Seq. ID no. 13647945
  misc_feature: MA Experiment ID: 20000169 Result: Down-regulated in Transcription
  misc_feature: MA Experiment 20000169 PARAMETER Experiment Name: At_100uM_ABA_P Parameter: Age (day) Value: 14
  misc_feature: MA Experiment 20000169 PARAMETER Experiment Name: At_100uM_ABA_P Parameter: Organism Value: A. thaliana
  misc_feature: MA Experiment 20000169 PARAMETER Experiment Name: At_100uM_ABA_P Parameter: Plant Line Value: WS
  misc_feature: MA Experiment 20000169 PARAMETER Experiment Name: At_100uM_ABA_P Parameter: Timepoint (hr) Value: 6
  misc_feature: MA Experiment 20000169 PARAMETER Experiment Name: At_100uM_ABA_P Parameter: Tissue Value: Aerial
  misc_feature: MA Experiment 20000169 PARAMETER Experiment Name: At_100uM_ABA_P Parameter: Treatment Value: 100uM ABA vs. No Treatment
  misc_feature: MA Experiment ID: 20000227 Result: Down-regulated in Transcription
  misc_feature: MA Experiment 20000227 PARAMETER Experiment Name: At_Root-Tips-vs-Tops_P Parameter: Tissue Value: Root Tips vs. Root Tops
  misc_feature: MA Experiment ID: 20000234 Result: Down-regulated in Transcription
  misc_feature: MA Experiment 20000234 PARAMETER Experiment Name: At_Siliques_P Parameter: Age (day) Value: 21
  misc_feature: MA Experiment 20000234 PARAMETER Experiment Name: At_Siliques_P Parameter: Organism Value: A. thaliana
  misc_feature: MA Experiment 20000234 PARAMETER Experiment Name: At_Siliques_P Parameter: Plant Line Value: WS
  misc_feature: MA Experiment 20000234 PARAMETER Experiment Name: At_Siliques_P Parameter: Tissue Value: Less Than 5mm Siliques vs. Whole Plant
  misc_feature: MA Experiment ID: 20000235 Result: Down-regulated in Transcription
  misc_feature: MA Experiment 20000235 PARAMETER Experiment Name: At_Siliques_P Parameter: Age (day) Value: 21
  misc_feature: MA Experiment 20000235 PARAMETER Experiment Name: At_Siliques_P Parameter: Organism Value: A. thaliana
  misc_feature: MA Experiment 20000235 PARAMETER Experiment Name: At_Siliques_P Parameter: Plant Line Value: WS
  misc_feature: MA Experiment 20000235 PARAMETER Experiment Name: At_Siliques_P Parameter: Tissue Value: 5-10mm Siliques vs. Whole Plant
  misc_feature: MA Experiment ID: 20000264 Result: Down-regulated in Transcription
  misc_feature: MA Experiment 20000264 PARAMETER Experiment Name: At_Open_Flower_P Parameter: Age (day) Value: 21
  misc_feature: MA Experiment 20000264 PARAMETER Experiment Name: At_Open_Flower_P Parameter: Plant Line Value: WS
  misc_feature: MA Experiment 20000264 PARAMETER Experiment Name: At_Open_Flower_P Parameter: Tissue Value: Open Flower vs. Whole Plant
  misc_feature: MA Experiment ID: 20000265 Result: Down-regulated in Transcription
  misc_feature: MA Experiment 20000265 PARAMETER Experiment Name: At_Open_Flower_P Parameter: Age (day) Value: 21
  misc_feature: MA Experiment 20000265 PARAMETER Experiment Name: At_Open_Flower_P Parameter: Plant Line Value: WS
  misc_feature: MA Experiment 20000265 PARAMETER Experiment Name: At_Open_Flower_P Parameter: Tissue Value: Closed Flower vs. Whole Plant
  misc_feature: MA Experiment ID: 20000267 Result: Down-regulated in Transcription
  misc_feature: MA Experiment 20000267 PARAMETER Experiment Name: At_Drought_P Parameter: Age (day) Value: 7
  misc_feature: MA Experiment 20000267 PARAMETER Experiment Name: At_Drought_P Parameter: Organism Value: A. thaliana
  misc_feature: MA Experiment 20000267 PARAMETER Experiment Name: At_Drought_P Parameter: Plant Line Value: WS
  misc_feature: MA Experiment 20000267 PARAMETER Experiment Name: At_Drought_P Parameter: Timepoint (hr) Value: 6
  misc_feature: MA Experiment 20000267 PARAMETER Experiment Name: At_Drought_P Parameter: Tissue Value: Whole Plant
  misc_feature: MA Experiment 20000267 PARAMETER Experiment Name: At_Drought_P Parameter: Treatment Value: Drought vs. No Drought
  misc_feature: MA Experiment ID: 20000286 Result: Down-regulated in Transcription
  misc_feature: MA Experiment 20000286 PARAMETER Experiment Name: At_Open_Flower_P Parameter: Age (day) Value: 21
  misc_feature: MA Experiment 20000286 PARAMETER Experiment Name: At_Open_Flower_P Parameter: Plant Line Value: WS
  misc_feature: MA Experiment 20000286 PARAMETER Experiment Name: At_Open_Flower_P Parameter: Tissue Value: Half Open vs. Whole Plant
  misc_feature: MA Experiment ID: 20000436 Result: Down-regulated in Transcription
  misc_feature: MA Experiment 20000436 PARAMETER Experiment Name: At_Drought_P Parameter: Age (day) Value: 7
  misc_feature: MA Experiment 20000436 PARAMETER Experiment Name: At_Drought_P Parameter: Organism Value: A. thaliana
  misc_feature: MA Experiment 20000436 PARAMETER Experiment Name: At_Drought_P Parameter: Plant Line Value: WS
  misc_feature: MA Experiment 20000436 PARAMETER Experiment Name: At_Drought_P Parameter: Timepoint (hr) Value: 12
  misc_feature: MA Experiment 20000436 PARAMETER Experiment Name: At_Drought_P Parameter: Tissue Value: Whole Plant
  misc_feature: MA Experiment 20000436 PARAMETER Experiment Name: At_Drought_P Parameter: Treatment Value: Drought vs. No Drought
  misc_feature: MA Experiment ID: 20000437 Result: Down-regulated in Transcription
  misc_feature: MA Experiment 20000437 PARAMETER Experiment Name: At_Drought_P Parameter: Age (day) Value: 8
  misc_feature: MA Experiment 20000437 PARAMETER Experiment Name: At_Drought_P Parameter: Organism Value: A. thaliana
  misc_feature: MA Experiment 20000437 PARAMETER Experiment Name: At_Drought_P Parameter: Plant Line Value: WS
  misc_feature: MA Experiment 20000437 PARAMETER Experiment Name: At_Drought_P Parameter: Timepoint (hr) Value: 24
  misc_feature: MA Experiment 20000437 PARAMETER Experiment Name: At_Drought_P Parameter: Tissue Value: Whole Plant
  misc_feature: MA Experiment 20000437 PARAMETER Experiment Name: At_Drought_P Parameter: Treatment Value: Drought vs. No Drought
  misc_feature: MA Experiment ID: 20000439 Result: Up-regulated in Transcription
  misc_feature: MA Experiment 20000439 PARAMETER Experiment Name: At_Roots__P Parameter: Age (day) Value: 14 vs. 21
  misc_feature: MA Experiment 20000439 PARAMETER Experiment Name: At_Roots__P Parameter: Organism Value: A. thaliana
  misc_feature: MA Experiment 20000439 PARAMETER Experiment Name: At_Roots__P Parameter: Tissue Value: Roots vs. Whole Plant
  misc_feature: MA Experiment ID: 20000453 Result: Down-regulated in Transcription
  misc_feature: MA Experiment 20000453 PARAMETER Experiment Name: At_100uM_ABA_P Parameter: Age (day) Value: 15
  misc_feature: MA Experiment 20000453 PARAMETER Experiment Name: At_100uM_ABA_P Parameter: Organism Value: A. thaliana
  misc_feature: MA Experiment 20000453 PARAMETER Experiment Name: At_100uM_ABA_P Parameter: Plant Line Value: WS
  misc_feature: MA Experiment 20000453 PARAMETER Experiment Name: At_100uM_ABA_P Parameter: Timepoint (hr) Value: 24
  misc_feature: MA Experiment 20000453 PARAMETER Experiment Name: At_100uM_ABA_P Parameter: Tissue Value: Aerial
  misc_feature: MA Experiment 20000453 PARAMETER Experiment Name: At_100uM_ABA_P Parameter: Treatment Value: 100uM ABA vs. No Treatment
  misc_feature: MA Experiment ID: 20000455 Result: Down-regulated in Transcription
  misc_feature: MA Experiment 20000455 PARAMETER Experiment Name: At_100uM_ABA_P Parameter: Age (day) Value: 16
  misc_feature: MA Experiment 20000455 PARAMETER Experiment Name: At_100uM_ABA_P Parameter: Organism Value: A. thaliana
  misc_feature: MA Experiment 20000455 PARAMETER Experiment Name: At_100uM_ABA_P Parameter: Plant Line Value: WS
  misc_feature: MA Experiment 20000455 PARAMETER Experiment Name: At_100uM_ABA_P Parameter: Timepoint (hr) Value: 48
  misc_feature: MA Experiment 20000455 PARAMETER Experiment Name: At_100uM_ABA_P Parameter: Tissue Value: Aerial
  misc_feature: MA Experiment 20000455 PARAMETER Experiment Name: At_100uM_ABA_P Parameter: Treatment Value: 100uM ABA vs. No Treatment
  misc_feature: MA Experiment ID: 20000527 Result: Down-regulated in Transcription
  misc_feature: MA Experiment 20000527 PARAMETER Experiment Name: At_10percent_PEG_P Parameter: Age (day) Value: 20
  misc_feature: MA Experiment 20000527 PARAMETER Experiment Name: At_10percent_PEG_P Parameter: Organism Value: A. thaliana
  misc_feature: MA Experiment 20000527 PARAMETER Experiment Name: At_10percent_PEG_P Parameter: Plant Line Value: WS
  misc_feature: MA Experiment 20000527 PARAMETER Experiment Name: At_10percent_PEG_P Parameter: Timepoint (day) Value: 20
  misc_feature: MA Experiment 20000527 PARAMETER Experiment Name: At_10percent_PEG_P Parameter: Tissue Value: Whole Plant
  misc_feature: MA Experiment 20000527 PARAMETER Experiment Name: At_10percent_PEG_P Parameter: Treatment Value: 10percent PEG vs. No Treatment
  misc_feature: MA Experiment ID: 20000575 Result: Down-regulated in Transcription
  misc_feature: MA Experiment 20000575 PARAMETER Experiment Name: At_100uM_ABA_Mutants__P Parameter: Organism Value: A. thaliana
  misc_feature: MA Experiment 20000575 PARAMETER Experiment Name: At_100uM_ABA_Mutants__P Parameter: Plant Line Value: CS22
  misc_feature: MA Experiment 20000575 PARAMETER Experiment Name: At_100uM_ABA_Mutants__P Parameter: Timepoint (hr) Value: 6
  misc_feature: MA Experiment 20000575 PARAMETER Experiment Name: At_100uM_ABA_Mutants__P Parameter: Tissue Value: Whole Plant
  misc_feature: MA Experiment 20000575 PARAMETER Experiment Name: At_100uM_ABA_Mutants__P Parameter: Treatment Value: 1uM ABA vs. No Treatment
  misc_feature: MA Experiment ID: 20000709 Result: Down-regulated in Transcription
  misc_feature: MA Experiment 20000709 PARAMETER Experiment Name: At_15mM_NH4NO3_L-to-H_P Parameter: Age (hr) Value: 14
  misc_feature: MA Experiment 20000709 PARAMETER Experiment Name: At_15mM_NH4NO3_L-to-H_P Parameter: Organism Value: A. thaliana
  misc_feature: MA Experiment 20000709 PARAMETER Experiment Name: At_15mM_NH4NO3_L-to-H_P Parameter: Plant Line Value: WS
  misc_feature: MA Experiment 20000709 PARAMETER Experiment Name: At_15mM_NH4NO3_L-to-H_P Parameter: Timepoint (hr) Value: 4
  misc_feature: MA Experiment 20000709 PARAMETER Experiment Name: At_15mM_NH4NO3_L-to-H_P Parameter: Tissue Value: Aerial
  misc_feature: MA Experiment 20000709 PARAMETER Experiment Name: At_15mM_NH4NO3_L-to-H_P Parameter: Treatment Value: 15mM NH4NO3 vs. 30mM Mannitol
  misc_feature: MA Experiment ID: 20000794 Result: Down-regulated in Transcription
  misc_feature: MA Experiment 20000794 PARAMETER Experiment Name: At_Petals_P Parameter: Age (day) Value: 23-25 days
  misc_feature: MA Experiment 20000794 PARAMETER Experiment Name: At_Petals_P Parameter: Plant Line Value: WS
  misc_feature: MA Experiment 20000794 PARAMETER Experiment Name: At_Petals_P Parameter: Tissue Value: Petals vs. Whole plant
  misc_feature: MA Experiment ID: 20001247 Result: Up-regulated in Transcription
  misc_feature: MA Experiment 20001247 PARAMETER Experiment Name: At_Far-red-induction_P Parameter: Age (day) Value: 7
  misc_feature: MA Experiment 20001247 PARAMETER Experiment Name: At_Far-red-induction_P Parameter: Light Value: Far-red vs. White
  misc_feature: MA Experiment 20001247 PARAMETER Experiment Name: At_Far-red-induction_P Parameter: Organism Value: A. thaliana
  misc_feature: MA Experiment 20001247 PARAMETER Experiment Name: At_Far-red-induction_P Parameter: Plant Line Value: Columbia
  misc_feature: MA Experiment 20001247 PARAMETER Experiment Name: At_Far-red-induction_P Parameter: Timepoint (hr) Value: 1
  misc_feature: MA Experiment 20001247 PARAMETER Experiment Name: At_Far-red-induction_P Parameter: Tissue Value: Whole Plant
  misc_feature: MA Experiment ID: 20001450 Result: Up-regulated in Transcription
  misc_feature: MA Experiment 20001450 PARAMETER Experiment Name: At_Far-red-induction_P Parameter: Age (day) Value: 7
  misc_feature: MA Experiment 20001450 PARAMETER Experiment Name: At_Far-red-induction_P Parameter: Light Value: Far-red vs. White
  misc_feature: MA Experiment 20001450 PARAMETER Experiment Name: At_Far-red-induction_P Parameter: Organism Value: A. thaliana
  misc_feature: MA Experiment 20001450 PARAMETER Experiment Name: At_Far-red-induction_P Parameter: Plant Line Value: Columbia
  misc_feature: MA Experiment 20001450 PARAMETER Experiment Name: At_Far-red-induction_P Parameter: Timepoint (hr) Value: 8
  misc_feature: MA Experiment 20001450 PARAMETER Experiment Name: At_Far-red-induction_P Parameter: Tissue Value: Whole Plant
  misc_feature: MA Experiment ID: 20001554 Result: Down-regulated in Transcription
  misc_feature: MA Experiment 20001554 PARAMETER Experiment Name: At_Drought_Soil_Dry_P Parameter: Age (day) Value: 21
  misc_feature: MA Experiment 20001554 PARAMETER Experiment Name: At_Drought_Soil_Dry_P Parameter: Organism Value: A. thaliana
  misc_feature: MA Experiment 20001554 PARAMETER Experiment Name: At_Drought_Soil_Dry_P Parameter: Plant Line Value: WS
  misc_feature: MA Experiment 20001554 PARAMETER Experiment Name: At_Drought_Soil_Dry_P Parameter: Post Timepoint (hr) Value: None
  misc_feature: MA Experiment 20001554 PARAMETER Experiment Name: At_Drought_Soil_Dry_P Parameter: Post-Treatment Value: None
  misc_feature: MA Experiment 20001554 PARAMETER Experiment Name: At_Drought_Soil_Dry_P Parameter: Timepoint (day) Value: 7
  misc_feature: MA Experiment 20001554 PARAMETER Experiment Name: At_Drought_Soil_Dry_P Parameter: Treatment Value: Drought vs. No Drought
  misc_feature: MA Experiment ID: 20001555 Result: Down-regulated in Transcription
  misc_feature: MA Experiment 20001555 PARAMETER Experiment Name: At_Drought_Soil_Dry_P Parameter: Age (day) Value: 24
  misc_feature: MA Experiment 20001555 PARAMETER Experiment Name: At_Drought_Soil_Dry_P Parameter: Organism Value: A. thaliana
  misc_feature: MA Experiment 20001555 PARAMETER Experiment Name: At_Drought_Soil_Dry_P Parameter: Plant Line Value: WS
  misc_feature: MA Experiment 20001555 PARAMETER Experiment Name: At_Drought_Soil_Dry_P Parameter: Post Timepoint (hr) Value: None
  misc_feature: MA Experiment 20001555 PARAMETER Experiment Name: At_Drought_Soil_Dry_P Parameter: Post-Treatment Value: None
  misc_feature: MA Experiment 20001555 PARAMETER Experiment Name: At_Drought_Soil_Dry_P Parameter: Timepoint (day) Value: 10
  misc_feature: MA Experiment 20001555 PARAMETER Experiment Name: At_Drought_Soil_Dry_P Parameter: Treatment Value: Drought vs. No Drought
  misc_feature: MA Experiment ID: 20001556 Result: Down-regulated in Transcription
  misc_feature: MA Experiment 20001556 PARAMETER Experiment Name: At_Drought_Soil_Dry_P Parameter: Age (day) Value: 26
  misc_feature: MA Experiment 20001556 PARAMETER Experiment Name: At_Drought_Soil_Dry_P Parameter: Organism Value: A. thaliana
  misc_feature: MA Experiment 20001556 PARAMETER Experiment Name: At_Drought_Soil_Dry_P Parameter: Plant Line Value: WS
  misc_feature: MA Experiment 20001556 PARAMETER Experiment Name: At_Drought_Soil_Dry_P Parameter: Post Timepoint (hr) Value: None
  misc_feature: MA Experiment 20001556 PARAMETER Experiment Name: At_Drought_Soil_Dry_P Parameter: Post-Treatment Value: None
  misc_feature: MA Experiment 20001556 PARAMETER Experiment Name: At_Drought_Soil_Dry_P Parameter: Timepoint (day) Value: 12
  misc_feature: MA Experiment 20001556 PARAMETER Experiment Name: At_Drought_Soil_Dry_P Parameter: Treatment Value: Drought vs. No Drought
  misc_feature: MA Experiment ID: 20001557 Result: Down-regulated in Transcription
  misc_feature: MA Experiment 20001557 PARAMETER Experiment Name: At_Drought_Soil_Dry_P Parameter: Age (day) Value: 27
  misc_feature: MA Experiment 20001557 PARAMETER Experiment Name: At_Drought_Soil_Dry_P Parameter: Organism Value: A. thaliana
  misc_feature: MA Experiment 20001557 PARAMETER Experiment Name: At_Drought_Soil_Dry_P Parameter: Plant Line Value: WS
  misc_feature: MA Experiment 20001557 PARAMETER Experiment Name: At_Drought_Soil_Dry_P Parameter: Post Timepoint (hr) Value: 3
  misc_feature: MA Experiment 20001557 PARAMETER Experiment Name: At_Drought_Soil_Dry_P Parameter: Post-Treatment Value: Re-Water vs. No Drought
  misc_feature: MA Experiment 20001557 PARAMETER Experiment Name: At_Drought_Soil_Dry_P Parameter: Timepoint (day) Value: 13
  misc_feature: MA Experiment 20001557 PARAMETER Experiment Name: At_Drought_Soil_Dry_P Parameter: Treatment Value: Drought vs. No Drought
  misc_feature: MA Experiment ID: 20001558 Result: Down-regulated in Transcription
  misc_feature: MA Experiment 20001558 PARAMETER Experiment Name: At_Drought_Soil_Dry_P Parameter: Age (day) Value: 27
  misc_feature: MA Experiment 20001558 PARAMETER Experiment Name: At_Drought_Soil_Dry_P Parameter: Organism Value: A. thaliana
  misc_feature: MA Experiment 20001558 PARAMETER Experiment Name: At_Drought_Soil_Dry_P Parameter: Plant Line Value: WS
  misc_feature: MA Experiment 20001558 PARAMETER Experiment Name: At_Drought_Soil_Dry_P Parameter: Post Timepoint (hr) Value: 6
  misc_feature: MA Experiment 20001558 PARAMETER Experiment Name: At_Drought_Soil_Dry_P Parameter: Post-Treatment Value: Re-Water vs. No Drought
  misc_feature: MA Experiment 20001558 PARAMETER Experiment Name: At_Drought_Soil_Dry_P Parameter: Timepoint (day) Value: 13
  misc_feature: MA Experiment 20001558 PARAMETER Experiment Name: At_Drought_Soil_Dry_P Parameter: Treatment Value: Drought vs. No Drought
  misc_feature: MA Experiment ID: 20001559 Result: Down-regulated in Transcription
  misc_feature: MA Experiment 20001559 PARAMETER Experiment Name: At_Drought_Soil_Dry_P Parameter: Age (day) Value: 28
  misc_feature: MA Experiment 20001559 PARAMETER Experiment Name: At_Drought_Soil_Dry_P Parameter: Organism Value: A. thaliana
  misc_feature: MA Experiment 20001559 PARAMETER Experiment Name: At_Drought_Soil_Dry_P Parameter: Plant Line Value: WS
  misc_feature: MA Experiment 20001559 PARAMETER Experiment Name: At_Drought_Soil_Dry_P Parameter: Post Timepoint (hr) Value: 29
  misc_feature: MA Experiment 20001559 PARAMETER Experiment Name: At_Drought_Soil_Dry_P Parameter: Post-Treatment Value: Re-Water vs. No Drought
  misc_feature: MA Experiment 20001559 PARAMETER Experiment Name: At_Drought_Soil_Dry_P Parameter: Timepoint (day) Value: 14
  misc_feature: MA Experiment 20001559 PARAMETER Experiment Name: At_Drought_Soil_Dry_P Parameter: Treatment Value: Drought vs. No Drought
  misc_feature: MA Experiment ID: 20001761 Result: Down-regulated in Transcription
  misc_feature: MA Experiment 20001761 PARAMETER Experiment Name: At_50mM_NH4NO3_L-to-H_P Parameter: Timepoint (hr) Value: 4
  misc_feature: MA Experiment 20001761 PARAMETER Experiment Name: At_50mM_NH4NO3_L-to-H_P Parameter: Tissue Value: Siliques
  misc_feature: MA Experiment 20001761 PARAMETER Experiment Name: At_50mM_NH4NO3_L-to-H_P Parameter: Treatment Value: 50mM NH4NO3 vs 100mM Mannitol
  misc_feature: MA Experiment ID: 20001904 Result: Down-regulated in Transcription
  misc_feature: MA Experiment 20001904 PARAMETER Experiment Name: At_Drought_Reproduction_P Parameter: Age (day) Value: 37
  misc_feature: MA Experiment 20001904 PARAMETER Experiment Name: At_Drought_Reproduction_P Parameter: Organism Value: A. thaliana
  misc_feature: MA Experiment 20001904 PARAMETER Experiment Name: At_Drought_Reproduction_P Parameter: Plant Line Value: WS
  misc_feature: MA Experiment 20001904 PARAMETER Experiment Name: At_Drought_Reproduction_P Parameter: Timepoint (day) Value: 7
  misc_feature: MA Experiment 20001904 PARAMETER Experiment Name: At_Drought_Reproduction_P Parameter: Tissue Value: Rosettes
  misc_feature: MA Experiment 20001904 PARAMETER Experiment Name: At_Drought_Reproduction_P Parameter: Treatment Value: Drought vs. No Drought
gaaaccgacacaataacaacaacaacaacaacaaaaaaaaaaaaaaaaaaggccaacgttcagtgatctaggctatgaagattacaaaaccacatgtggccatgttcgctagccccggaatgggccacatcatcccggtgatcgagctcggaaaacgcttagctggttcccacggcttcgatgtcaccattttcgtccttgaaaccgacgcagcctcagctcaatctcaattccttaactcaccaggctgcgacgcggcccttgttgatatcgttggcctcccaacgcccgatatctccggtttagtcgacccatcagccttttttgggatcaagctcttggtcatgatgcgtgagaccattcctaccatccggtcaaagatagaggagatgcaacacaaaccaacggctctgatcgtagacttgtttggtttggacgcgataccgctcggtggtgagttcaacatgttgacttatatcttcatcgcttcaaacgcacgttttctcgcggtggctttgtttttcccaacgttggacaaagacatggaagaagagcacataatcaagaagcaacctatggttatgcctggatgtgaaccggttcggtttgaagatacacttgaaacattccttgacccaaacagccaactctaccgggaatttgttcctttcggttcggttttcccaacgtgtgatggtattattgtgaatacatgggatgatatggagcccaaaactttgaaatctcttcaagacccaaagctcttgggtcgaattgctggtgtaccggtttatccaattggtcctttgtctagaccggttgatccatctaaaactaatcatccggttttggattggttaaacaaacagccggacgagtcggtactttacatttcatttggaagcggtggctctctctcggctaaacaactaaccgaattggcttggggacttgagatgagtcagcaacggttcgtttgggtggttcgacccccggtggacggttcagcttgcagtgcatatttatccgctaacagtggtaaaatacgagacggtacacctgattatctcccggaaggttttgttagccggactcatgagagaggctttatggtctcttcttgggctccccaagcggagatcttggcccaccaagccgtaggtgggtttctaactcactgcggttggaattcgattctcgagagcgtcgttggtggcgttccgatgatcgcgtggccactttttgcggagcagatgatgaacgcgacactcctcaacgaagagcttggcgttgccgtccgctctaagaaactaccgtcggagggagtgattacgagggcggagatcgaggcgttggtgagaaagatcatggtggaggaggaaggtgctgagatgagaaagaagataaagaagctgaaagagaccgctgccgaatcgctgagttgcgacggtggagtggcgcatgaatcgttgtcaagaatcgccgacgagagcgagcatcttttggagcgtgtcaggtgcatggcacgtggtgcctaggaacgcttaccgtttatagtatgttacttataaactgcgtgtcgttttacccttttgggtatcttgtattatatagtttccgagtcttggttgccacatggtatcacgtggttttgttttggtcaatgctagtccctatcagtaatgtattttacaatgtaaaataaataattagtgtttaatttgt

SEQ ID NO: 47755 - protein, 487 aa, Arabidopsis thaliana
  peptide (1)..(487): Ceres Seq. ID no. 13647946
  misc_feature (26)..(484): Pfam Name: UDP-glucoronosyl and UDP-glucosyl transferase Pfam Description: UDP-glucoronosyl and UDP-glucosyl transferase
  misc_feature (7)..(456): Homolog of NCBI NO: 15234527 NR Description: glycosyltransferase family [Arabidopsis thaliana]
  misc_feature (6)..(48): Homolog of NCBI NO: 25286815 NR Description: probable flavonol 3-O-glucosyltransferase
  misc_feature (89)..(466): Homolog of NCBI NO: 25286815 NR Description: probable flavonol 3-O-glucosyltransferase
  misc_feature (5)..(466): Homolog of NCBI NO: 25286819 NR Description: probable flavonol 3-O-glucosyltransferase
  misc_feature (4)..(474): Homolog of NCBI NO: 2501494 NR Description: Flavonol 3-O-glucosyltransferase 5 (UDP-glucose
  misc_feature (10)..(487): Homolog of NCBI NO: 21553566 NR Description: UTP-glucose glucosyltransferase [Arabidopsis
  misc_feature (1)..(487): Homolog of NCBI NO: 15240305 NR Description: UDP-glycosyltransferase family [Arabidopsis
  misc_feature (1)..(487): Homolog of NCBI NO: 15240051 NR Description: UDP-glycosyltransferase family [Arabidopsis
  misc_feature (10)..(487): Homolog of NCBI NO: 7433913 NR Description: UTP-glucose glucosyltransferase-like protein -
  misc_feature (1)..(487): Homolog of NCBI NO: 18409172 NR Description: UDP-glycosyltransferase family [Arabidopsis
MKITKPHVAMFASPGMGHIIPVIELGKRLAGSHGFDVTIFVLETDAASAQSQFLNSPGCDAALVDIVGLPTPDISGLVDPSAFFGIKLLVMMRETIPTIRSKIEEMQHKPTALIVDLFGLDAIPLGGEFNMLTYIFIASNARFLAVALFFPTLDKDMEEEHIIKKQPMVMPGCEPVRFEDTLETFLDPNSQLYREFVPFGSVFPTCDGIIVNTWDDMEPKTLKSLQDPKLLGRIAGVPVYPIGPLSRPVDPSKTNHPVLDWLNKQPDESVLYISFGSGGSLSAKQLTELAWGLEMSQQRFVWVVRPPVDGSACSAYLSANSGKIRDGTPDYLPEGFVSRTHERGFMVSSWAPQAEILAHQAVGGFLTHCGWNSILESVVGGVPMIAWPLFAEQMMNATLLNEELGVAVRSKKLPSEGVITRAEIEALVRKIMVEEEGAEMRKKIKKLKETAAESLSCDGGVAHESLSRIADESEHLLERVRCMARGA

SEQ ID NO: 47756 - protein, 478 aa, Arabidopsis thaliana
  peptide (1)..(478): Ceres Seq. ID no. 13647947
  misc_feature (17)..(475): Pfam Name: UDP-glucoronosyl and UDP-glucosyl transferase Pfam Description: UDP-glucoronosyl and UDP-glucosyl transferase
  misc_feature (1)..(447): Homolog of NCBI NO: 15234527 NR Description: glycosyltransferase family [Arabidopsis thaliana]
  misc_feature (1)..(39): Homolog of NCBI NO: 25286815 NR Description: probable flavonol 3-O-glucosyltransferase
  misc_feature (80)..(457): Homolog of NCBI NO: 25286815 NR Description: probable flavonol 3-O-glucosyltransferase
  misc_feature (1)..(457): Homolog of NCBI NO: 25286819 NR Description: probable flavonol 3-O-glucosyltransferase
  misc_feature (1)..(465): Homolog of NCBI NO: 2501494 NR Description: Flavonol 3-O-glucosyltransferase 5 (UDP-glucose
  misc_feature (1)..(478): Homolog of NCBI NO: 21553566 NR Description: UTP-glucose glucosyltransferase [Arabidopsis
  misc_feature (1)..(478): Homolog of NCBI NO: 15240305 NR Description: UDP-glycosyltransferase family [Arabidopsis
  misc_feature (1)..(478): Homolog of NCBI NO: 15240051 NR Description: UDP-glycosyltransferase family [Arabidopsis
  misc_feature (1)..(478): Homolog of NCBI NO: 7433913 NR Description: UTP-glucose glucosyltransferase-like protein -
  misc_feature (1)..(478): Homolog of NCBI NO: 18409172 NR Description: UDP-glycosyltransferase family [Arabidopsis
MFASPGMGHIIPVIELGKRLAGSHGFDVTIFVLETDAASAQSQFLNSPGCDAALVDIVGLPTPDISGLVDPSAFFGIKLLVMMRETIPTIRSKIEEMQHKPTALIVDLFGLDAIPLGGEFNMLTYIFIASNARFLAVALFFPTLDKDMEEEHIIKKQPMVMPGCEPVRFEDTLETFLDPNSQLYREFVPFGSVFPTCDGIIVNTWDDMEPKTLKSLQDPKLLGRIAGVPVYPIGPLSRPVDPSKTNHPVLDWLNKQPDESVLYISFGSGGSLSAKQLTELAWGLEMSQQRFVWVVRPPVDGSACSAYLSANSGKIRDGTPDYLPEGFVSRTHERGFMVSSWAPQAEILAHQAVGGFLTHCGWNSILESVVGGVPMIAWPLFAEQMMNATLLNEELGVAVRSKKLPSEGVITRAEIEALVRKIMVEEEGAEMRKKIKKLKETAAESLSCDGGVAHESLSRIADESEHLLERVRCMARGA

SEQ ID NO: 47757 - protein, 472 aa, Arabidopsis thaliana
  peptide (1)..(472): Ceres Seq. ID no. 13647948
  misc_feature (11)..(469): Pfam Name: UDP-glucoronosyl and UDP-glucosyl transferase Pfam Description: UDP-glucoronosyl and UDP-glucosyl transferase
  misc_feature (1)..(441): Homolog of NCBI NO: 15234527 NR Description: glycosyltransferase family [Arabidopsis thaliana]
  misc_feature (1)..(33): Homolog of NCBI NO: 25286815 NR Description: probable flavonol 3-O-glucosyltransferase
  misc_feature (74)..(451): Homolog of NCBI NO: 25286815 NR Description: probable flavonol 3-O-glucosyltransferase
  misc_feature (1)..(451): Homolog of NCBI NO: 25286819 NR Description: probable flavonol 3-O-glucosyltransferase
  misc_feature (1)..(459): Homolog of NCBI NO: 2501494 NR Description: Flavonol 3-O-glucosyltransferase 5 (UDP-glucose
  misc_feature (1)..(472): Homolog of NCBI NO: 21553566 NR Description: UTP-glucose glucosyltransferase [Arabidopsis
  misc_feature (1)..(472): Homolog of NCBI NO: 15240305 NR Description: UDP-glycosyltransferase family [Arabidopsis
  misc_feature (1)..(472): Homolog of NCBI NO: 15240051 NR Description: UDP-glycosyltransferase family [Arabidopsis
  misc_feature (1)..(472): Homolog of NCBI NO: 7433913 NR Description: UTP-glucose glucosyltransferase-like protein -
  misc_feature (1)..(472): Homolog of NCBI NO: 18409172 NR Description: UDP-glycosyltransferase family [Arabidopsis
MGHIIPVIELGKRLAGSHGFDVTIFVLETDAASAQSQFLNSPGCDAALVDIVGLPTPDISGLVDPSAFFGIKLLVMMRETIPTIRSKIEEMQHKPTALIVDLFGLDAIPLGGEFNMLTYIFIASNARFLAVALFFPTLDKDMEEEHIIKKQPMVMPGCEPVRFEDTLETFLDPNSQLYREFVPFGSVFPTCDGIIVNTWDDMEPKTLKSLQDPKLLGRIAGVPVYPIGPLSRPVDPSKTNHPVLDWLNKQPDESVLYISFGSGGSLSAKQLTELAWGLEMSQQRFVWVVRPPVDGSACSAYLSANSGKIRDGTPDYLPEGFVSRTHERGFMVSSWAPQAEILAHQAVGGFLTHCGWNSILESVVGGVPMIAWPLFAEQMMNATLLNEELGVAVRSKKLPSEGVITRAEIEALVRKIMVEEEGAEMRKKIKKLKETAAESLSCDGGVAHESLSRIADESEHLLERVRCMARGA

SEQ ID NO: 47758 - DNA, 1432 bp, Arabidopsis thaliana
  misc_feature (1)..(1432): Ceres Seq. ID no. 13648403
  misc_feature: MA Experiment ID: 20000306 Result: Up-regulated in Transcription
  misc_feature: MA Experiment 20000306 PARAMETER Experiment Name: At_Germinating_Seeds_Sub_P Parameter: Age (hr) Value: 6 vs. 0
  misc_feature: MA Experiment 20000306 PARAMETER Experiment Name: At_Germinating_Seeds_Sub_P Parameter: Organism Value: A. thaliana
  misc_feature: MA Experiment 20000306 PARAMETER Experiment Name: At_Germinating_Seeds_Sub_P Parameter: Plant Line Value: WS
  misc_feature: MA Experiment 20000306 PARAMETER Experiment Name: At_Germinating_Seeds_Sub_P Parameter: Tissue Value: Germinating Seeds
  misc_feature: MA Experiment ID: 20000307 Result: Up-regulated in Transcription
  misc_feature: MA Experiment 20000307 PARAMETER Experiment Name: At_Germinating_Seeds_Sub_P Parameter: Age (hr) Value: 24 vs. 0
  misc_feature: MA Experiment 20000307 PARAMETER Experiment Name: At_Germinating_Seeds_Sub_P Parameter: Organism Value: A. thaliana
  misc_feature: MA Experiment 20000307 PARAMETER Experiment Name: At_Germinating_Seeds_Sub_P Parameter: Plant Line Value: WS
  misc_feature: MA Experiment 20000307 PARAMETER Experiment Name: At_Germinating_Seeds_Sub_P Parameter: Tissue Value: Germinating Seeds
  misc_feature: MA Experiment ID: 20000328 Result: Down-regulated in Transcription
  misc_feature: MA Experiment 20000328 PARAMETER Experiment Name: At_42deg_Heat_Sub_P Parameter: Age (day) Value: 14
  misc_feature: MA Experiment 20000328 PARAMETER Experiment Name: At_42deg_Heat_Sub_P Parameter: Organism Value: A. thaliana
  misc_feature: MA Experiment 20000328 PARAMETER Experiment Name: At_42deg_Heat_Sub_P Parameter: Plant Line Value: WS
  misc_feature: MA Experiment 20000328 PARAMETER Experiment Name: At_42deg_Heat_Sub_P Parameter: Temperature (deg C) Value: 42 vs. 22
  misc_feature: MA Experiment 20000328 PARAMETER Experiment Name: At_42deg_Heat_Sub_P Parameter: Timepoint (hr) Value: 6
  misc_feature: MA Experiment 20000328 PARAMETER Experiment Name: At_42deg_Heat_Sub_P Parameter: Tissue Value: Aerial
  misc_feature: MA Experiment ID: 20000355 Result: Up-regulated in Transcription
  misc_feature: MA Experiment 20000355 PARAMETER Experiment Name: At_Siliques_Sub_P Parameter: Age (day) Value: 21
  misc_feature: MA Experiment 20000355 PARAMETER Experiment Name: At_Siliques_Sub_P Parameter: Organism Value: A. thaliana
  misc_feature: MA Experiment 20000355 PARAMETER Experiment Name: At_Siliques_Sub_P Parameter: Plant Line Value: WS
  misc_feature: MA Experiment 20000355 PARAMETER Experiment Name: At_Siliques_Sub_P Parameter: Tissue Value: Less Than 5mm Siliques vs. Whole Plant
gactctttttctttttcaaaatcatttttattttcgacttcatgcaagtgataaaagactaaagtgtaagactaataagactatcgtcatcgatccttaatccaaattttcgcgctcgattcgtcttttctgtatctcccggagctccgggacttgggcggaagaggagatgaggagcttgttgttgtggattgcggtggtcgtgtgcttgctatgttcagtcgcggcggtggttcaaagcggatctagcgacggatttgggaaacccagagatactgagactgcgatatcttttctggagtataaattgatggcgccttcggttccaatgatacctctcaccttgattcacggagctgactctaaaggagctgtgtgcttagatgggacgctacctggttatcatctagatcgtggttttggatcaggtgctaacagttggcttatccagcttgagggtggaggatggtgtaacaaccataggagctgtgtgtatcgcaaaacaagtcgacgtggttcctctaaattcatggaaaaagctttggccttcactggaattttgagcaatagatctgaagagaatcctgacttctttaattggaacaggatcaagttgcgttactgcgatggtgcgtctttctctggtgatagtcaggacgagttcgcaacttttctatcgaggacaacgaatctggcaagtggctatggaagaattcctgtctttaggcatgaagcaagcaaaccaggtctttgcatttcattgagtctatcagctggaggattagcttctattttgcactgtgatgagttcagggaactattacctagttccacgaaagtaaaatgcttaagtgatgctggaatgtttctggactcagtggatgtctctgggggccactcgcttaggaatatgttccaaggtgttgttacagtgcagaacctccaaaaggacttgtccagtacttgtacaaaccatttggatcctacttcgtgcttttttccccagaacttggtttcagacattaaaaccccaatgtttcttctcaacacagcatatgactcttggcagatccaagagagcttagctcctcctactgctgatccaggcggtatctggaaggcatgcaaatcagatcactcgcgatgtaattcatcacagatccaattcttccaagaattcaggaatcaaatgctgtttgctgtaaactcattctcaaactctgaccagaacggtctttatataaactcttgcttcgcgcattgtcagactgaaagacaggacacttggtttgctcaagattctcctcaactaaacggaaagagagtcgcagagtctgtaggtgactggtacttcgaccgagcaaaaaatgtcaaagctatcgattgtccttacccttgtgacacaacatgtcacaatctgattttcgagtga

SEQ ID NO: 47759 - protein, 420 aa, Arabidopsis thaliana
  peptide (1)..(420): Ceres Seq. ID no. 13648404
  misc_feature (38)..(404): Pfam Name: Pectinacetylesterase Pfam Description: Pectinacetylesterase
  misc_feature (54)..(418): Homolog of NCBI NO: 34894654 NR Description: P0028G04.28 [Oryza sativa (japonica
  misc_feature (55)..(419): Homolog of NCBI NO: 34913332 NR Description: putative pectin acetylesterase precursor
  misc_feature (18)..(419): Homolog of NCBI NO: 7487997 NR Description: pectin acetylesterase homolog F21E10.11 -
  misc_feature (53)..(419): Homolog of NCBI NO: 21703105 NR Description: At1g57590/T8L23_6 [Arabidopsis thaliana]
  misc_feature (53)..(419): Homolog of NCBI NO: 30696158 NR Description: pectinacetylesterase, putative [Arabidopsis
  misc_feature (53)..(419): Homolog of NCBI NO: 25347293 NR Description: probable pectinacetylesterase precursor T8L23.6
  misc_feature (54)..(419): Homolog of NCBI NO: 18397406 NR Description: pectinacetylesterase, putative [Arabidopsis
  misc_feature (29)..(420): Homolog of NCBI NO: 15226462 NR Description: pectinacetylesterase, putative [Arabidopsis
  misc_feature (1)..(420): Homolog of NCBI NO: 28392968 NR Description: putative pectinacetylesterase [Arabidopsis
  misc_feature (1)..(420): Homolog of NCBI NO: 15228677 NR Description: pectinacetylesterase family [Arabidopsis
MRSLLLWIAVVVCLLCSVAAVVQSGSSDGFGKPRDTETAISFLEYKLMAPSVPMIPLTLIHGADSKGAVCLDGTLPGYHLDRGFGSGANSWLIQLEGGGWCNNHRSCVYRKTSRRGSSKFMEKALAFTGILSNRSEENPDFFNWNRIKLRYCDGASFSGDSQDEFATFLSRTTNLASGYGRIPVFRHEASKPGLCISLSLSAGGLASILHCDEFRELLPSSTKVKCLSDAGMFLDSVDVSGGHSLRNMFQGVVTVQNLQKDLSSTCTNHLDPTSCFFPQNLVSDIKTPMFLLNTAYDSWQIQESLAPPTADPGGIWKACKSDHSRCNSSQIQFFQEFRNQMLFAVNSFSNSDQNGLYINSCFAHCQTERQDTWFAQDSPQLNGKRVAESVGDWYFDRAKNVKAIDCPYPCDTTCHNLIFE

SEQ ID NO: 47760 - protein, 373 aa, Arabidopsis thaliana
  peptide (1)..(373): Ceres Seq. ID no. 13648405
  misc_feature (1)..(357): Pfam Name: Pectinacetylesterase Pfam Description: Pectinacetylesterase
  misc_feature (7)..(371): Homolog of NCBI NO: 34894654 NR Description: P0028G04.28 [Oryza sativa (japonica
  misc_feature (8)..(372): Homolog of NCBI NO: 34913332 NR Description: putative pectin acetylesterase precursor
  misc_feature (1)..(372): Homolog of NCBI NO: 7487997 NR Description: pectin acetylesterase homolog F21E10.11 -
  misc_feature (6)..(372): Homolog of NCBI NO: 21703105 NR Description: At1g57590/T8L23_6 [Arabidopsis thaliana]
  misc_feature (6)..(372): Homolog of NCBI NO: 30696158 NR Description: pectinacetylesterase, putative [Arabidopsis
  misc_feature (6)..(372): Homolog of NCBI NO: 25347293 NR Description: probable pectinacetylesterase precursor T8L23.6
  misc_feature (7)..(372): Homolog of NCBI NO: 18397406 NR Description: pectinacetylesterase, putative [Arabidopsis
  misc_feature (1)..(373): Homolog of NCBI NO: 15226462 NR Description: pectinacetylesterase, putative [Arabidopsis
  misc_feature (1)..(373): Homolog of NCBI NO: 28392968 NR Description: putative pectinacetylesterase [Arabidopsis
  misc_feature (1)..(373): Homolog of NCBI NO: 15228677 NR Description: pectinacetylesterase family [Arabidopsis
MAPSVPMIPLTLIHGADSKGAVCLDGTLPGYHLDRGFGSGANSWLIQLEGGGWCNNHRSCVYRKTSRRGSSKFMEKALAFTGILSNRSEENPDFFNWNRIKLRYCDGASFSGDSQDEFATFLSRTTNLASGYGRIPVFRHEASKPGLCISLSLSAGGLASILHCDEFRELLPSSTKVKCLSDAGMFLDSVDVSGGHSLRNMFQGVVTVQNLQKDLSSTCTNHLDPTSCFFPQNLVSDIKTPMFLLNTAYDSWQIQESLAPPTADPGGIWKACKSDHSRCNSSQIQFFQEFRNQMLFAVNSFSNSDQNGLYINSCFAHCQTERQDTWFAQDSPQLNGKRVAESVGDWYFDRAKNVKAIDCPYPCDTTCHNLIFE

SEQ ID NO: 47761 - protein, 367 aa, Arabidopsis thaliana
  peptide (1)..(367): Ceres Seq. ID no. 13648406
  misc_feature (1)..(351): Pfam Name: Pectinacetylesterase Pfam Description: Pectinacetylesterase
  misc_feature (1)..(365): Homolog of NCBI NO: 34894654 NR Description: P0028G04.28 [Oryza sativa (japonica
  misc_feature (2)..(366): Homolog of NCBI NO: 34913332 NR Description: putative pectin acetylesterase precursor
  misc_feature (1)..(366): Homolog of NCBI NO: 7487997 NR Description: pectin acetylesterase homolog F21E10.11 -
  misc_feature (1)..(366): Homolog of NCBI NO: 21703105 NR Description: At1g57590/T8L23_6 [Arabidopsis thaliana]
  misc_feature (1)..(366): Homolog of NCBI NO: 30696158 NR Description: pectinacetylesterase, putative [Arabidopsis
  misc_feature (1)..(366): Homolog of NCBI NO: 25347293 NR Description: probable pectinacetylesterase precursor T8L23.6
  misc_feature (1)..(366): Homolog of NCBI NO: 18397406 NR Description: pectinacetylesterase, putative [Arabidopsis
  misc_feature (1)..(367): Homolog of NCBI NO: 15226462 NR Description: pectinacetylesterase, putative [Arabidopsis
  misc_feature (1)..(367): Homolog of NCBI NO: 28392968 NR Description: putative pectinacetylesterase [Arabidopsis
  misc_feature (1)..(367): Homolog of NCBI NO: 15228677 NR Description: pectinacetylesterase family [Arabidopsis
MIPLTLIHGADSKGAVCLDGTLPGYHLDRGFGSGANSWLIQLEGGGWCNNHRSCVYRKTSRRGSSKFMEKALAFTGILSNRSEENPDFFNWNRIKLRYCDGASFSGDSQDEFATFLSRTTNLASGYGRIPVFRHEASKPGLCISLSLSAGGLASILHCDEFRELLPSSTKVKCLSDAGMFLDSVDVSGGHSLRNMFQGVVTVQNLQKDLSSTCTNHLDPTSCFFPQNLVSDIKTPMFLLNTAYDSWQIQESLAPPTADPGGIWKACKSDHSRCNSSQIQFFQEFRNQMLFAVNSFSNSDQNGLYINSCFAHCQTERQDTWFAQDSPQLNGKRVAESVGDWYFDRAKNVKAIDCPYPCDTTCHNLIFE

SEQ ID NO: 47762 - DNA, 1496 bp, Arabidopsis thaliana
  misc_feature (1)..(1496): Ceres Seq. ID no. 13648407
  misc_feature: MA Experiment ID: 20000171 Result: Down-regulated in Transcription
  misc_feature: MA Experiment 20000171 PARAMETER Experiment Name: At_42deg_Heat_P Parameter: Age (day) Value: 14
  misc_feature: MA Experiment 20000171 PARAMETER Experiment Name: At_42deg_Heat_P Parameter: Organism Value: A. thaliana
  misc_feature: MA Experiment 20000171 PARAMETER Experiment Name: At_42deg_Heat_P Parameter: Plant Line Value: WS
  misc_feature: MA Experiment 20000171 PARAMETER Experiment Name: At_42deg_Heat_P Parameter: Temperature (deg C) Value: 42 vs. 22
  misc_feature: MA Experiment 20000171 PARAMETER Experiment Name: At_42deg_Heat_P Parameter: Timepoint (hr) Value: 1
  misc_feature: MA Experiment 20000171 PARAMETER Experiment Name: At_42deg_Heat_P Parameter: Tissue Value: Aerial
  misc_feature: MA Experiment ID: 20000180 Result: Up-regulated in Transcription
  misc_feature: MA Experiment 20000180 PARAMETER Experiment Name: At_Germinating_Seeds_P Parameter: Age (hr) Value: 24 vs. 0
  misc_feature: MA Experiment 20000180 PARAMETER Experiment Name: At_Germinating_Seeds_P Parameter: Tissue Value: Germinating Seeds
  misc_feature: MA Experiment ID: 20000184 Result: Up-regulated in Transcription
  misc_feature: MA Experiment 20000184 PARAMETER Experiment Name: At_Shoots__P Parameter: Age (day) Value: 7
  misc_feature: MA Experiment 20000184 PARAMETER Experiment Name: At_Shoots__P Parameter: Tissue Value: Shoots vs. Whole Plant
  misc_feature: MA Experiment ID: 20000185 Result: Up-regulated in Transcription
  misc_feature: MA Experiment 20000185 PARAMETER Experiment Name: At_Roots__P Parameter: Age (day) Value: 7 vs. 21
  misc_feature: MA Experiment 20000185 PARAMETER Experiment Name: At_Roots__P Parameter: Organism Value: A. thaliana
  misc_feature: MA Experiment 20000185 PARAMETER Experiment Name: At_Roots__P Parameter: Tissue Value: Roots vs. Whole Plant
  misc_feature: MA Experiment ID: 20000265 Result: Up-regulated in Transcription
  misc_feature: MA Experiment 20000265 PARAMETER Experiment Name: At_Open_Flower_P Parameter: Age (day) Value: 21
  misc_feature: MA Experiment 20000265 PARAMETER Experiment Name: At_Open_Flower_P Parameter: Plant Line Value: WS
  misc_feature: MA Experiment 20000265 PARAMETER Experiment Name: At_Open_Flower_P Parameter: Tissue Value: Closed Flower vs. Whole Plant
  misc_feature: MA Experiment ID: 20000437 Result: Down-regulated in Transcription
  misc_feature: MA Experiment 20000437 PARAMETER Experiment Name: At_Drought_P Parameter: Age (day) Value: 8
  misc_feature: MA Experiment 20000437 PARAMETER Experiment Name: At_Drought_P Parameter: Organism Value: A. thaliana
  misc_feature: MA Experiment 20000437 PARAMETER Experiment Name: At_Drought_P Parameter: Plant Line Value: WS
  misc_feature: MA Experiment 20000437 PARAMETER Experiment Name: At_Drought_P Parameter: Timepoint (hr) Value: 24
  misc_feature: MA Experiment 20000437 PARAMETER Experiment Name: At_Drought_P Parameter: Tissue Value: Whole Plant
  misc_feature: MA Experiment 20000437 PARAMETER Experiment Name: At_Drought_P Parameter: Treatment Value: Drought vs. No Drought
  misc_feature: MA Experiment ID: 20000439 Result: Up-regulated in Transcription
  misc_feature: MA Experiment 20000439 PARAMETER Experiment Name: At_Roots__P Parameter: Age (day) Value: 14 vs. 21
  misc_feature: MA Experiment 20000439 PARAMETER Experiment Name: At_Roots__P Parameter: Organism Value: A. thaliana
  misc_feature: MA Experiment 20000439 PARAMETER Experiment Name: At_Roots__P Parameter: Tissue Value: Roots vs. Whole Plant
  misc_feature: MA Experiment ID: 20000794 Result: Up-regulated in Transcription
  misc_feature: MA Experiment 20000794 PARAMETER Experiment Name: At_Petals_P Parameter: Age (day) Value: 23-25 days
  misc_feature: MA Experiment 20000794 PARAMETER Experiment Name: At_Petals_P Parameter: Plant Line Value: WS
  misc_feature: MA Experiment 20000794 PARAMETER Experiment Name: At_Petals_P Parameter: Tissue Value: Petals vs. Whole plant
  misc_feature: MA Experiment ID: 20001557 Result: Up-regulated in Transcription
  misc_feature: MA Experiment 20001557 PARAMETER Experiment Name: At_Drought_Soil_Dry_P Parameter: Age (day) Value: 27
  misc_feature: MA Experiment 20001557 PARAMETER Experiment Name: At_Drought_Soil_Dry_P Parameter: Organism Value: A. thaliana
  misc_feature: MA Experiment 20001557 PARAMETER Experiment Name: At_Drought_Soil_Dry_P Parameter: Plant Line Value: WS
  misc_feature: MA Experiment 20001557 PARAMETER Experiment Name: At_Drought_Soil_Dry_P Parameter: Post Timepoint (hr) Value: 3
  misc_feature: MA Experiment 20001557 PARAMETER Experiment Name: At_Drought_Soil_Dry_P Parameter: Post-Treatment Value: Re-Water vs. No Drought
  misc_feature: MA Experiment 20001557 PARAMETER Experiment Name: At_Drought_Soil_Dry_P Parameter: Timepoint (day) Value: 13
  misc_feature: MA Experiment 20001557 PARAMETER Experiment Name: At_Drought_Soil_Dry_P Parameter: Treatment Value: Drought vs. No Drought
  misc_feature: MA Experiment ID: 20001558 Result: Up-regulated in Transcription
  misc_feature: MA Experiment 20001558 PARAMETER Experiment Name: At_Drought_Soil_Dry_P Parameter: Age (day) Value: 27
  misc_feature: MA Experiment 20001558 PARAMETER Experiment Name: At_Drought_Soil_Dry_P Parameter: Organism Value: A. thaliana
  misc_feature: MA Experiment 20001558 PARAMETER Experiment Name: At_Drought_Soil_Dry_P Parameter: Plant Line Value: WS
  misc_feature: MA Experiment 20001558 PARAMETER Experiment Name: At_Drought_Soil_Dry_P Parameter: Post Timepoint (hr) Value: 6
  misc_feature: MA Experiment 20001558 PARAMETER Experiment Name: At_Drought_Soil_Dry_P Parameter: Post-Treatment Value: Re-Water vs. No Drought
  misc_feature: MA Experiment 20001558 PARAMETER Experiment Name: At_Drought_Soil_Dry_P Parameter: Timepoint (day) Value: 13
  misc_feature: MA Experiment 20001558 PARAMETER Experiment Name: At_Drought_Soil_Dry_P Parameter: Treatment Value: Drought vs. No Drought
  misc_feature: MA Experiment ID: 20001911 Result: Down-regulated in Transcription
  misc_feature: MA Experiment 20001911 PARAMETER Experiment Name: At_Drought_Reproduction_P Parameter: Age (day) Value: 40
  misc_feature: MA Experiment 20001911 PARAMETER Experiment Name: At_Drought_Reproduction_P Parameter: Organism Value: A. thaliana
  misc_feature: MA Experiment 20001911 PARAMETER Experiment Name: At_Drought_Reproduction_P Parameter: Plant Line Value: WS
  misc_feature: MA Experiment 20001911 PARAMETER Experiment Name: At_Drought_Reproduction_P Parameter: Timepoint (day) Value: 10
  misc_feature: MA Experiment 20001911 PARAMETER Experiment Name: At_Drought_Reproduction_P Parameter: Tissue Value: Flowers
  misc_feature: MA Experiment 20001911 PARAMETER Experiment Name: At_Drought_Reproduction_P Parameter: Treatment Value: Drought vs. No Drought
ttcctttaacttcatttgaaaactttctttccctaaccaagaaaccaacaatgtcaatgtcgtctccttctttttgacttcaatcttacatttttttatgttttaacttccttgctaatttagaatcatgagttttctaaagctcctgtgaagattttgaatacagatttctcaaagttctctcctttaccattagacccgttaatggatccgacttcaagatccgacccgcgccgtcaattattgggggtttaaaagcttccgactttctttctttctcatctatcacggcggcgtcgatgaaacgatccgttagacctctcttcagtgctcttctcttcgccttcttcgccgctacactcatctgcagagtggcgattcgtcggagcagcttctccttcgcttccgccatcgctgagcttggttcctccggtctcatgactgaagatattgtattcaacgagacattgctcgagttcgccgccattgatcccggagaacctaacttcaaacaggaagtcgatttgatttccgattacgaccacactcggagaagccaccgtcgacatttcagctccatgtcaataagaccaagcgagcaacaacgccgtgtgagtagagacattgcttcctcctccaagtttccggtaacgcttcgttcttctcaggcttatcgttactggtcagagttcaaaagaaatttacggctttgggctcgtagaagagcttatgaacctaatatcatgttagatttgatcagattagttaagaatccgattgatgttcacaatggtgttgtttcgatttcgagtgaaagatacttatcttgtgcagtggttgggaatagtggtacattgctaaatagtcaatacggagatctcattgataagcatgagattgtgattcggttgaacaatgcgaaaacagagaggtttgagaagaaggttggatcgaaaacaaatatatctttcataaatagtaacattttgcatcaatgtgggagaagggagagttgctattgtcatccttatggtgaaacagtgcctattgtgatgtacatttgccaaccgattcatgttttggattacactttgtgtaaaccatctcatcgagctcctctgcttatcacggatccgaggttcgatgtcatgtgtgctagaatcgtgaagtattactcggtgaagaagttcttggaagagaagaaagcgaaagggtttgtcgattggagtaaagatcatgaaggctcgttgtttcactattcgtcgggtatgcaggctgtgatgcttgcagtggggatttgtgagaaagttagtgtcttcgggtttgggaagttgaattcaaccaagcaccattaccatactaatcagaaagcagagctgaagcttcatgactatgaagcagagtatagattgtatcgagacctggaaaacagtcccagggccattccattcttaccaaaagaattcaagatccctttggtacaagtttaccattga

SEQ ID NO: 47763 - protein, 398 aa, Arabidopsis thaliana
  peptide (1)..(398): Ceres Seq. ID no. 13648408
  misc_feature (117)..(381): Pfam Name: Glycosyltransferase family 29 (sialyltransferase) Pfam Description: Glycosyltransferase family 29
  misc_feature (177)..(225): Homolog of NCBI NO: 37652853 NR Description: alpha2,3-sialyltransferase [Xenopus laevis]
  misc_feature (291)..(352): Homolog of NCBI NO: 37652853 NR Description: alpha2,3-sialyltransferase [Xenopus laevis]
  misc_feature (161)..(220): Homolog of NCBI NO: 37652849 NR Description: alpha2,3-sialyltransferase [Oncorhynchus mykiss]
  misc_feature (312)..(371): Homolog of NCBI NO: 37652849 NR Description: alpha2,3-sialyltransferase [Oncorhynchus mykiss]
  misc_feature (312)..(371): Homolog of NCBI NO: 40804564 NR Description: beta-galactosamide alpha-2,6-sialyltransferase
  misc_feature (121)..(220): Homolog of NCBI NO: 40804564 NR Description: beta-galactosamide alpha-2,6-sialyltransferase
  misc_feature (284)..(398): Homolog of NCBI NO: 28416597 NR Description: At1g08280 [Arabidopsis thaliana]
  misc_feature (173)..(397): Homolog of NCBI NO: 21743080 NR Description: OSJNBb0002J11.10 [Oryza sativa (japonica
  misc_feature (132)..(398): Homolog of NCBI NO: 34908454 NR Description: P0683F02.18 [Oryza sativa (japonica
  misc_feature (1)..(398): Homolog of NCBI NO: 15223174 NR Description: sialyltransferase family [Arabidopsis thaliana]
MKRSVRPLFSALLFAFFAATLICRVAIRRSSFSFASAIAELGSSGLMTEDIVFNETLLEFAAIDPGEPNFKQEVDLISDYDHTRRSHRRHFSSMSIRPSEQQRRVSRDIASSSKFPVTLRSSQAYRYWSEFKRNLRLWARRRAYEPNIMLDLIRLVKNPIDVHNGVVSISSERYLSCAVVGNSGTLLNSQYGDLIDKHEIVIRLNNAKTERFEKKVGSKTNISFINSNILHQCGRRESCYCHPYGETVPIVMYICQPIHVLDYTLCKPSHRAPLLITDPRFDVMCARIVKYYSVKKFLEEKKAKGFVDWSKDHEGSLFHYSSGMQAVMLAVGICEKVSVFGFGKLNSTKHHYHTNQKAELKLHDYEAEYRLYRDLENSPRAIPFLPKEFKIPLVQVYH

SEQ ID NO: 47764 - protein, 352 aa, Arabidopsis thaliana
  peptide (1)..(352): Ceres Seq. ID no. 13648409
  misc_feature (71)..(335): Pfam Name: Glycosyltransferase family 29 (sialyltransferase) Pfam Description: Glycosyltransferase family 29
  misc_feature (131)..(179): Homolog of NCBI NO: 37652853 NR Description: alpha2,3-sialyltransferase [Xenopus laevis]
  misc_feature (245)..(306): Homolog of NCBI NO: 37652853 NR Description: alpha2,3-sialyltransferase [Xenopus laevis]
  misc_feature (115)..(174): Homolog of NCBI NO: 37652849 NR Description: alpha2,3-sialyltransferase [Oncorhynchus mykiss]
  misc_feature (266)..(325): Homolog of NCBI NO: 37652849 NR Description: alpha2,3-sialyltransferase [Oncorhynchus mykiss]
  misc_feature (266)..(325): Homolog of NCBI NO: 40804564 NR Description: beta-galactosamide alpha-2,6-sialyltransferase
  misc_feature (75)..(174): Homolog of NCBI NO: 40804564 NR Description: beta-galactosamide alpha-2,6-sialyltransferase
  misc_feature (238)..(352): Homolog of NCBI NO: 28416597 NR Description: At1g08280 [Arabidopsis thaliana]
  misc_feature (127)..(351): Homolog of NCBI NO: 21743080 NR Description: OSJNBb0002J11.10 [Oryza sativa (japonica
  misc_feature (86)..(352): Homolog of NCBI NO: 34908454 NR Description: P0683F02.18 [Oryza sativa (japonica
  misc_feature (1)..(352): Homolog of NCBI NO: 15223174 NR Description: sialyltransferase family [Arabidopsis thaliana]
MTEDIVFNETLLEFAAIDPGEPNFKQEVDLISDYDHTRRSHRRHFSSMSIRPSEQQRRVSRDIASSSKFPVTLRSSQAYRYWSEFKRNLRLWARRRAYEPNIMLDLIRLVKNPIDVHNGVVSISSERYLSCAVVGNSGTLLNSQYGDLIDKHEIVIRLNNAKTERFEKKVGSKTNISFINSNILHQCGRRESCYCHPYGETVPIVMYICQPIHVLDYTLCKPSHRAPLLITDPRFDVMCARIVKYYSVKKFLEEKKAKGFVDWSKDHEGSLFHYSSGMQAVMLAVGICEKVSVFGFGKLNSTKHHYHTNQKAELKLHDYEAEYRLYRDLENSPRAIPFLPKEFKIPLVQVYH

SEQ ID NO: 47765 - protein, 305 aa, Arabidopsis thaliana
  peptide (1)..(305): Ceres Seq. ID no. 13648410
  misc_feature (24)..(288): Pfam Name: Glycosyltransferase family 29 (sialyltransferase) Pfam Description: Glycosyltransferase family 29
  misc_feature (84)..(132): Homolog of NCBI NO: 37652853 NR Description: alpha2,3-sialyltransferase [Xenopus laevis]
  misc_feature (198)..(259): Homolog of NCBI NO: 37652853 NR Description: alpha2,3-sialyltransferase [Xenopus laevis]
  misc_feature (68)..(127): Homolog of NCBI NO: 37652849 NR Description: alpha2,3-sialyltransferase [Oncorhynchus mykiss]
  misc_feature (219)..(278): Homolog of NCBI NO: 37652849 NR Description: alpha2,3-sialyltransferase [Oncorhynchus mykiss]
  misc_feature (219)..(278): Homolog of NCBI NO: 40804564 NR Description: beta-galactosamide alpha-2,6-sialyltransferase
  misc_feature (28)..(127): Homolog of NCBI NO: 40804564 NR Description: beta-galactosamide alpha-2,6-sialyltransferase
  misc_feature (191)..(305): Homolog of NCBI NO: 28416597 NR Description: At1g08280 [Arabidopsis thaliana]
  misc_feature (80)..(304): Homolog of NCBI NO: 21743080 NR Description: OSJNBb0002J11.10 [Oryza sativa (japonica
  misc_feature (39)..(305): Homolog of NCBI NO: 34908454 NR Description: P0683F02.18 [Oryza sativa (japonica
  misc_feature (1)..(305): Homolog of NCBI NO: 15223174 NR Description: sialyltransferase family [Arabidopsis thaliana]
MSIRPSEQQRRVSRDIASSSKFPVTLRSSQAYRYWSEFKRNLRLWARRRAYEPNIMLDLIRLVKNPIDVHNGVVSISSERYLSCAVVGNSGTLLNSQYGDLIDKHEIVIRLNNAKTERFEKKVGSKTNISFINSNILHQCGRRESCYCHPYGETVPIVMYICQPIHVLDYTLCKPSHRAPLLITDPRFDVMCARIVKYYSVKKFLEEKKAKGFVDWSKDHEGSLFHYSSGMQAVMLAVGICEKVSVFGFGKLNSTKHHYHTNQKAELKLHDYEAEYRLYRDLENSPRAIPFLPKEFKIPLVQVYH

SEQ ID NO: 47766 - DNA, 1972 bp, Arabidopsis thaliana
  misc_feature (1)..(1972): Ceres Seq. ID no. 12651188
  misc_feature: MA Experiment ID: 20000355 Result: Up-regulated in Transcription
  misc_feature: MA Experiment 20000355 PARAMETER Experiment Name: At_Siliques_Sub_P Parameter: Age (day) Value: 21
  misc_feature: MA Experiment 20000355 PARAMETER Experiment Name: At_Siliques_Sub_P Parameter: Organism Value: A. thaliana
  misc_feature: MA Experiment 20000355 PARAMETER Experiment Name: At_Siliques_Sub_P Parameter: Plant Line Value: WS
  misc_feature: MA Experiment 20000355 PARAMETER Experiment Name: At_Siliques_Sub_P Parameter: Tissue Value: Less Than 5mm Siliques vs. Whole Plant
  misc_feature: MA Experiment ID: 20000440 Result: Up-regulated in Transcription
  misc_feature: MA Experiment 20000440 PARAMETER Experiment Name: At_Closed-Flower__Sub_P Parameter: Tissue Value: Closed Flower vs. Whole Plant
aaagcaaaaaaagtaagagaagaaaaacacaaaaaaaaataaaacctttctatttctcttcctcctttgagctttgacctctcctccatctcccccacccttttatgcaacaatgggaaattgttgctctcacggacgggactcagccgataacggagacgcattggaaaacggagcttccgcttcaaatgctgccaattcgactggtccaaccgcggaagcttctgtaccacaatcaaaacatgcacctccttctcctcctcctgcaaccaaacaaggccctataggccctgtcttaggtcgacccatggaagatgtaaaagcttcatattctttagggaaagagctcgggcgaggccaatttggtgtcacacacctctgcacacagaaggcaacaggtcatcaatttgcttgcaagacgattgcaaaaagaaagcttgtaaacaaggaagacattgaggatgtaagaagagaagtgcagataatgcatcacttgactggtcaaccaaacattgtggagcttaaaggggcttatgaggataagcattccgtgcatttggttatggagctttgcgcaggtggagagttgttcgataggattattgctaaaggacattactcggagagagcagctgcttcgttgctaagaacgattgttcagattgtgcatacttgccattccatgggggtgattcacagggatttgaagccagagaactttctcttgctcaacaaagatgagaattctcctctcaaagctactgactttgggttgtcggttttctacaagccaggagaggtattcaaggatattgtggggagtgcttattacatcgcacctgaggttttgaaaagaaagtatggaccagaggcagatatttggagtattggtgtcatgttgtatatcctcttatgtggtgtcccgccattctgggctgagtcggagaacgggatattcaacgcaatccttaggggacatgttgatttctcaagtgatccatggccatccatctcgcctcaggcaaaggatcttgttaagaagatgctcaactctgatccaaagcaaagactaactgctgctcaagttctcaaccatccatggatcaaggaggatggagaggcaccagatgttcctcttgataatgcggtgatgtccaggctcaaacaattcaaagcaatgaacaatttcaagaaagttgcattacgggtgatagcaggctgcttatcagaggaagagatcatggggttgaaggagatgtttaaaggtatggatactgatagtagtggaacaattacactcgaggagttaagacaaggacttgctaagcaaggtacaaggttgtcagaatatgaagttcagcagttaatggaagctgctgatgctgatggtaatggaacaatagactatggcgagtttatcgcagccacaatgcatatcaacagacttgacagagaagaacatctttactcagccttccaacactttgacaaagacaacagtggatatatcacaatggaagagctagagcaagccctacgggagtttggcatgaatgatggcagagacattaaggagatcatttccgaggttgatggagacaatgatggtcggataaactatgatgaatttgtggcaatgatgagaaaaggaaacccggatccaatcccaaagaagcggcgtgaactttcattcaaatgaacacaattgttgaagtagaggaagagaggagatagaaagagagttacacacaggggtcgagaaactcatcttcctttcaaaatgagaaataaggcaaagcaaatatcaaagaaaattattctaaagtggaggagatctttaagggaggagaaggctcaagaaggaaaacaaaatcatttggggcatttggggggaggtgtttgatataatgtacattttcttttctagttgtctactactgcttaaagtgccatgggtttctcaatgtacttc

SEQ ID NO: 47767 - protein, 528 aa, Arabidopsis thaliana
  peptide (1)..(528): Ceres Seq. ID no. 12651189
  misc_feature (73)..(331): Pfam Name: Protein kinase domain Pfam Description: Protein kinase domain
  misc_feature (40)..(520): Homolog of NCBI NO: 19171502 NR Description: calcium-dependent protein kinase [Lycopersicon
  misc_feature (1)..(523): Homolog of NCBI NO: 15450437 NR Description: AT4g23650/F9D16_120 [Arabidopsis thaliana]
  misc_feature (1)..(523): Homolog of NCBI NO: 15236560 NR Description: calcium-dependent protein kinase (CDPK6)
  misc_feature (66)..(525): Homolog of NCBI NO: 7428008 NR Description: calcium-dependent protein kinase (EC 2.7.1.-),
  misc_feature (1)..(526): Homolog of NCBI NO: 5162878 NR Description: calcium-dependent protein kinase [Marchantia
  misc_feature (1)..(526): Homolog of NCBI NO: 5162877 NR Description: calcium-dependent protein kinase [Marchantia
  misc_feature (21)..(525): Homolog of NCBI NO: 34909116 NR Description: putative calcium-dependent protein kinase
  misc_feature (1)..(528): Homolog of NCBI NO: 15239716 NR Description: calcium-dependent protein kinase - like; protein
  misc_feature (1)..(528): Homolog of NCBI NO: 18175903 NR Description: putative calcium-dependent protein kinase
  misc_feature (1)..(528): Homolog of NCBI NO: 15239888 NR Description: calcium-dependent protein kinase
MGNCCSHGRDSADNGDALENGASASNAANSTGPTAEASVPQSKHAPPSPPPATKQGPIGPVLGRPMEDVKASYSLGKELGRGQFGVTHLCTQKATGHQFACKTIAKRKLVNKEDIEDVRREVQIMHHLTGQPNIVELKGAYEDKHSVHLVMELCAGGELFDRIIAKGHYSERAAASLLRTIVQIVHTCHSMGVIHRDLKPENFLLLNKDENSPLKATDFGLSVFYKPGEVFKDIVGSAYYIAPEVLKRKYGPEADIWSIGVMLYILLCGVPPFWAESENGIFNAILRGHVDFSSDPWPSISPQAKDLVKKMLNSDPKQRLTAAQVLNHPWIKEDGEAPDVPLDNAVMSRLKQFKAMNNFKKVALRVIAGCLSEEEIMGLKEMFKGMDTDSSGTITLEELRQGLAKQGTRLSEYEVQQLMEAADADGNGTIDYGEFIAATMHINRLDREEHLYSAFQHFDKDNSGYITMEELEQALREFGMNDGRDIKEIISEVDGDNDGRINYDEFVAMMRKGNPDPIPKKRRELSFK

SEQ ID NO: 47768 - protein, 463 aa, Arabidopsis thaliana
  peptide (1)..(463): Ceres Seq. ID no. 12651190
  misc_feature (8)..(266): Pfam Name: Protein kinase domain Pfam Description: Protein kinase domain
  misc_feature (1)..(455): Homolog of NCBI NO: 19171502 NR Description: calcium-dependent protein kinase [Lycopersicon
  misc_feature (1)..(458): Homolog of NCBI NO: 15450437 NR Description: AT4g23650/F9D16_120 [Arabidopsis thaliana]
  misc_feature (1)..(458): Homolog of NCBI NO: 15236560 NR Description: calcium-dependent protein kinase (CDPK6)
  misc_feature (1)..(460): Homolog of NCBI NO: 7428008 NR Description: calcium-dependent protein kinase (EC 2.7.1.-),
  misc_feature (1)..(461): Homolog of NCBI NO: 5162878 NR Description: calcium-dependent protein kinase [Marchantia
  misc_feature (1)..(461): Homolog of NCBI NO: 5162877 NR Description: calcium-dependent protein kinase [Marchantia
  misc_feature (1)..(460): Homolog of NCBI NO: 34909116 NR Description: putative calcium-dependent protein kinase
  misc_feature (1)..(463): Homolog of NCBI NO: 15239716 NR Description: calcium-dependent protein kinase - like; protein
  misc_feature (1)..(463): Homolog of NCBI NO: 18175903 NR Description: putative calcium-dependent protein kinase
  misc_feature (1)..(463): Homolog of NCBI NO: 15239888 NR Description: calcium-dependent protein kinase
MEDVKASYSLGKELGRGQFGVTHLCTQKATGHQFACKTIAKRKLVNKEDIEDVRREVQIMHHLTGQPNIVELKGAYEDKHSVHLVMELCAGGELFDRIIAKGHYSERAAASLLRTIVQIVHTCHSMGVIHRDLKPENFLLLNKDENSPLKATDFGLSVFYKPGEVFKDIVGSAYYIAPEVLKRKYGPEADIWSIGVMLYILLCGVPPFWAESENGIFNAILRGHVDFSSDPWPSISPQAKDLVKKMLNSDPKQRLTAAQVLNHPWIKEDGEAPDVPLDNAVMSRLKQFKAMNNFKKVALRVIAGCLSEEEIMGLKEMFKGMDTDSSGTITLEELRQGLAKQGTRLSEYEVQQLMEAADADGNGTIDYGEFIAATMHINRLDREEHLYSAFQHFDKDNSGYITMEELEQALREFGMNDGRDIKEIISEVDGDNDGRINYDEFVAMMRKGNPDPIPKKRRELSFK

SEQ ID NO: 47769 - protein, 404 aa, Arabidopsis thaliana
  peptide (1)..(404): Ceres Seq. ID no. 12651191
  misc_feature (1)..(207): Pfam Name: Protein kinase domain Pfam Description: Protein kinase domain
  misc_feature (1)..(396): Homolog of NCBI NO: 19171502 NR Description: calcium-dependent protein kinase [Lycopersicon
  misc_feature (1)..(399): Homolog of NCBI NO: 15450437 NR Description: AT4g23650/F9D16_120 [Arabidopsis thaliana]
  misc_feature (1)..(399): Homolog of NCBI NO: 15236560 NR Description: calcium-dependent protein kinase (CDPK6)
  misc_feature (1)..(401): Homolog of NCBI NO: 7428008 NR Description: calcium-dependent protein kinase (EC 2.7.1.-),
  misc_feature (1)..(402): Homolog of NCBI NO: 5162878 NR Description: calcium-dependent protein kinase [Marchantia
  misc_feature (1)..(402): Homolog of NCBI NO: 5162877 NR Description: calcium-dependent protein kinase [Marchantia
  misc_feature (1)..(401): Homolog of NCBI NO: 34909116 NR Description: putative calcium-dependent protein kinase
  misc_feature (1)..(404): Homolog of NCBI NO: 15239716 NR Description: calcium-dependent protein kinase - like; protein
  misc_feature (1)..(404): Homolog of NCBI NO: 18175903 NR Description: putative calcium-dependent protein kinase
  misc_feature (1)..(404): Homolog of NCBI NO: 15239888 NR Description: calcium-dependent protein kinase
MHHLTGQPNIVELKGAYEDKHSVHLVMELCAGGELFDRIIAKGHYSERAAASLLRTIVQIVHTCHSMGVIHRDLKPENFLLLNKDENSPLKATDFGLSVFYKPGEVFKDIVGSAYYIAPEVLKRKYGPEADIWSIGVMLYILLCGVPPFWAESENGIFNAILRGHVDFSSDPWPSISPQAKDLVKKMLNSDPKQRLTAAQVLNHPWIKEDGEAPDVPLDNAVMSRLKQFKAMNNFKKVALRVIAGCLSEEEIMGLKEMFKGMDTDSSGTITLEELRQGLAKQGTRLSEYEVQQLMEAADADGNGTIDYGEFIAATMHINRLDREEHLYSAFQHFDKDNSGYITMEELEQALREFGMNDGRDIKEIISEVDGDNDGRINYDEFVAMMRKGNPDPIPKKRRELSFK

SEQ ID NO: 47770 - DNA, 1539 bp, Arabidopsis thaliana
  misc_feature (1)..(1539): Ceres Seq. ID no. 12667051
  misc_feature: MA Experiment ID: 20000173 Result: Down-regulated in Transcription
  misc_feature: MA Experiment 20000173 PARAMETER Experiment Name: At_42deg_Heat_P Parameter: Age (day) Value: 14
  misc_feature: MA Experiment 20000173 PARAMETER Experiment Name: At_42deg_Heat_P Parameter: Organism Value: A. thaliana
  misc_feature: MA Experiment 20000173 PARAMETER Experiment Name: At_42deg_Heat_P Parameter: Plant Line Value: WS
  misc_feature: MA Experiment 20000173 PARAMETER Experiment Name: At_42deg_Heat_P Parameter: Temperature (deg C) Value: 42 vs. 22
  misc_feature: MA Experiment 20000173 PARAMETER Experiment Name: At_42deg_Heat_P Parameter: Timepoint (hr) Value: 6
  misc_feature: MA Experiment 20000173 PARAMETER Experiment Name: At_42deg_Heat_P Parameter: Tissue Value: Aerial
  misc_feature: MA Experiment ID: 20000496 Result: Up-regulated in Transcription
  misc_feature: MA Experiment 20000496 PARAMETER Experiment Name: At_Guard_Cells_P Parameter: Harvest Date Value: 7/19/2002
  misc_feature: MA Experiment 20000496 PARAMETER Experiment Name: At_Guard_Cells_P Parameter: Organism Value: Canola
  misc_feature: MA Experiment 20000496 PARAMETER Experiment Name: At_Guard_Cells_P Parameter: Tissue Value: Guard Cells vs. Leaves
atgtcatctgagagttctctgagtgctgacatgtcgaagaaggtctcatttttaggtttgaagggtatgaaactgtgggtactgatttgtttagtagttggcacatttgtagttttggttttctgtatattatctctatggattgcattccgccggaaatcccggagatcatctcacaagctgttacccttcagtcaaataccacgcgtggcgaaagatatcagggttgatgatagagttgggtttcaaaatcataatgaaaatttatctatcacaaatgctgataaatctagtgacagaaactctgggaagatgatgtcttacttgggaagaacgaagtctagtgataatgatagtataagtcaatgtagctctgtgcatcatcatgagagagcttgtagttctcactctggtgaagatggaagctttggagctgcttggagacaaaattccctatcacagggcgggctagtaacagcatctcctttggttggtttgccagaaatatctcatcttggttggggacactggtttactcttagggatcttcagctagccaccaaccgttttgctgctgaaaatgtaatcggtgagggtggttatggagtagtttataagggtagactcatcaacggtaatgatgttgctgtaaagaagcttcttaacaatctgggacaggctgagaaggaattccgggttgaagttgaggctattggtcatgtacggcacaagaatcttgtaaggcttctaggatattgcatagagggtgttaataggatgcttgtttatgagtatgtgaatagtggtaacttagaacaatggctacatggagccatgggaaaacaaagcactctcacttgggaggctcgcatgaaaatccttgttggtactgcgcaggcgcttgcttatttacatgaagcaatagaaccaaaagtagtccacagagacataaaagcaagcaatatcctgattgacgatgacttcaatgcaaagctttctgattttgggttggccaagctcttagactcgggtgagagtcacatcacgaccagagtcatgggaacctttggatatgtcgcacccgaatatgctaatacaggtctattgaatgagaagagtgacatctatagctttggtgtcctgctgctagagactataactggaagagatccagttgactatgaacgtccagctaatgaggtgaatctggtcgaatggctaaagatgatggttggaacaagaagagctgaagaagttgttgactcaaggattgagcctccacccgctacacgtgctctgaaacgtgcacttcttgttgccctgagatgtgtggatcctgaagcacagaaacggcctaaaatgagccaggttgtgcggatgcttgaatccgatgaacacccttttcgtgaggagcggaggaacagaaagagtagaacagcgagtatggagattgttgaaaccactgaggaatcagctgacacaagcaaagggcctggtcactcagagaacactacaaaacctgagaagactcatgtatag

SEQ ID NO: 47771 - protein, 512 aa, Arabidopsis thaliana
  peptide (1)..(512): Ceres Seq. ID no. 12667052
  misc_feature (190)..(461): Pfam Name: Protein kinase domain Pfam Description: Protein kinase domain
  misc_feature (23)..(86): Homolog of NCBI NO: 22331140 NR Description: serine/threonine protein kinase, putative
  misc_feature (161)..(496): Homolog of NCBI NO: 22331140 NR Description: serine/threonine protein kinase, putative
  misc_feature (20)..(506): Homolog of NCBI NO: 15217511 NR Description: putative ser/thr protein kinase; protein id:
  misc_feature (22)..(496): Homolog of NCBI NO: 25404144 NR Description: probable protein kinase F25P12.84
  misc_feature (22)..(496): Homolog of NCBI NO: 18405946 NR Description: expressed protein
  misc_feature (22)..(496): Homolog of NCBI NO: 21593085 NR Description: Putative protein kinase [Arabidopsis thaliana]
  misc_feature (1)..(495): Homolog of NCBI NO: 34910880 NR Description: P0003E08.6 [Oryza sativa (japonica
  misc_feature (1)..(491): Homolog of NCBI NO: 37535714 NR Description: putative kinase [Oryza sativa (japonica
  misc_feature (1)..(507): Homolog of NCBI NO: 15228043 NR Description: putative protein kinase; protein id: At2g42960.1
  misc_feature (1)..(512): Homolog of NCBI NO: 15231637 NR Description: receptor-like protein kinase; protein id:
MSSESSLSADMSKKVSFLGLKGMKLWVLICLVVGTFVVLVFCILSLWIAFRRKSRRSSHKLLPFSQIPRVAKDIRVDDRVGFQNHNENLSITNADKSSDRNSGKMMSYLGRTKSSDNDSISQCSSVHHHERACSSHSGEDGSFGAAWRQNSLSQGGLVTASPLVGLPEISHLGWGHWFTLRDLQLATNRFAAENVIGEGGYGVVYKGRLINGNDVAVKKLLNNLGQAEKEFRVEVEAIGHVRHKNLVRLLGYCIEGVNRMLVYEYVNSGNLEQWLHGAMGKQSTLTWEARMKILVGTAQALAYLHEAIEPKVVHRDIKASNILIDDDFNAKLSDFGLAKLLDSGESHITTRVMGTFGYVAPEYANTGLLNEKSDIYSFGVLLLETITGRDPVDYERPANEVNLVEWLKMMVGTRRAEEVVDSRIEPPPATRALKRALLVALRCVDPEAQKRPKMSQVVRMLESDEHPFREERRNRKSRTASMEIVETTEESADTSKGPGHSENTTKPEKTHV

SEQ ID NO: 47772 - protein, 502 aa, Arabidopsis thaliana
  peptide (1)..(502): Ceres Seq. ID no. 12667053
  misc_feature (180)..(451): Pfam Name: Protein kinase domain Pfam Description: Protein kinase domain
  misc_feature (13)..(76): Homolog of NCBI NO: 22331140 NR Description: serine/threonine protein kinase, putative
  misc_feature (151)..(486): Homolog of NCBI NO: 22331140 NR Description: serine/threonine protein kinase, putative
  misc_feature (10)..(496): Homolog of NCBI NO: 15217511 NR Description: putative ser/thr protein kinase; protein id:
  misc_feature (12)..(486): Homolog of NCBI NO: 25404144 NR Description: probable protein kinase F25P12.84
  misc_feature (12)..(486): Homolog of NCBI NO: 18405946 NR Description: expressed protein
  misc_feature (12)..(486): Homolog of NCBI NO: 21593085 NR Description: Putative protein kinase [Arabidopsis thaliana]
  misc_feature (1)..(485): Homolog of NCBI NO: 34910880 NR Description: P0003E08.6 [Oryza sativa (japonica
  misc_feature (1)..(481): Homolog of NCBI NO: 37535714 NR Description: putative kinase [Oryza sativa (japonica
  misc_feature (1)..(497): Homolog of NCBI NO: 15228043 NR Description: putative protein kinase; protein id: At2g42960.1
  misc_feature (1)..(502): Homolog of NCBI NO: 15231637 NR Description: receptor-like protein kinase; protein id:
MSKKVSFLGLKGMKLWVLICLVVGTFVVLVFCILSLWIAFRRKSRRSSHKLLPFSQIPRVAKDIRVDDRVGFQNHNENLSITNADKSSDRNSGKMMSYLGRTKSSDNDSISQCSSVHHHERACSSHSGEDGSFGAAWRQNSLSQGGLVTASPLVGLPEISHLGWGHWFTLRDLQLATNRFAAENVIGEGGYGVVYKGRLINGNDVAVKKLLNNLGQAEKEFRVEVEAIGHVRHKNLVRLLGYCIEGVNRMLVYEYVNSGNLEQWLHGAMGKQSTLTWEARMKILVGTAQALAYLHEAIEPKVVHRDIKASNILIDDDFNAKLSDFGLAKLLDSGESHITTRVMGTFGYVAPEYANTGLLNEKSDIYSFGVLLLETITGRDPVDYERPANEVNLVEWLKMMVGTRRAEEVVDSRIEPPPATRALKRALLVALRCVDPEAQKRPKMSQVVRMLESDEHPFREERRNRKSRTASMEIVETTEESADTSKGPGHSENTTKPEKTHV

SEQ ID NO: 47773 - protein, 490 aa, Arabidopsis thaliana
  peptide (1)..(490): Ceres Seq. ID no. 12667054
  misc_feature (168)..(439): Pfam Name: Protein kinase domain Pfam Description: Protein kinase domain
  misc_feature (1)..(64): Homolog of NCBI NO: 22331140 NR Description: serine/threonine protein kinase, putative
  misc_feature (139)..(474): Homolog of NCBI NO: 22331140 NR Description: serine/threonine protein kinase, putative
  misc_feature (1)..(484): Homolog of NCBI NO: 15217511 NR Description: putative ser/thr protein kinase; protein id:
  misc_feature (1)..(474): Homolog of NCBI NO: 25404144 NR Description: probable protein kinase F25P12.84
  misc_feature (1)..(474): Homolog of NCBI NO: 18405946 NR Description: expressed protein
  misc_feature (1)..(474): Homolog of NCBI NO: 21593085 NR Description: Putative protein kinase [Arabidopsis thaliana]
  misc_feature (1)..(473): Homolog of NCBI NO: 34910880 NR Description: P0003E08.6 [Oryza sativa (japonica
  misc_feature (1)..(469): Homolog of NCBI NO: 37535714 NR Description: putative kinase [Oryza sativa (japonica
  misc_feature (1)..(485): Homolog of NCBI NO: 15228043 NR Description: putative protein kinase; protein id: At2g42960.1
  misc_feature (1)..(490): Homolog of NCBI NO: 15231637 NR Description: receptor-like protein kinase; protein id:
MKLWVLICLVVGTFVVLVFCILSLWIAFRRKSRRSSHKLLPFSQIPRVAKDIRVDDRVGFQNHNENLSITNADKSSDRNSGKMMSYLGRTKSSDNDSISQCSSVHHHERACSSHSGEDGSFGAAWRQNSLSQGGLVTASPLVGLPEISHLGWGHWFTLRDLQLATNRFAAENVIGEGGYGVVYKGRLINGNDVAVKKLLNNLGQAEKEFRVEVEAIGHVRHKNLVRLLGYCIEGVNRMLVYEYVNSGNLEQWLHGAMGKQSTLTWEARMKILVGTAQALAYLHEAIEPKVVHRDIKASNILIDDDFNAKLSDFGLAKLLDSGESHITTRVMGTFGYVAPEYANTGLLNEKSDIYSFGVLLLETITGRDPVDYERPANEVNLVEWLKMMVGTRRAEEVVDSRIEPPPATRALKRALLVALRCVDPEAQKRPKMSQVVRMLESDEHPFREERRNRKSRTASMEIVETTEESADTSKGPGHSENTTKPEKTHV

SEQ ID NO: 47774 - DNA, 1573 bp, Arabidopsis thaliana
  misc_feature (1)..(1573): Ceres Seq. ID no. 13648419
  misc_feature: MA Experiment ID: 20000173 Result: Down-regulated in Transcription
  misc_feature: MA Experiment 20000173 PARAMETER Experiment Name: At_42deg_Heat_P Parameter: Age (day) Value: 14
  misc_feature: MA Experiment 20000173 PARAMETER Experiment Name: At_42deg_Heat_P Parameter: Organism Value: A. thaliana
  misc_feature: MA Experiment 20000173 PARAMETER Experiment Name: At_42deg_Heat_P Parameter: Plant Line Value: WS
  misc_feature: MA Experiment 20000173 PARAMETER Experiment Name: At_42deg_Heat_P Parameter: Temperature (deg C) Value: 42 vs. 22
  misc_feature: MA Experiment 20000173 PARAMETER Experiment Name: At_42deg_Heat_P Parameter: Timepoint (hr) Value: 6
  misc_feature: MA Experiment 20000173 PARAMETER Experiment Name: At_42deg_Heat_P Parameter: Tissue Value: Aerial
  misc_feature: MA Experiment ID: 20000184 Result: Down-regulated in Transcription
  misc_feature: MA Experiment 20000184 PARAMETER Experiment Name: At_Shoots__P Parameter: Age (day) Value: 7
  misc_feature: MA Experiment 20000184 PARAMETER Experiment Name: At_Shoots__P Parameter: Tissue Value: Shoots vs. Whole Plant
gtttcttcttcgttctccagtttcgtcggataaatctaaaaagaggcaaaatcaaatcgaattctcgaagaagcaaataacgtctgcataaaggtttaaagtttatctcttccgaagaagttatgtctcttacatgcgttaatatgtccgaggatgtctggttgacttgcctcactcacgcattatccaccgagaccgaagagatcatgggtctccttctcggcgacatcgagtactcaaaggacgggggaagtgccacagctatgatctggggagcatcgcctcagtcacggtctgatcggcagaaggatagagttgaaaccaatcctgaacaactggctgctgcttctgctcaggctgatataatgacgatatcaacgggcagaactacacgggtcattggatggtaccactcccatcctcatattaccgttcttccttcccatgtcgatgttcgaacacaagctatgtatcagcttttagattctggttttattggcctcatcttttcctgttttagtgaagatgctaacaaggttggcagaatccaagttatcgctttccagtcttctgatggaaagccgaatagtattcctaaatcaatgagcctggttcttgcaaataaagattctgttatcgatttagaatcttcatttagttcttcggactcgatataccagagatcgtcttctgctcggggagacaatcctgagctcgacacaagtgatacagctacaacttccggatctaagggtggaggacgcgtttcagattttgaggctttctttgtgaacaatactgaggccaacaacaccagaagagatggaacaagtggaaactacagcagcacagcaatagaaattgactcgatggacatgtctgaaagtatgcaagaggcaatgcaccgctcaaatttagaaaccagtggtgtggggtatgttagaaaagaagtcccacttcatgttttgccgacttcatcccttcttcaactcaattcacctttagcatcttttaaaagcctgcaacgagtactctacgaggaggaacgagcagcgtaccaccaatccgtgcagcaaagcaagagagacgggagagttcatcctcttgctttcattcacaacacatcaacatatcaggcttccatgtgcaagttaatagaatactgcttgagtcctgccattaacgcacttcaagataggctgaaggagaacaagatccggttagcaatgctgatggatgaagctgaagttttggaagcacagaaactgaaaggagcagagacaagcgggggagcatctcgtctggttcacggttctggcagccgaagcagaagacgatcgtagaaagatctgtgactaaaggcacatgccttcctctttgtgtatgtttctatttggatatttgttttcttacaactgtatcataggcagacatctgttcttagtttactcatctgtagcattattggggttttttcattttcatggaagattaaccttttccaagagatctgtaatatatcaaattcataatggatatgaggtggaaaagaaaaagtgaaccttgattgcat

SEQ ID NO: 47775 - protein, 406 aa, Arabidopsis thaliana
  peptide (1)..(406): Ceres Seq. ID no. 13648420
  misc_feature (1)..(123): Pfam Name: Mov34/MPN/PAD-1 family Pfam Description: Mov34/MPN/PAD-1 family
  misc_feature (349)..(406): Homolog of NCBI NO: 25406643 NR Description: hypothetical protein F18B13.28 [imported] -
  misc_feature (111)..(320): Homolog of NCBI NO: 25406643 NR Description: hypothetical protein F18B13.28 [imported] -
  misc_feature (349)..(406): Homolog of NCBI NO: 7549631 NR Description: unknown protein [Arabidopsis thaliana]
  misc_feature (8)..(319): Homolog of NCBI NO: 7549631 NR Description: unknown protein [Arabidopsis thaliana]
  misc_feature (8)..(64): Homolog of NCBI NO: 15220090 NR Description: hypothetical protein [Arabidopsis thaliana]
  misc_feature (349)..(406): Homolog of NCBI NO: 15220090 NR Description: hypothetical protein [Arabidopsis thaliana]
  misc_feature (111)..(320): Homolog of NCBI NO: 15220090 NR Description: hypothetical protein [Arabidopsis thaliana]
  misc_feature (8)..(406): Homolog of NCBI NO: 30680023 NR Description: expressed protein [Arabidopsis thaliana]
  misc_feature (1)..(406): Homolog of NCBI NO: 19715647 NR Description: AT3g06820/F3E22_4 [Arabidopsis thaliana]
  misc_feature (1)..(406): Homolog of NCBI NO: 20147355 NR Description: At1g80210/F18B13_28 [Arabidopsis thaliana]
MSLTCVNMSEDVWLTCLTHALSTETEEIMGLLLGDIEYSKDGGSATAMIWGASPQSRSDRQKDRVETNPEQLAAASAQADIMTISTGRTTRVIGWYHSHPHITVLPSHVDVRTQAMYQLLDSGFIGLIFSCFSEDANKVGRIQVIAFQSSDGKPNSIPKSMSLVLANKDSVIDLESSFSSSDSIYQRSSSARGDNPELDTSDTATTSGSKGGGRVSDFEAFFVNNTEANNTRRDGTSGNYSSTAIEIDSMDMSESMQEAMHRSNLETSGVGYVRKEVPLHVLPTSSLLQLNSPLASFKSLQRVLYEEERAAYHQSVQQSKRDGRVHPLAFIHNTSTYQASMCKLIEYCLSPAINALQDRLKENKIRLAMLMDEAEVLEAQKLKGAETSGGASRLVHGSGSRSRRRS

SEQ ID NO: 47776 - protein, 399 aa, Arabidopsis thaliana
  peptide (1)..(399): Ceres Seq. ID no. 13648421
  misc_feature (1)..(116): Pfam Name: Mov34/MPN/PAD-1 family Pfam Description: Mov34/MPN/PAD-1 family
  misc_feature (342)..(399): Homolog of NCBI NO: 25406643 NR Description: hypothetical protein F18B13.28 [imported] -
  misc_feature (104)..(313): Homolog of NCBI NO: 25406643 NR Description: hypothetical protein F18B13.28 [imported] -
  misc_feature (342)..(399): Homolog of NCBI NO: 7549631 NR Description: unknown protein [Arabidopsis thaliana]
  misc_feature (1)..(312): Homolog of NCBI NO: 7549631 NR Description: unknown protein [Arabidopsis thaliana]
  misc_feature (1)..(57): Homolog of NCBI NO: 15220090 NR Description: hypothetical protein [Arabidopsis thaliana]
  misc_feature (342)..(399): Homolog of NCBI NO: 15220090 NR Description: hypothetical protein [Arabidopsis thaliana]
  misc_feature (104)..(313): Homolog of NCBI NO: 15220090 NR Description: hypothetical protein [Arabidopsis thaliana]
  misc_feature (1)..(399): Homolog of NCBI NO: 30680023 NR Description: expressed protein [Arabidopsis thaliana]
  misc_feature (1)..(399): Homolog of NCBI NO: 19715647 NR Description: AT3g06820/F3E22_4 [Arabidopsis thaliana]
  misc_feature (1)..(399): Homolog of NCBI NO: 20147355 NR Description: At1g80210/F18B13_28 [Arabidopsis thaliana]
MSEDVWLTCLTHALSTETEEIMGLLLGDIEYSKDGGSATAMIWGASPQSRSDRQKDRVETNPEQLAAASAQADIMTISTGRTTRVIGWYHSHPHITVLPSHVDVRTQAMYQLLDSGFIGLIFSCFSEDANKVGRIQVIAFQSSDGKPNSIPKSMSLVLANKDSVIDLESSFSSSDSIYQRSSSARGDNPELDTSDTATTSGSKGGGRVSDFEAFFVNNTEANNTRRDGTSGNYSSTAIEIDSMDMSESMQEAMHRSNLETSGVGYVRKEVPLHVLPTSSLLQLNSPLASFKSLQRVLYEEERAAYHQSVQQSKRDGRVHPLAFIHNTSTYQASMCKLIEYCLSPAINALQDRLKENKIRLAMLMDEAEVLEAQKLKGAETSGGASRLVHGSGSRSRRRS

SEQ ID NO: 47777 - protein, 378 aa, Arabidopsis thaliana
  peptide (1)..(378): Ceres Seq. ID no. 13648422
  misc_feature (1)..(95): Pfam Name: Mov34/MPN/PAD-1 family Pfam Description: Mov34/MPN/PAD-1 family
  misc_feature (321)..(378): Homolog of NCBI NO: 25406643 NR Description: hypothetical protein F18B13.28 [imported] -
  misc_feature (83)..(292): Homolog of NCBI NO: 25406643 NR Description: hypothetical protein F18B13.28 [imported] -
  misc_feature (321)..(378): Homolog of NCBI NO: 7549631 NR Description: unknown protein [Arabidopsis thaliana]
  misc_feature (1)..(291): Homolog of NCBI NO: 7549631 NR Description: unknown protein [Arabidopsis thaliana]
  misc_feature (1)..(36): Homolog of NCBI NO: 15220090 NR Description: hypothetical protein [Arabidopsis thaliana]
  misc_feature (321)..(378): Homolog of NCBI NO: 15220090 NR Description: hypothetical protein [Arabidopsis thaliana]
  misc_feature (83)..(292): Homolog of NCBI NO: 15220090 NR Description: hypothetical protein [Arabidopsis thaliana]
  misc_feature (1)..(378): Homolog of NCBI NO: 30680023 NR Description: expressed protein [Arabidopsis thaliana]
  misc_feature (1)..(378): Homolog of NCBI NO: 19715647 NR Description: AT3g06820/F3E22_4 [Arabidopsis thaliana]
  misc_feature (1)..(378): Homolog of NCBI NO: 20147355 NR Description: At1g80210/F18B13_28 [Arabidopsis thaliana]
MGLLLGDIEYSKDGGSATAMIWGASPQSRSDRQKDRVETNPEQLAAASAQADIMTISTGRTTRVIGWYHSHPHITVLPSHVDVRTQAMYQLLDSGFIGLIFSCFSEDANKVGRIQVIAFQSSDGKPNSIPKSMSLVLANKDSVIDLESSFSSSDSIYQRSSSARGDNPELDTSDTATTSGSKGGGRVSDFEAFFVNNTEANNTRRDGTSGNYSSTAIEIDSMDMSESMQEAMHRSNLETSGVGYVRKEVPLHVLPTSSLLQLNSPLASFKSLQRVLYEEERAAYHQSVQQSKRDGRVHPLAFIHNTSTYQASMCKLIEYCLSPAINALQDRLKENKIRLAMLMDEAEVLEAQKLKGAETSGGASRLVHGSGSRSRRRS

SEQ ID NO: 47778 - DNA, 1267 bp, Arabidopsis thaliana
  misc_feature (1)..(1267): Ceres Seq. ID no. 13648432
  misc_feature: MA Experiment ID: 20000234 Result: Up-regulated in Transcription
  misc_feature: MA Experiment 20000234 PARAMETER Experiment Name: At_Siliques_P Parameter: Age (day) Value: 21
  misc_feature: MA Experiment 20000234 PARAMETER Experiment Name: At_Siliques_P Parameter: Organism Value: A. thaliana
  misc_feature: MA Experiment 20000234 PARAMETER Experiment Name: At_Siliques_P Parameter: Plant Line Value: WS
  misc_feature: MA Experiment 20000234 PARAMETER Experiment Name: At_Siliques_P Parameter: Tissue Value: Less Than 5mm Siliques vs. Whole Plant
  misc_feature: MA Experiment ID: 20000286 Result: Up-regulated in Transcription
  misc_feature: MA Experiment 20000286 PARAMETER Experiment Name: At_Open_Flower_P Parameter: Age (day) Value: 21
  misc_feature: MA Experiment 20000286 PARAMETER Experiment Name: At_Open_Flower_P Parameter: Plant Line Value: WS
  misc_feature: MA Experiment 20000286 PARAMETER Experiment Name: At_Open_Flower_P Parameter: Tissue Value: Half Open vs. Whole Plant
  misc_feature: MA Experiment ID: 20000794 Result: Up-regulated in Transcription
  misc_feature: MA Experiment 20000794 PARAMETER Experiment Name: At_Petals_P Parameter: Age (day) Value: 23-25 days
  misc_feature: MA Experiment 20000794 PARAMETER Experiment Name: At_Petals_P Parameter: Plant Line Value: WS
  misc_feature: MA Experiment 20000794 PARAMETER Experiment Name: At_Petals_P Parameter: Tissue Value: Petals vs. Whole plant
  misc_feature: MA Experiment ID: 20001757 Result: Down-regulated in Transcription
  misc_feature: MA Experiment 20001757 PARAMETER Experiment Name: At_50mM_NH4NO3_L-to-H_P Parameter: Timepoint (hr) Value: 6
  misc_feature: MA Experiment 20001757 PARAMETER Experiment Name: At_50mM_NH4NO3_L-to-H_P Parameter: Tissue Value: Leaf
  misc_feature: MA Experiment 20001757 PARAMETER Experiment Name: At_50mM_NH4NO3_L-to-H_P Parameter: Treatment Value: 50mM NH4NO3 vs 100mM Mannitol
  misc_feature: MA Experiment ID: 20001910 Result: Up-regulated in Transcription
  misc_feature: MA Experiment 20001910 PARAMETER Experiment Name: At_Drought_Reproduction_P Parameter: Age (day) Value: 37
  misc_feature: MA Experiment 20001910 PARAMETER Experiment Name: At_Drought_Reproduction_P Parameter: Organism Value: A. thaliana
  misc_feature: MA Experiment 20001910 PARAMETER Experiment Name: At_Drought_Reproduction_P Parameter: Plant Line Value: WS
  misc_feature: MA Experiment 20001910 PARAMETER Experiment Name: At_Drought_Reproduction_P Parameter: Timepoint (day) Value: 7
  misc_feature: MA Experiment 20001910 PARAMETER Experiment Name: At_Drought_Reproduction_P Parameter: Tissue Value: Flowers
  misc_feature: MA Experiment 20001910 PARAMETER Experiment Name: At_Drought_Reproduction_P Parameter: Treatment Value: Drought vs. No Drought
gaacgaataagaaaagaagagaaacatcaaacatctttggtttgcttccctcgtacccgttcttcatacaagcacgcctttaattatggattgtcatagaaagacgttcttgttgaagtttttgtgcgtggcatttctgttaaactacagcaatgttggctttgtagacgcagcaacaaacattggcttgaactacggcctccttggagacaacctcccgcctccatctgaagttatcaacctctacaagtccttaagtgttaccaatattcggatcttcgacacaactacggatgtccttaacgcctttcgagggaatcgcaatatcggagttatggtagacgtgaagaaccaagacttagaggctctttcggtcagcgaagaagctgttaacacctggttcgtgaccaacattgagccttacttagctgatgtcaacatcacgttcattgctgtcgggaacgaagtcatcccaggggaaatcggctcttatgtgctacccgtcatgaaatctctcaccaacattgtcaagtcgaggagtctcccgatcttgatcagcaccacggtggctatgaccaaccttggccagtcatatccaccttcggccggagatttcatgcctcaagcacgtgaacaacttaccccggtgctgaagtttttgtctcaaacaaatacgcctatcctcgtcaacatctacccctacttcgcatatgctgctgatcctatcaacattcagctcgactatgccatcttcaacaccaacaaggtcgtggtccaagacgggccacttggttatacaaacatgttcgatgtgatatttgatgcgttcgtatgggcaatggagaaagaaggtgtgaaggatttaccaatggtggtaacagaaactggatggccatctgctggtaacggaaacttaacgactccagatatcgcatctatatacaataccaattttgttaaacatgtggaaagcggtaaagggacgccaaagagaccaaagagtggcattagtggatttctatttgcgacgttcaatgagaatcaaaagccagcgggaaccgaacaaaattttgggttatataatccaacagatatgaagcccatctacaagatgttttgatttttagattcttgattttatagactatcccaaatcattagtaaattaatgatgctctaatagttgtaatagagcgggataaaatcaagatctacaacaacattcattttatatgttgtatgatcttcttaaataaaaaaacttaag

SEQ ID NO: 47779 - protein, 344 aa, Arabidopsis thaliana
  peptide (1)..(344): Ceres Seq. ID no. 13648433
  misc_feature (33)..(344): Pfam Name: Glycosyl hydrolases family 17 Pfam Description: Glycosyl hydrolases family 17
  misc_feature (32)..(343): Homolog of NCBI NO: 6073860 NR Description: beta-1, 3-glucananse [Musa acuminata]
  misc_feature (27)..(341): Homolog of NCBI NO: 4097944 NR Description: beta-1,3-glucanase precursor [Oryza sativa]
  misc_feature (32)..(343): Homolog of NCBI NO: 6448757 NR Description: beta-1,3-glucanase [Musa acuminata]
  misc_feature (27)..(341): Homolog of NCBI NO: 34908958 NR Description: beta-1,3-glucanase precursor
  misc_feature (2)..(334): Homolog of NCBI NO: 15241384 NR Description: glycosyl hydrolase family 17 (beta-1,3-glucanase)
  misc_feature (5)..(344): Homolog of NCBI NO: 15217468 NR Description: glycosyl hydrolase family 17 (beta-1,3-glucanase)
  misc_feature (5)..(344): Homolog of NCBI NO: 15241326 NR Description: glycosyl hydrolase family 17 (beta-1,3-glucanase
  misc_feature (5)..(344): Homolog of NCBI NO: 21553380 NR Description: beta-1,3-glucanase bg4 [Arabidopsis thaliana]
  misc_feature (5)..(344): Homolog of NCBI NO: 15241325 NR Description: glycosyl hydrolase family 17 (beta-1,3-glucanase
  misc_feature (1)..(344): Homolog of NCBI NO: 15241345 NR Description: glycosyl hydrolase family 17 (beta-1,3-glucanase)
MDCHRKTFLLKFLCVAFLLNYSNVGFVDAATNIGLNYGLLGDNLPPPSEVINLYKSLSVTNIRIFDTTTDVLNAFRGNRNIGVMVDVKNQDLEALSVSEEAVNTWFVTNIEPYLADVNITFIAVGNEVIPGEIGSYVLPVMKSLTNIVKSRSLPILISTTVAMTNLGQSYPPSAGDFMPQAREQLTPVLKFLSQTNTPILVNIYPYFAYAADPINIQLDYAIFNTNKVVVQDGPLGYTNMFDVIFDAFVWAMEKEGVKDLPMVVTETGWPSAGNGNLTTPDIASIYNTNFVKHVESGKGTPKRPKSGISGFLFATFNENQKPAGTEQNFGLYNPTDMKPIYKMF

SEQ ID NO: 47780 - protein, 261 aa, Arabidopsis thaliana
  peptide (1)..(261): Ceres Seq. ID no. 13648434
  misc_feature (1)..(261): Pfam Name: Glycosyl hydrolases family 17 Pfam Description: Glycosyl hydrolases family 17
  misc_feature (1)..(260): Homolog of NCBI NO: 6073860 NR Description: beta-1, 3-glucananse [Musa acuminata]
  misc_feature (1)..(258): Homolog of NCBI NO: 4097944 NR Description: beta-1,3-glucanase precursor [Oryza sativa]
  misc_feature (1)..(260): Homolog of NCBI NO: 6448757 NR Description: beta-1,3-glucanase [Musa acuminata]
  misc_feature (1)..(258): Homolog of NCBI NO: 34908958 NR Description: beta-1,3-glucanase precursor
  misc_feature (1)..(251): Homolog of NCBI NO: 15241384 NR Description: glycosyl hydrolase family 17 (beta-1,3-glucanase)
  misc_feature (1)..(261): Homolog of NCBI NO: 15217468 NR Description: glycosyl hydrolase family 17 (beta-1,3-glucanase)
  misc_feature (1)..(261): Homolog of NCBI NO: 15241326 NR Description: glycosyl hydrolase family 17 (beta-1,3-glucanase
  misc_feature (1)..(261): Homolog of NCBI NO: 21553380 NR Description: beta-1,3-glucanase bg4 [Arabidopsis thaliana]
  misc_feature (1)..(261): Homolog of NCBI NO: 15241325 NR Description: glycosyl hydrolase family 17 (beta-1,3-glucanase
  misc_feature (1)..(261): Homolog of NCBI NO: 15241345 NR Description: glycosyl hydrolase family 17 (beta-1,3-glucanase)
MVDVKNQDLEALSVSEEAVNTWFVTNIEPYLADVNITFIAVGNEVIPGEIGSYVLPVMKSLTNIVKSRSLPILISTTVAMTNLGQSYPPSAGDFMPQAREQLTPVLKFLSQTNTPILVNIYPYFAYAADPINIQLDYAIFNTNKVVVQDGPLGYTNMFDVIFDAFVWAMEKEGVKDLPMVVTETGWPSAGNGNLTTPDIASIYNTNFVKHVESGKGTPKRPKSGISGFLFATFNENQKPAGTEQNFGLYNPTDMKPIYKMF

SEQ ID NO: 47781 - protein, 204 aa, Arabidopsis thaliana
  peptide (1)..(204): Ceres Seq. ID no. 13648435
  misc_feature (1)..(204): Pfam Name: Glycosyl hydrolases family 17 Pfam Description: Glycosyl hydrolases family 17
  misc_feature (1)..(203): Homolog of NCBI NO: 6073860 NR Description: beta-1, 3-glucananse [Musa acuminata]
  misc_feature (1)..(201): Homolog of NCBI NO: 4097944 NR Description: beta-1,3-glucanase precursor [Oryza sativa]
  misc_feature (1)..(203): Homolog of NCBI NO: 6448757 NR Description: beta-1,3-glucanase [Musa acuminata]
  misc_feature (1)..(201): Homolog of NCBI NO: 34908958 NR Description: beta-1,3-glucanase precursor
  misc_feature (1)..(194): Homolog of NCBI NO: 15241384 NR Description: glycosyl hydrolase family 17 (beta-1,3-glucanase)
  misc_feature (1)..(204): Homolog of NCBI NO: 15217468 NR Description: glycosyl hydrolase family 17 (beta-1,3-glucanase)
  misc_feature (1)..(204): Homolog of NCBI NO: 15241326 NR Description: glycosyl hydrolase family 17 (beta-1,3-glucanase
  misc_feature (1)..(204): Homolog of NCBI NO: 21553380 NR Description: beta-1,3-glucanase bg4 [Arabidopsis thaliana]
  misc_feature (1)..(204): Homolog of NCBI NO: 15241325 NR Description: glycosyl hydrolase family 17 (beta-1,3-glucanase
  misc_feature (1)..(204): Homolog of NCBI NO: 15241345 NR Description: glycosyl hydrolase family 17 (beta-1,3-glucanase)
MKSLTNIVKSRSLPILISTTVAMTNLGQSYPPSAGDFMPQAREQLTPVLKFLSQTNTPILVNIYPYFAYAADPINIQLDYAIFNTNKVVVQDGPLGYTNMFDVIFDAFVWAMEKEGVKDLPMVVTETGWPSAGNGNLTTPDIASIYNTNFVKHVESGKGTPKRPKSGISGFLFATFNENQKPAGTEQNFGLYNPTDMKPIYKMF

SEQ ID NO: 47782 - DNA, 1811 bp, Arabidopsis thaliana; identical to SEQ ID NO: 36414
  misc_feature (1)..(1811): Ceres Seq. ID no. 12329212
  misc_feature: MA Experiment ID: 20000180 Result: Up-regulated in Transcription
  misc_feature: MA Experiment 20000180 PARAMETER Experiment Name: At_Germinating_Seeds_P Parameter: Age (hr) Value: 24 vs. 0
  misc_feature: MA Experiment 20000180 PARAMETER Experiment Name: At_Germinating_Seeds_P Parameter: Tissue Value: Germinating Seeds
  misc_feature: MA Experiment ID: 20000184 Result: Up-regulated in Transcription
  misc_feature: MA Experiment 20000184 PARAMETER Experiment Name: At_Shoots__P Parameter: Age (day) Value: 7
  misc_feature: MA Experiment 20000184 PARAMETER Experiment Name: At_Shoots__P Parameter: Tissue Value: Shoots vs. Whole Plant
  misc_feature: MA Experiment ID: 20000185 Result: Down-regulated in Transcription
  misc_feature: MA Experiment 20000185 PARAMETER Experiment Name: At_Roots__P Parameter: Age (day) Value: 7 vs. 21
  misc_feature: MA Experiment 20000185 PARAMETER Experiment Name: At_Roots__P Parameter: Organism Value: A. thaliana
  misc_feature: MA Experiment 20000185 PARAMETER Experiment Name: At_Roots__P Parameter: Tissue Value: Roots vs. Whole Plant
  misc_feature: MA Experiment ID: 20000264 Result: Up-regulated in Transcription
  misc_feature: MA Experiment 20000264 PARAMETER Experiment Name: At_Open_Flower_P Parameter: Age (day) Value: 21
  misc_feature: MA Experiment 20000264 PARAMETER Experiment Name: At_Open_Flower_P Parameter: Plant Line Value: WS
  misc_feature: MA Experiment 20000264 PARAMETER Experiment Name: At_Open_Flower_P Parameter: Tissue Value: Open Flower vs. Whole Plant
  misc_feature: MA Experiment ID: 20000265 Result: Up-regulated in Transcription
  misc_feature: MA Experiment 20000265 PARAMETER Experiment Name: At_Open_Flower_P Parameter: Age (day) Value: 21
  misc_feature: MA Experiment 20000265 PARAMETER Experiment Name: At_Open_Flower_P Parameter: Plant Line Value: WS
  misc_feature: MA Experiment 20000265 PARAMETER Experiment Name: At_Open_Flower_P Parameter: Tissue Value: Closed Flower vs. Whole Plant
  misc_feature: MA Experiment ID: 20000438 Result: Up-regulated in Transcription
  misc_feature: MA Experiment 20000438 PARAMETER Experiment Name: At_Shoots__P Parameter: Age (day) Value: 14
  misc_feature: MA Experiment 20000438 PARAMETER Experiment Name: At_Shoots__P Parameter: Tissue Value: Shoots vs. Whole Plant
  misc_feature: MA Experiment ID: 20000495 Result: Down-regulated in Transcription
  misc_feature: MA Experiment 20000495 PARAMETER Experiment Name: At_Guard_Cells_P Parameter: Harvest Date Value: 8/2/2002
  misc_feature: MA Experiment 20000495 PARAMETER Experiment Name: At_Guard_Cells_P Parameter: Organism Value: A. thaliana
  misc_feature: MA Experiment 20000495 PARAMETER Experiment Name: At_Guard_Cells_P Parameter: Tissue Value: Guard Cells vs. Leaves
  misc_feature: MA Experiment ID: 20000496 Result: Down-regulated in Transcription
  misc_feature: MA Experiment 20000496 PARAMETER Experiment Name: At_Guard_Cells_P Parameter: Harvest Date Value: 7/19/2002
  misc_feature: MA Experiment 20000496 PARAMETER Experiment Name: At_Guard_Cells_P Parameter: Organism Value: Canola
  misc_feature: MA Experiment 20000496 PARAMETER Experiment Name: At_Guard_Cells_P Parameter: Tissue Value: Guard Cells vs. Leaves
  misc_feature: MA Experiment ID: 20001248 Result: Down-regulated in Transcription
  misc_feature: MA Experiment 20001248 PARAMETER Experiment Name: At_Far-red-induction_P Parameter: Age (day) Value: 7
  misc_feature: MA Experiment 20001248 PARAMETER Experiment Name: At_Far-red-induction_P Parameter: Light Value: Far-red vs. White
  misc_feature: MA Experiment 20001248 PARAMETER Experiment Name: At_Far-red-induction_P Parameter: Organism Value: A. thaliana
  misc_feature: MA Experiment 20001248 PARAMETER Experiment Name: At_Far-red-induction_P Parameter: Plant Line Value: Columbia
  misc_feature: MA Experiment 20001248 PARAMETER Experiment Name: At_Far-red-induction_P Parameter: Timepoint (hr) Value: 4
  misc_feature: MA Experiment 20001248 PARAMETER Experiment Name: At_Far-red-induction_P Parameter: Tissue Value: Whole Plant
  misc_feature: MA Experiment ID: 20001451 Result: Down-regulated in Transcription
  misc_feature: MA Experiment 20001451 PARAMETER Experiment Name: At_Far-red-induction_P Parameter: Age (day) Value: 7
  misc_feature: MA Experiment 20001451 PARAMETER Experiment Name: At_Far-red-induction_P Parameter: Light Value: Far-red vs. White
  misc_feature: MA Experiment 20001451 PARAMETER Experiment Name: At_Far-red-induction_P Parameter: Organism Value: A. thaliana
  misc_feature: MA Experiment 20001451 PARAMETER Experiment Name: At_Far-red-induction_P Parameter: Plant Line Value: Columbia
  misc_feature: MA Experiment 20001451 PARAMETER Experiment Name: At_Far-red-induction_P Parameter: Timepoint (hr) Value: 24
  misc_feature: MA Experiment 20001451 PARAMETER Experiment Name: At_Far-red-induction_P Parameter: Tissue Value: Whole Plant
  misc_feature: MA Experiment ID: 20001557 Result: Down-regulated in Transcription
  misc_feature: MA Experiment 20001557 PARAMETER Experiment Name: At_Drought_Soil_Dry_P Parameter: Age (day) Value: 27
  misc_feature: MA Experiment 20001557 PARAMETER Experiment Name: At_Drought_Soil_Dry_P Parameter: Organism Value: A. thaliana
  misc_feature: MA Experiment 20001557 PARAMETER Experiment Name: At_Drought_Soil_Dry_P Parameter: Plant Line Value: WS
  misc_feature: MA Experiment 20001557 PARAMETER Experiment Name: At_Drought_Soil_Dry_P Parameter: Post Timepoint (hr) Value: 3
  misc_feature: MA Experiment 20001557 PARAMETER Experiment Name: At_Drought_Soil_Dry_P Parameter: Post-Treatment Value: Re-Water vs. No Drought
  misc_feature: MA Experiment 20001557 PARAMETER Experiment Name: At_Drought_Soil_Dry_P Parameter: Timepoint (day) Value: 13
  misc_feature: MA Experiment 20001557 PARAMETER Experiment Name: At_Drought_Soil_Dry_P Parameter: Treatment Value: Drought vs. No Drought
  misc_feature: MA Experiment ID: 20001558 Result: Down-regulated in Transcription
  misc_feature: MA Experiment 20001558 PARAMETER Experiment Name: At_Drought_Soil_Dry_P Parameter: Age (day) Value: 27
  misc_feature: MA Experiment 20001558 PARAMETER Experiment Name: At_Drought_Soil_Dry_P Parameter: Organism Value: A. thaliana
  misc_feature: MA Experiment 20001558 PARAMETER Experiment Name: At_Drought_Soil_Dry_P Parameter: Plant Line Value: WS
  misc_feature: MA Experiment 20001558 PARAMETER Experiment Name: At_Drought_Soil_Dry_P Parameter: Post Timepoint (hr) Value: 6
  misc_feature: MA Experiment 20001558 PARAMETER Experiment Name: At_Drought_Soil_Dry_P Parameter: Post-Treatment Value: Re-Water vs. No Drought
  misc_feature: MA Experiment 20001558 PARAMETER Experiment Name: At_Drought_Soil_Dry_P Parameter: Timepoint (day) Value: 13
  misc_feature: MA Experiment 20001558 PARAMETER Experiment Name: At_Drought_Soil_Dry_P Parameter: Treatment Value: Drought vs. No Drought
  misc_feature: MA Experiment ID: 20001560 Result: Down-regulated in Transcription
  misc_feature: MA Experiment 20001560 PARAMETER Experiment Name: At_Drought_Soil_Dry_P Parameter: Age (day) Value: 28
  misc_feature: MA Experiment 20001560 PARAMETER Experiment Name: At_Drought_Soil_Dry_P Parameter: Organism Value: A. thaliana
  misc_feature: MA Experiment 20001560 PARAMETER Experiment Name: At_Drought_Soil_Dry_P Parameter: Plant Line Value: WS
  misc_feature: MA Experiment 20001560 PARAMETER Experiment Name: At_Drought_Soil_Dry_P Parameter: Post Timepoint (hr) Value: None
  misc_feature: MA Experiment 20001560 PARAMETER Experiment Name: At_Drought_Soil_Dry_P Parameter: Post-Treatment Value: None
  misc_feature: MA Experiment 20001560 PARAMETER Experiment Name: At_Drought_Soil_Dry_P Parameter: Timepoint (day) Value: 14
  misc_feature: MA Experiment 20001560 PARAMETER Experiment Name: At_Drought_Soil_Dry_P Parameter: Treatment Value: Drought vs. No Drought

SEQ ID NO: 47783 - protein, 519 aa, Arabidopsis thaliana; identical to SEQ ID NO: 36415
  peptide (1)..(519): Ceres Seq. ID no. 12329213
  misc_feature (111)..(515): Pfam Name: Sugar (and other) transporter Pfam Description: Sugar (and other) transporter
  misc_feature (111)..(515): Pfam Name: Sugar (and other) transporter Pfam Description: Sugar (and other) transporter
  misc_feature (119)..(517): Homolog of NCBI NO: 34908356 NR Description: P0529H11.31 [Oryza sativa (japonica
  misc_feature (354)..(400): Homolog of NCBI NO: 7485271 NR Description: hypothetical protein A_IG005I10.nn - Arabidopsis
  misc_feature (59)..(248): Homolog of NCBI NO: 7485271 NR Description: hypothetical protein A_IG005I10.nn - Arabidopsis
  misc_feature (433)..(519): Homolog of NCBI NO: 7485271 NR Description: hypothetical protein A_IG005I10.nn - Arabidopsis
  misc_feature (214)..(372): Homolog of NCBI NO: 7485271 NR Description: hypothetical protein A_IG005I10.nn - Arabidopsis
  misc_feature (119)..(517): Homolog of NCBI NO: 34908356 NR Description: P0529H11.31 [Oryza sativa (japonica
  misc_feature (59)..(248): Homolog of NCBI NO: 7485271 NR Description: hypothetical protein A_IG005I10.nn - Arabidopsis
  misc_feature (214)..(372): Homolog of NCBI NO: 7485271 NR Description: hypothetical protein A_IG005I10.nn - Arabidopsis
  misc_feature (8)..(519): Homolog of NCBI NO: 15227589 NR Description: putative Na+-dependent inorganic phosphate
  misc_feature (8)..(519): Homolog of NCBI NO: 17064976 NR Description: putative Na+-dependent inorganic phosphate
  misc_feature (8)..(405): Homolog of NCBI NO: 30684317 NR Description: inorganic phosphate transporter, putative
  misc_feature (105)..(519): Homolog of NCBI NO: 34903342 NR Description: unnamed protein product [Oryza sativa (japonica
  misc_feature (20)..(519): Homolog of NCBI NO: 30678625 NR Description: expressed protein [Arabidopsis thaliana]
  misc_feature (433)..(519): Homolog of NCBI NO: 7485271 NR Description: hypothetical protein A_IG005I10.nn - Arabidopsis
  misc_feature (354)..(400): Homolog of NCBI NO: 7485271 NR Description: hypothetical protein A_IG005I10.nn - Arabidopsis
  misc_feature (20)..(519): Homolog of NCBI NO: 30678625 NR Description: expressed protein [Arabidopsis thaliana]
  misc_feature (105)..(519): Homolog of NCBI NO: 34903342 NR Description: unnamed protein product [Oryza sativa (japonica
  misc_feature (8)..(405): Homolog of NCBI NO: 30684317 NR Description: inorganic phosphate transporter, putative
  misc_feature (8)..(519): Homolog of NCBI NO: 17064976 NR Description: putative Na+-dependent inorganic phosphate
  misc_feature (8)..(519): Homolog of NCBI NO: 15227589 NR Description: putative Na+-dependent inorganic phosphate

SEQ ID NO: 47784 - protein, 512 aa, Arabidopsis thaliana; identical to SEQ ID NO: 36416
  peptide (1)..(512): Ceres Seq. ID no. 12329214
  misc_feature (104)..(508): Pfam Name: Sugar (and other) transporter Pfam Description: Sugar (and other) transporter
  misc_feature (104)..(508): Pfam Name: Sugar (and other) transporter Pfam Description: Sugar (and other) transporter
  misc_feature (112)..(510): Homolog of NCBI NO: 34908356 NR Description: P0529H11.31 [Oryza sativa (japonica
  misc_feature (347)..(393): Homolog of NCBI NO: 7485271 NR Description: hypothetical protein A_IG005I10.nn - Arabidopsis
  misc_feature (52)..(241): Homolog of NCBI NO: 7485271 NR Description: hypothetical protein A_IG005I10.nn - Arabidopsis
  misc_feature (426)..(512): Homolog of NCBI NO: 7485271 NR Description: hypothetical protein A_IG005I10.nn - Arabidopsis
  misc_feature (207)..(365): Homolog of NCBI NO: 7485271 NR Description: hypothetical protein A_IG005I10.nn - Arabidopsis
  misc_feature (112)..(510): Homolog of NCBI NO: 34908356 NR Description: P0529H11.31 [Oryza sativa (japonica
  misc_feature (52)..(241): Homolog of NCBI NO: 7485271 NR Description: hypothetical protein A_IG005I10.nn - Arabidopsis
  misc_feature (207)..(365): Homolog of NCBI NO: 7485271 NR Description: hypothetical protein A_IG005I10.nn - Arabidopsis
  misc_feature (1)..(512): Homolog of NCBI NO: 15227589 NR Description: putative Na+-dependent inorganic phosphate
  misc_feature (1)..(512): Homolog of NCBI NO: 17064976 NR Description: putative Na+-dependent inorganic phosphate
  misc_feature (1)..(398): Homolog of NCBI NO: 30684317 NR Description: inorganic phosphate transporter, putative
  misc_feature (98)..(512): Homolog of NCBI NO: 34903342 NR Description: unnamed protein product [Oryza sativa (japonica
  misc_feature (13)..(512): Homolog of NCBI NO: 30678625 NR Description: expressed protein [Arabidopsis thaliana]
  misc_feature (426)..(512): Homolog of NCBI NO: 7485271 NR Description: hypothetical protein A_IG005I10.nn - Arabidopsis
  misc_feature (347)..(393): Homolog of NCBI NO: 7485271 NR Description: hypothetical protein A_IG005I10.nn - Arabidopsis
  misc_feature (13)..(512): Homolog of NCBI NO: 30678625 NR Description: expressed protein [Arabidopsis thaliana]
  misc_feature (98)..(512): Homolog of NCBI NO: 34903342 NR Description: unnamed protein product [Oryza sativa (japonica
  misc_feature (1)..(398): Homolog of NCBI NO: 30684317 NR Description: inorganic phosphate transporter, putative
  misc_feature (1)..(512): Homolog of NCBI NO: 17064976 NR Description: putative Na+-dependent inorganic phosphate
  misc_feature (1)..(512): Homolog of NCBI NO: 15227589 NR Description: putative Na+-dependent inorganic phosphate

SEQ ID NO: 47785 - protein, 395 aa, Arabidopsis thaliana; identical to SEQ ID NO: 36417
  peptide (1)..(395): Ceres Seq. ID no. 12329215
  misc_feature (1)..(391): Pfam Name: Sugar (and other) transporter Pfam Description: Sugar (and other) transporter
  misc_feature (1)..(391): Pfam Name: Sugar (and other) transporter Pfam Description: Sugar (and other) transporter
  misc_feature (1)..(393): Homolog of NCBI NO: 34908356 NR Description: P0529H11.31 [Oryza sativa (japonica
  misc_feature (230)..(276): Homolog of NCBI NO: 7485271 NR Description: hypothetical protein A_IG005I10.nn - Arabidopsis
  misc_feature (1)..(124): Homolog of NCBI NO: 7485271 NR Description: hypothetical protein A_IG005I10.nn - Arabidopsis
  misc_feature (309)..(395): Homolog of NCBI NO: 7485271 NR Description: hypothetical protein A_IG005I10.nn - Arabidopsis
  misc_feature (90)..(248): Homolog of NCBI NO: 7485271 NR Description: hypothetical protein A_IG005I10.nn - Arabidopsis
  misc_feature (1)..(393): Homolog of NCBI NO: 34908356 NR Description: P0529H11.31 [Oryza sativa (japonica
  misc_feature (1)..(124): Homolog of NCBI NO: 7485271 NR Description: hypothetical protein A_IG005I10.nn - Arabidopsis
  misc_feature (90)..(248): Homolog of NCBI NO: 7485271 NR Description: hypothetical protein A_IG005I10.nn - Arabidopsis
  misc_feature (1)..(395): Homolog of NCBI NO: 15227589 NR Description: putative Na+-dependent inorganic phosphate
  misc_feature (1)..(395): Homolog of NCBI NO: 17064976 NR Description: putative Na+-dependent inorganic phosphate
  misc_feature (1)..(281): Homolog of NCBI NO: 30684317 NR Description: inorganic phosphate transporter, putative
  misc_feature (1)..(395): Homolog of NCBI NO: 34903342 NR Description: unnamed protein product [Oryza sativa (japonica
  misc_feature (1)..(395): Homolog of NCBI NO: 30678625 NR Description: expressed protein [Arabidopsis thaliana]
  misc_feature (309)..(395): Homolog of NCBI NO: 7485271 NR Description: hypothetical protein A_IG005I10.nn - Arabidopsis
  misc_feature (230)..(276): Homolog of NCBI NO: 7485271 NR Description: hypothetical protein A_IG005I10.nn - Arabidopsis
  misc_feature (1)..(395): Homolog of NCBI NO: 30678625 NR Description: expressed protein [Arabidopsis thaliana]
  misc_feature (1)..(395): Homolog of NCBI NO: 34903342 NR Description: unnamed protein product [Oryza sativa (japonica
  misc_feature (1)..(281): Homolog of NCBI NO: 30684317 NR Description: inorganic phosphate transporter, putative
  misc_feature (1)..(395): Homolog of NCBI NO: 17064976 NR Description: putative Na+-dependent inorganic phosphate
  misc_feature (1)..(395): Homolog of NCBI NO: 15227589 NR Description: putative Na+-dependent inorganic phosphate

SEQ ID NO: 47786 - DNA, 2179 bp, Arabidopsis thaliana; identical to SEQ ID NO: 44075
  misc_feature (1)..(2179): Ceres Seq. ID no. 13509312
  misc_feature: MA Experiment ID: 20000180 Result: Down-regulated in Transcription
  misc_feature: MA Experiment 20000180 PARAMETER Experiment Name: At_Germinating_Seeds_P Parameter: Age (hr) Value: 24 vs. 0
  misc_feature: MA Experiment 20000180 PARAMETER Experiment Name: At_Germinating_Seeds_P Parameter: Tissue Value: Germinating Seeds

SEQ ID NO: 47787 - protein, 489 aa, Arabidopsis thaliana; identical to SEQ ID NO: 44076
  peptide (1)..(489): Ceres Seq. ID no. 13509313
  misc_feature (6)..(134): Pfam Name: No apical meristem (NAM) protein Pfam Description: No apical meristem (NAM) protein
  misc_feature (6)..(134): Pfam Name: No apical meristem (NAM) protein Pfam Description: No apical meristem (NAM) protein
  misc_feature (6)..(194): Homolog of NCBI NO: 21105746 NR Description: nam-like protein 9 [Petunia x hybrida]
  misc_feature (8)..(205): Homolog of NCBI NO: 21105742 NR Description: nam-like protein 7 [Petunia x hybrida]
  misc_feature (4)..(187): Homolog of NCBI NO: 15237699 NR Description: NAC2 protein [Arabidopsis thaliana]
  misc_feature (4)..(186): Homolog of NCBI NO: 21593389 NR Description: NAC, putative [Arabidopsis thaliana]
  misc_feature (4)..(186): Homolog of NCBI NO: 18398895 NR Description: expressed protein [Arabidopsis thaliana]
  misc_feature (6)..(194): Homolog of NCBI NO: 21105746 NR Description: nam-like protein 9 [Petunia x hybrida]
  misc_feature (4)..(187): Homolog of NCBI NO: 15237699 NR Description: NAC2 protein [Arabidopsis thaliana]
  misc_feature (4)..(186): Homolog of NCBI NO: 18398895 NR Description: expressed protein [Arabidopsis thaliana]
  misc_feature (1)..(489): Homolog of NCBI NO: 15242390 NR Description: expressed protein [Arabidopsis thaliana]
  misc_feature (1)..(326): Homolog of NCBI NO: 15237609 NR Description: hypothetical protein [Arabidopsis thaliana]
  misc_feature (1)..(261): Homolog of NCBI NO: 7716952 NR Description: NAC1 [Medicago truncatula]
  misc_feature (1)..(445): Homolog of NCBI NO: 21105732 NR Description: nam-like protein 2 [Petunia x hybrida]
  misc_feature (4)..(186): Homolog of NCBI NO: 8567779 NR Description: NAC, putative [Arabidopsis thaliana]
  misc_feature (4)..(186): Homolog of NCBI NO: 21593389 NR Description: NAC, putative [Arabidopsis thaliana]
  misc_feature (8)..(205): Homolog of NCBI NO: 21105742 NR Description: nam-like protein 7 [Petunia x hybrida]
  misc_feature (4)..(186): Homolog of NCBI NO: 8567779 NR Description: NAC, putative [Arabidopsis thaliana]
  misc_feature (1)..(445): Homolog of NCBI NO: 21105732 NR Description: nam-like protein 2 [Petunia x hybrida]
  misc_feature (1)..(261): Homolog of NCBI NO: 7716952 NR Description: NAC1 [Medicago truncatula]
  misc_feature (1)..(326): Homolog of NCBI NO: 15237609 NR Description: hypothetical protein [Arabidopsis thaliana]
  misc_feature (1)..(489): Homolog of NCBI NO: 15242390 NR Description: expressed protein [Arabidopsis thaliana]

SEQ ID NO: 47788 - protein, 436 aa, Arabidopsis thaliana; identical to SEQ ID NO: 44077
  peptide (1)..(436): Ceres Seq. ID no. 13509314
  misc_feature (1)..(81): Pfam Name: No apical meristem (NAM) protein Pfam Description: No apical meristem (NAM) protein
  misc_feature (1)..(81): Pfam Name: No apical meristem (NAM) protein Pfam Description: No apical meristem (NAM) protein
  misc_feature (1)..(141): Homolog of NCBI NO: 21105746 NR Description: nam-like protein 9 [Petunia x hybrida]
  misc_feature (1)..(152): Homolog of NCBI NO: 21105742 NR Description: nam-like protein 7 [Petunia x hybrida]
  misc_feature (1)..(134): Homolog of NCBI NO: 15237699 NR Description: NAC2 protein [Arabidopsis thaliana]
  misc_feature (1)..(133): Homolog of NCBI NO: 21593389 NR Description: NAC, putative [Arabidopsis thaliana]
  misc_feature (1)..(133): Homolog of NCBI NO: 18398895 NR Description: expressed protein [Arabidopsis thaliana]
  misc_feature (1)..(141): Homolog of NCBI NO: 21105746 NR Description: nam-like protein 9 [Petunia x hybrida]
  misc_feature (1)..(134): Homolog of NCBI NO: 15237699 NR Description: NAC2 protein [Arabidopsis thaliana]
  misc_feature (1)..(133): Homolog of NCBI NO: 18398895 NR Description: expressed protein [Arabidopsis thaliana]
  misc_feature (1)..(436): Homolog of NCBI NO: 15242390 NR Description: expressed protein [Arabidopsis thaliana]
  misc_feature (1)..(273): Homolog of NCBI NO: 15237609 NR Description: hypothetical protein [Arabidopsis thaliana]
  misc_feature (1)..(208): Homolog of NCBI NO: 7716952 NR Description: NAC1 [Medicago truncatula]
  misc_feature (1)..(392): Homolog of NCBI NO: 21105732 NR Description: nam-like protein 2 [Petunia x hybrida]
  misc_feature (1)..(133): Homolog of NCBI NO: 8567779 NR Description: NAC, putative [Arabidopsis thaliana]
  misc_feature (1)..(133): Homolog of NCBI NO: 21593389 NR Description: NAC, putative [Arabidopsis thaliana]
  misc_feature (1)..(152): Homolog of NCBI NO: 21105742 NR Description: nam-like protein 7 [Petunia x hybrida]
  misc_feature (1)..(133): Homolog of NCBI NO: 8567779 NR Description: NAC, putative [Arabidopsis thaliana]
  misc_feature (1)..(392): Homolog of NCBI NO: 21105732 NR Description: nam-like protein 2 [Petunia x hybrida]
  misc_feature (1)..(208): Homolog of NCBI NO: 7716952 NR Description: NAC1 [Medicago truncatula]
  misc_feature (1)..(273): Homolog of NCBI NO: 15237609 NR Description: hypothetical protein [Arabidopsis thaliana]
  misc_feature (1)..(436): Homolog of NCBI NO: 15242390 NR Description: expressed protein [Arabidopsis thaliana]

SEQ ID NO: 47789 - protein, 362 aa, Arabidopsis thaliana; identical to SEQ ID NO: 44078
  peptide (1)..(362): Ceres Seq. ID no. 13509315
  misc_feature (1)..(67): Homolog of NCBI NO: 21105746 NR Description: nam-like protein 9 [Petunia x hybrida]
  misc_feature (1)..(78): Homolog of NCBI NO: 21105742 NR Description: nam-like protein 7 [Petunia x hybrida]
  misc_feature (1)..(60): Homolog of NCBI NO: 15237699 NR Description: NAC2 protein [Arabidopsis thaliana]
  misc_feature (1)..(59): Homolog of NCBI NO: 21593389 NR Description: NAC, putative [Arabidopsis thaliana]
  misc_feature (1)..(59): Homolog of NCBI NO: 18398895 NR Description: expressed protein [Arabidopsis thaliana]
  misc_feature (1)..(59): Homolog of NCBI NO: 8567779 NR Description: NAC, putative [Arabidopsis thaliana]
  misc_feature (1)..(318): Homolog of NCBI NO: 21105732 NR Description: nam-like protein 2 [Petunia x hybrida]
  misc_feature (1)..(134): Homolog of NCBI NO: 7716952 NR Description: NAC1 [Medicago truncatula]
  misc_feature (1)..(199): Homolog of NCBI NO: 15237609 NR Description: hypothetical protein [Arabidopsis thaliana]
  misc_feature (1)..(362): Homolog of NCBI NO: 15242390 NR Description: expressed protein [Arabidopsis thaliana]
  misc_feature (1)..(67): Homolog of NCBI NO: 21105746 NR Description: nam-like protein 9 [Petunia x hybrida]
  misc_feature (1)..(78): Homolog of NCBI NO: 21105742 NR Description: nam-like protein 7 [Petunia x hybrida]
  misc_feature (1)..(60): Homolog of NCBI NO: 15237699 NR Description: NAC2 protein [Arabidopsis thaliana]
  misc_feature (1)..(59): Homolog of NCBI NO: 21593389 NR Description: NAC, putative [Arabidopsis thaliana]
  misc_feature (1)..(59): Homolog of NCBI NO: 18398895 NR Description: expressed protein [Arabidopsis thaliana]
  misc_feature (1)..(59): Homolog of NCBI NO: 8567779 NR Description: NAC, putative [Arabidopsis thaliana]
  misc_feature (1)..(318): Homolog of NCBI NO: 21105732 NR Description: nam-like protein 2 [Petunia x hybrida]
  misc_feature (1)..(134): Homolog of NCBI NO: 7716952 NR Description: NAC1 [Medicago truncatula]
  misc_feature (1)..(199): Homolog of NCBI NO: 15237609 NR Description: hypothetical protein [Arabidopsis thaliana]
  misc_feature (1)..(362): Homolog of NCBI NO: 15242390 NR Description: expressed protein [Arabidopsis thaliana]

SEQ ID NO: 47790 - DNA, 1340 bp, Arabidopsis thaliana
  misc_feature (1)..(1340): Ceres Seq. ID no. 13649357
  misc_feature: MA Experiment ID: 20000227 Result: Up-regulated in Transcription
  misc_feature: MA Experiment 20000227 PARAMETER Experiment Name: At_Root-Tips-vs-Tops_P Parameter: Tissue Value: Root Tips vs. Root Tops
  misc_feature: MA Experiment ID: 20000794 Result: Down-regulated in Transcription
  misc_feature: MA Experiment 20000794 PARAMETER Experiment Name: At_Petals_P Parameter: Age (day) Value: 23-25 days
  misc_feature: MA Experiment 20000794 PARAMETER Experiment Name: At_Petals_P Parameter: Plant Line Value: WS
  misc_feature: MA Experiment 20000794 PARAMETER Experiment Name: At_Petals_P Parameter: Tissue Value: Petals vs. Whole plant
  misc_feature: MA Experiment ID: 20001451 Result: Down-regulated in Transcription
  misc_feature: MA Experiment 20001451 PARAMETER Experiment Name: At_Far-red-induction_P Parameter: Age (day) Value: 7
  misc_feature: MA Experiment 20001451 PARAMETER Experiment Name: At_Far-red-induction_P Parameter: Light Value: Far-red vs. White
  misc_feature: MA Experiment 20001451 PARAMETER Experiment Name: At_Far-red-induction_P Parameter: Organism Value: A. thaliana
  misc_feature: MA Experiment 20001451 PARAMETER Experiment Name: At_Far-red-induction_P Parameter: Plant Line Value: Columbia
  misc_feature: MA Experiment 20001451 PARAMETER Experiment Name: At_Far-red-induction_P Parameter: Timepoint (hr) Value: 24
  misc_feature: MA Experiment 20001451 PARAMETER Experiment Name: At_Far-red-induction_P Parameter: Tissue Value: Whole Plant
  misc_feature: MA Experiment ID: 20001905 Result: Down-regulated in Transcription
  misc_feature: MA Experiment 20001905 PARAMETER Experiment Name: At_Drought_Reproduction_P Parameter: Age (day) Value: 40
  misc_feature: MA Experiment 20001905 PARAMETER Experiment Name: At_Drought_Reproduction_P Parameter: Organism Value: A. thaliana
  misc_feature: MA Experiment 20001905 PARAMETER Experiment Name: At_Drought_Reproduction_P Parameter: Plant Line Value: WS
  misc_feature: MA Experiment 20001905 PARAMETER Experiment Name: At_Drought_Reproduction_P Parameter: Timepoint (day) Value: 10
  misc_feature: MA Experiment 20001905 PARAMETER Experiment Name: At_Drought_Reproduction_P Parameter: Tissue Value: Rosettes
  misc_feature: MA Experiment 20001905 PARAMETER Experiment Name: At_Drought_Reproduction_P Parameter: Treatment Value: Drought vs. No Drought
  misc_feature: MA Experiment ID: 20001911 Result: Down-regulated in Transcription
  misc_feature: MA Experiment 20001911 PARAMETER Experiment Name: At_Drought_Reproduction_P Parameter: Age (day) Value: 40
  misc_feature: MA Experiment 20001911 PARAMETER Experiment Name: At_Drought_Reproduction_P Parameter: Organism Value: A. thaliana
  misc_feature: MA Experiment 20001911 PARAMETER Experiment Name: At_Drought_Reproduction_P Parameter: Plant Line Value: WS
  misc_feature: MA Experiment 20001911 PARAMETER Experiment Name: At_Drought_Reproduction_P Parameter: Timepoint (day) Value: 10
  misc_feature: MA Experiment 20001911 PARAMETER Experiment Name: At_Drought_Reproduction_P Parameter: Tissue Value: Flowers
  misc_feature: MA Experiment 20001911 PARAMETER Experiment Name: At_Drought_Reproduction_P Parameter: Treatment Value: Drought vs. No Drought
gtggcacacttttcacaaagaagatgggttcttcacaatctacgcaaatggaagacgaagaagaagaagaagaggaaactgacaatgaagaagaagaagaagaagataatggcagatcaaacacaagacaattagacaatctcctagtaaagaaagttctagaacaagagcctgagatgttaccatgtcacgcttcagcttcaccactctcaccacaactatcatctctcggtactccaaggcttggaccatcgattaaagtctgggatccttacaacgtcctctctccgccgccgcaaccgccgtctatcttctctcgaatcgtgtctggtgatgaagatcgagctgtgacagaggtttatctgattagccatggtgagtctgatcttaatcttaaacctgatttgattggtgggagatgtcatgtagctgctcttactgctaatggtaaacgtcaagctagggctcttgctgttttcttcaaatctcaaggtgttcggtttaattcggtttattcgtcacctctagatcgagctagatccatggctgtttctgtttgtcaggaaatgagttttccggaggagcatgtacaatcttcggatgctgttattgagatgagtttaggggattgggaaggctgtaatcaagcagagatttatagtcctgaaactttgagtttgattgaaaggtgccaacctgatttcacagctccatctggagaatcactgaggcaagtagagtttcgaatggttcagtttctaaacgggacagtctcaggagttgcagagaagcttaggtcagattattcttccactacgaatcacaatgaaactcatgagcgtgatggtggtgtgtcacttgcttcgactaactgggacttactacacaagcatcgtcccagtctcacaaggaagaaatctggtaaaagcaggcttcaagtgatgactaatcacgaacctgacgatggaaactccccaagggaagaagttaatcataatcacaatgacctaagtgattcgtcttccttaatcttgaattgtgtcggggttttcacgcattctttgcctataaagtgtcttttaaccggaatccttggttgcagtccggtaatgactcataagatctgtgtagaagactcttcagtgactgtgttacaacattcatggagaaacgggtggcagatcaaacgaatgaatgatactgctcatcttagattgttgtaactttatttaccgataaattatttggaaaaacgaggattcatatatgtttacaccatgaatctgcagaagctcaagaacaaaggttctgcagataatgaaatgccacggcctctttgt

SEQ ID NO: 47791 - protein, 406 aa, Arabidopsis thaliana
  peptide (1)..(406): Ceres Seq. ID no. 13649358
  misc_feature (117)..(298): Pfam Name: Phosphoglycerate mutase family Pfam Description: Phosphoglycerate mutase family
  misc_feature (58)..(406): Homolog of NCBI NO: 21386798 NR Description: X4 protein [Silene dioica]
  misc_feature (53)..(406): Homolog of NCBI NO: 17902572 NR Description: putative fructose-2,6-bisphosphatase [Silene
  misc_feature (8)..(406): Homolog of NCBI NO: 17902576 NR Description: putative fructose-2,6-bisphosphatase [Silene
  misc_feature (8)..(406): Homolog of NCBI NO: 17902574 NR Description: putative Fructose-2,6-bisphosphatase [Silene
  misc_feature (8)..(406): Homolog of NCBI NO: 17902578 NR Description: putative fructose-2,6-bisphosphatase [Silene
  misc_feature (8)..(393): Homolog of NCBI NO: 25518294 NR Description: hypothetical protein F13K23.10 [imported] -
  misc_feature (8)..(406): Homolog of NCBI NO: 21554168 NR Description: putative fructose-2,6-bisphosphatase [Arabidopsis
  misc_feature (8)..(406): Homolog of NCBI NO: 18391446 NR Description: expressed protein [Arabidopsis thaliana]
  misc_feature (8)..(405): Homolog of NCBI NO: 15231617 NR Description: expressed protein [Arabidopsis thaliana]
  misc_feature (8)..(406): Homolog of NCBI NO: 9279667 NR Description: gene_id:MDJ14.7~similar to unknown
GTLFTKKMGSSQSTQMEDEEEEEEETDNEEEEEEDNGRSNTRQLDNLLVKKVLEQEPEMLPCHASASPLSPQLSSLGTPRLGPSIKVWDPYNVLSPPPQPPSIFSRIVSGDEDRAVTEVYLISHGESDLNLKPDLIGGRCHVAALTANGKRQARALAVFFKSQGVRFNSVYSSPLDRARSMAVSVCQEMSFPEEHVQSSDAVIEMSLGDWEGCNQAEIYSPETLSLIERCQPDFTAPSGESLRQVEFRMVQFLNGTVSGVAEKLRSDYSSTTNHNETHERDGGVSLASTNWDLLHKHRPSLTRKKSGKSRLQVMTNHEPDDGNSPREEVNHNHNDLSDSSSLILNCVGVFTHSLPIKCLLTGILGCSPVMTHKICVEDSSVTVLQHSWRNGWQIKRMNDTAHLRLL

SEQ ID NO: 47792 - protein, 399 aa, Arabidopsis thaliana
  peptide (1)..(399): Ceres Seq. ID no. 13649359
  misc_feature (110)..(291): Pfam Name: Phosphoglycerate mutase family Pfam Description: Phosphoglycerate mutase family
  misc_feature (51)..(399): Homolog of NCBI NO: 21386798 NR Description: X4 protein [Silene dioica]
  misc_feature (46)..(399): Homolog of NCBI NO: 17902572 NR Description: putative fructose-2,6-bisphosphatase [Silene
  misc_feature (1)..(399): Homolog of NCBI NO: 17902576 NR Description: putative fructose-2,6-bisphosphatase [Silene
  misc_feature (1)..(399): Homolog of NCBI NO: 17902574 NR Description: putative Fructose-2,6-bisphosphatase [Silene
  misc_feature (1)..(399): Homolog of NCBI NO: 17902578 NR Description: putative fructose-2,6-bisphosphatase [Silene
  misc_feature (1)..(386): Homolog of NCBI NO: 25518294 NR Description: hypothetical protein F13K23.10 [imported] -
  misc_feature (1)..(399): Homolog of NCBI NO: 21554168 NR Description: putative fructose-2,6-bisphosphatase [Arabidopsis
  misc_feature (1)..(399): Homolog of NCBI NO: 18391446 NR Description: expressed protein [Arabidopsis thaliana]
  misc_feature (1)..(398): Homolog of NCBI NO: 15231617 NR Description: expressed protein [Arabidopsis thaliana]
  misc_feature (1)..(399): Homolog of NCBI NO: 9279667 NR Description: gene_id:MDJ14.7~similar to unknown
MGSSQSTQMEDEEEEEEETDNEEEEEEDNGRSNTRQLDNLLVKKVLEQEPEMLPCHASASPLSPQLSSLGTPRLGPSIKVWDPYNVLSPPPQPPSIFSRIVSGDEDRAVTEVYLISHGESDLNLKPDLIGGRCHVAALTANGKRQARALAVFFKSQGVRFNSVYSSPLDRARSMAVSVCQEMSFPEEHVQSSDAVIEMSLGDWEGCNQAEIYSPETLSLIERCQPDFTAPSGESLRQVEFRMVQFLNGTVSGVAEKLRSDYSSTTNHNETHERDGGVSLASTNWDLLHKHRPSLTRKKSGKSRLQVMTNHEPDDGNSPREEVNHNHNDLSDSSSLILNCVGVFTHSLPIKCLLTGILGCSPVMTHKICVEDSSVTVLQHSWRNGWQIKRMNDTAHLRLL

SEQ ID NO: 47793 - protein, 391 aa, Arabidopsis thaliana
  peptide (1)..(391): Ceres Seq. ID no. 13649360
  misc_feature (102)..(283): Pfam Name: Phosphoglycerate mutase family Pfam Description: Phosphoglycerate mutase family
  misc_feature (43)..(391): Homolog of NCBI NO: 21386798 NR Description: X4 protein [Silene dioica]
  misc_feature (38)..(391): Homolog of NCBI NO: 17902572 NR Description: putative fructose-2,6-bisphosphatase [Silene
  misc_feature (1)..(391): Homolog of NCBI NO: 17902576 NR Description: putative fructose-2,6-bisphosphatase [Silene
  misc_feature (1)..(391): Homolog of NCBI NO: 17902574 NR Description: putative Fructose-2,6-bisphosphatase [Silene
  misc_feature (1)..(391): Homolog of NCBI NO: 17902578 NR Description: putative fructose-2,6-bisphosphatase [Silene
  misc_feature (1)..(378): Homolog of NCBI NO: 25518294 NR Description: hypothetical protein F13K23.10 [imported] -
  misc_feature (1)..(391): Homolog of NCBI NO: 21554168 NR Description: putative fructose-2,6-bisphosphatase [Arabidopsis
  misc_feature (1)..(391): Homolog of NCBI NO: 18391446 NR Description: expressed protein [Arabidopsis thaliana]
  misc_feature (1)..(390): Homolog of NCBI NO: 15231617 NR Description: expressed protein [Arabidopsis thaliana]
  misc_feature (1)..(391): Homolog of NCBI NO: 9279667 NR Description: gene_id:MDJ14.7~similar to unknown
MEDEEEEEEETDNEEEEEEDNGRSNTRQLDNLLVKKVLEQEPEMLPCHASASPLSPQLSSLGTPRLGPSIKVWDPYNVLSPPPQPPSIFSRIVSGDEDRAVTEVYLISHGESDLNLKPDLIGGRCHVAALTANGKRQARALAVFFKSQGVRFNSVYSSPLDRARSMAVSVCQEMSFPEEHVQSSDAVIEMSLGDWEGCNQAEIYSPETLSLIERCQPDFTAPSGESLRQVEFRMVQFLNGTVSGVAEKLRSDYSSTTNHNETHERDGGVSLASTNWDLLHKHRPSLTRKKSGKSRLQVMTNHEPDDGNSPREEVNHNHNDLSDSSSLILNCVGVFTHSLPIKCLLTGILGCSPVMTHKICVEDSSVTVLQHSWRNGWQIKRMNDTAHLRLL

SEQ ID NO: 47794 - DNA, 2024 bp, Arabidopsis thaliana; identical to SEQ ID NO: 44984
  misc_feature (1)..(2024): Ceres Seq. ID no. 12600277
  misc_feature: MA Experiment ID: 20000794 Result: Down-regulated in Transcription
  misc_feature: MA Experiment 20000794 PARAMETER Experiment Name: At_Petals_P Parameter: Age (day) Value: 23-25 days
  misc_feature: MA Experiment 20000794 PARAMETER Experiment Name: At_Petals_P Parameter: Plant Line Value: WS
  misc_feature: MA Experiment 20000794 PARAMETER Experiment Name: At_Petals_P Parameter: Tissue Value: Petals vs. Whole plant
  misc_feature: MA Experiment ID: 20001557 Result: Up-regulated in Transcription
  misc_feature: MA Experiment 20001557 PARAMETER Experiment Name: At_Drought_Soil_Dry_P Parameter: Age (day) Value: 27
  misc_feature: MA Experiment 20001557 PARAMETER Experiment Name: At_Drought_Soil_Dry_P Parameter: Organism Value: A. thaliana
  misc_feature: MA Experiment 20001557 PARAMETER Experiment Name: At_Drought_Soil_Dry_P Parameter: Plant Line Value: WS
  misc_feature: MA Experiment 20001557 PARAMETER Experiment Name: At_Drought_Soil_Dry_P Parameter: Post Timepoint (hr) Value: 3
  misc_feature: MA Experiment 20001557 PARAMETER Experiment Name: At_Drought_Soil_Dry_P Parameter: Post-Treatment Value: Re-Water vs. No Drought
  misc_feature: MA Experiment 20001557 PARAMETER Experiment Name: At_Drought_Soil_Dry_P Parameter: Timepoint (day) Value: 13
  misc_feature: MA Experiment 20001557 PARAMETER Experiment Name: At_Drought_Soil_Dry_P Parameter: Treatment Value: Drought vs. No Drought

SEQ ID NO: 47795 - protein, 545 aa, Arabidopsis thaliana; identical to SEQ ID NO: 44985
  peptide (1)..(545): Ceres Seq. ID no. 12600278
  misc_feature (31)..(538): Pfam Name: TCP-1/cpn60 chaperonin family Pfam Description: TCP-1/cpn60 chaperonin family
  misc_feature (31)..(538): Pfam Name: TCP-1/cpn60 chaperonin family Pfam Description: TCP-1/cpn60 chaperonin family
  misc_feature (31)..(538): Pfam Name: TCP-1/cpn60 chaperonin family Pfam Description: TCP-1/cpn60 chaperonin family
  misc_feature (10)..(543): Homolog of NCBI NO: 13959583 NR Description: T-complex protein 1, alpha subunit (TCP-1-alpha)
  misc_feature (10)..(545): Homolog of NCBI NO: 135538 NR Description: T-complex protein 1, alpha subunit (TCP-1-alpha)
  misc_feature (10)..(543): Homolog of NCBI NO: 135536 NR Description: T-COMPLEX PROTEIN 1, ALPHA SUBUNIT (TCP-1-ALPHA)
  misc_feature (10)..(543): Homolog of NCBI NO: 18859465 NR Description: t-complex polypeptide 1 [Danio rerio]
  misc_feature (1)..(543): Homolog of NCBI NO: 27881870 NR Description: Unknown (protein for MGC:55424) [Danio rerio]
  misc_feature (10)..(543): Homolog of NCBI NO: 13959583 NR Description: T-complex protein 1, alpha subunit (TCP-1-alpha)
  misc_feature (10)..(543): Homolog of NCBI NO: 135536 NR Description: T-COMPLEX PROTEIN 1, ALPHA SUBUNIT (TCP-1-ALPHA)
  misc_feature (1)..(543): Homolog of NCBI NO: 27881870 NR Description: Unknown (protein for MGC:55424) [Danio rerio]
  misc_feature (10)..(543): Homolog of NCBI NO: 18859465 NR Description: t-complex polypeptide 1 [Danio rerio]
  misc_feature (10)..(543): Homolog of NCBI NO: 135536 NR Description: T-COMPLEX PROTEIN 1, ALPHA SUBUNIT (TCP-1-ALPHA)
  misc_feature (10)..(545): Homolog of NCBI NO: 135538 NR Description: T-complex protein 1, alpha subunit (TCP-1-alpha)
  misc_feature (10)..(543): Homolog of NCBI NO: 13959583 NR Description: T-complex protein 1, alpha subunit (TCP-1-alpha)
  misc_feature (1)..(545): Homolog of NCBI NO: 15231024 NR Description: t-complex polypeptide 1 homologue
  misc_feature (1)..(545): Homolog of NCBI NO: 25083339 NR Description: t-complex polypeptide 1 homologue [Arabidopsis
  misc_feature (1)..(545): Homolog of NCBI NO: 9293959 NR Description: chaperonin, t-complex protein alpha subunit
  misc_feature (1)..(545): Homolog of NCBI NO: 24371053 NR Description: t-complex polypeptide 1 [Bruguiera sexangula]
  misc_feature (1)..(543): Homolog of NCBI NO: 17066720 NR Description: CCT chaperonin alpha subunit [Physarum
  misc_feature (1)..(545): Homolog of NCBI NO: 15231024 NR Description: t-complex polypeptide 1 homologue
  misc_feature (1)..(545): Homolog of NCBI NO: 25083339 NR Description: t-complex polypeptide 1 homologue [Arabidopsis
  misc_feature (1)..(545): Homolog of NCBI NO: 9293959 NR Description: chaperonin, t-complex protein alpha subunit
  misc_feature (1)..(545): Homolog of NCBI NO: 24371053 NR Description: t-complex polypeptide 1 [Bruguiera sexangula]
  misc_feature (1)..(543): Homolog of NCBI NO: 17066720 NR Description: CCT chaperonin alpha subunit [Physarum
  misc_feature (1)..(543): Homolog of NCBI NO: 27881870 NR Description: Unknown (protein for MGC:55424) [Danio rerio]
  misc_feature (10)..(543): Homolog of NCBI NO: 18859465 NR Description: t-complex polypeptide 1 [Danio rerio]
  misc_feature (10)..(545): Homolog of NCBI NO: 135538 NR Description: T-complex protein 1, alpha subunit (TCP-1-alpha)
  misc_feature (1)..(543): Homolog of NCBI NO: 17066720 NR Description: CCT chaperonin alpha subunit [Physarum
  misc_feature (1)..(545): Homolog of NCBI NO: 24371053 NR Description: t-complex polypeptide 1 [Bruguiera sexangula]
  misc_feature (1)..(545): Homolog of NCBI NO: 9293959 NR Description: chaperonin, t-complex protein alpha subunit
  misc_feature (1)..(545): Homolog of NCBI NO: 25083339 NR Description: t-complex polypeptide 1 homologue [Arabidopsis
  misc_feature (1)..(545): Homolog of NCBI NO: 15231024 NR Description: t-complex polypeptide 1 homologue

SEQ ID NO: 47796 - protein, 520 aa, Arabidopsis thaliana; identical to SEQ ID NO: 44986
  peptide (1)..(520): Ceres Seq. ID no. 12600279
  misc_feature (6)..(513): Pfam Name: TCP-1/cpn60 chaperonin family Pfam Description: TCP-1/cpn60 chaperonin family
  misc_feature (6)..(513): Pfam Name: TCP-1/cpn60 chaperonin family Pfam Description: TCP-1/cpn60 chaperonin family
  misc_feature (6)..(513): Pfam Name: TCP-1/cpn60 chaperonin family Pfam Description: TCP-1/cpn60 chaperonin family
  misc_feature (1)..(518): Homolog of NCBI NO: 13959583 NR Description: T-complex protein 1, alpha subunit (TCP-1-alpha)
  misc_feature (1)..(520): Homolog of NCBI NO: 135538 NR Description: T-complex protein 1, alpha subunit (TCP-1-alpha)
  misc_feature (1)..(518): Homolog of NCBI NO: 135536 NR Description: T-COMPLEX PROTEIN 1, ALPHA SUBUNIT (TCP-1-ALPHA)
  misc_feature (1)..(518): Homolog of NCBI NO: 18859465 NR Description: t-complex polypeptide 1 [Danio rerio]
  misc_feature (1)..(518): Homolog of NCBI NO: 27881870 NR Description: Unknown (protein for MGC:55424) [Danio rerio]
  misc_feature (1)..(518): Homolog of NCBI NO: 13959583 NR Description: T-complex protein 1, alpha subunit (TCP-1-alpha)
  misc_feature (1)..(518): Homolog of NCBI NO: 135536 NR Description: T-COMPLEX PROTEIN 1, ALPHA SUBUNIT (TCP-1-ALPHA)
  misc_feature (1)..(518): Homolog of NCBI NO: 27881870 NR Description: Unknown (protein for MGC:55424) [Danio rerio]
  misc_feature (1)..(518): Homolog of NCBI NO: 18859465 NR Description: t-complex polypeptide 1 [Danio rerio]
  misc_feature (1)..(518): Homolog of NCBI NO: 135536 NR Description: T-COMPLEX PROTEIN 1, ALPHA SUBUNIT (TCP-1-ALPHA)
  misc_feature (1)..(520): Homolog of NCBI NO: 135538 NR Description: T-complex protein 1, alpha subunit (TCP-1-alpha)
  misc_feature (1)..(518): Homolog of NCBI NO: 13959583 NR Description: T-complex protein 1, alpha subunit (TCP-1-alpha)
  misc_feature (1)..(520): Homolog of NCBI NO: 15231024 NR Description: t-complex polypeptide 1 homologue
  misc_feature (1)..(520): Homolog of NCBI NO: 25083339 NR Description: t-complex polypeptide 1 homologue [Arabidopsis
  misc_feature (1)..(520): Homolog of NCBI NO: 9293959 NR Description: chaperonin, t-complex protein alpha subunit
  misc_feature (1)..(520): Homolog of NCBI NO: 24371053 NR Description: t-complex polypeptide 1 [Bruguiera sexangula]
  misc_feature (1)..(518): Homolog of NCBI NO: 17066720 NR Description: CCT chaperonin alpha subunit [Physarum
  misc_feature (1)..(520): Homolog of NCBI NO: 15231024 NR Description: t-complex polypeptide 1 homologue
  misc_feature (1)..(520): Homolog of NCBI NO: 25083339 NR Description: t-complex polypeptide 1 homologue [Arabidopsis
  misc_feature (1)..(520): Homolog of NCBI NO: 9293959 NR Description: chaperonin, t-complex protein alpha subunit
  misc_feature (1)..(520): Homolog of NCBI NO: 24371053 NR Description: t-complex polypeptide 1 [Bruguiera sexangula]
  misc_feature (1)..(518): Homolog of NCBI NO: 17066720 NR Description: CCT chaperonin alpha subunit [Physarum
  misc_feature (1)..(518): Homolog of NCBI NO: 27881870 NR Description: Unknown (protein for MGC:55424) [Danio rerio]
  misc_feature (1)..(518): Homolog of NCBI NO: 18859465 NR Description: t-complex polypeptide 1 [Danio rerio]
  misc_feature (1)..(520): Homolog of NCBI NO: 135538 NR Description: T-complex protein 1, alpha subunit (TCP-1-alpha)
  misc_feature (1)..(518): Homolog of NCBI NO: 17066720 NR Description: CCT chaperonin alpha subunit [Physarum
  misc_feature (1)..(520): Homolog of NCBI NO: 24371053 NR Description: t-complex polypeptide 1 [Bruguiera sexangula]
  misc_feature (1)..(520): Homolog of NCBI NO: 9293959 NR Description: chaperonin, t-complex protein alpha subunit
  misc_feature (1)..(520): Homolog of NCBI NO: 25083339 NR Description: t-complex polypeptide 1 homologue [Arabidopsis
  misc_feature (1)..(520): Homolog of NCBI NO: 15231024 NR Description: t-complex polypeptide 1 homologue

SEQ ID NO: 47797 - protein, 499 aa, Arabidopsis thaliana; identical to SEQ ID NO: 44987
  peptide (1)..(499): Ceres Seq. ID no. 12600280
  misc_feature (1)..(492): Pfam Name: TCP-1/cpn60 chaperonin family Pfam Description: TCP-1/cpn60 chaperonin family
  misc_feature (1)..(492): Pfam Name: TCP-1/cpn60 chaperonin family Pfam Description: TCP-1/cpn60 chaperonin family
  misc_feature (1)..(492): Pfam Name: TCP-1/cpn60 chaperonin family Pfam Description: TCP-1/cpn60 chaperonin family
  misc_feature (1)..(497): Homolog of NCBI NO: 13959583 NR Description: T-complex protein 1, alpha subunit (TCP-1-alpha)
  misc_feature (1)..(499): Homolog of NCBI NO: 135538 NR Description: T-complex protein 1, alpha subunit (TCP-1-alpha)
  misc_feature (1)..(497): Homolog of NCBI NO: 135536 NR Description: T-COMPLEX PROTEIN 1, ALPHA SUBUNIT (TCP-1-ALPHA)
  misc_feature (1)..(497): Homolog of NCBI NO: 18859465 NR Description: t-complex polypeptide 1 [Danio rerio]
  misc_feature (1)..(497): Homolog of NCBI NO: 27881870 NR Description: Unknown (protein for MGC:55424) [Danio rerio]
  misc_feature (1)..(497): Homolog of NCBI NO: 13959583 NR Description: T-complex protein 1, alpha subunit (TCP-1-alpha)
  misc_feature (1)..(497): Homolog of NCBI NO: 135536 NR Description: T-COMPLEX PROTEIN 1, ALPHA SUBUNIT (TCP-1-ALPHA)
  misc_feature (1)..(497): Homolog of NCBI NO: 27881870 NR Description: Unknown (protein for MGC:55424) [Danio rerio]
  misc_feature (1)..(497): Homolog of NCBI NO: 18859465 NR Description: t-complex polypeptide 1 [Danio rerio]
  misc_feature (1)..(497): Homolog of NCBI NO: 135536 NR Description: T-COMPLEX PROTEIN 1, ALPHA SUBUNIT (TCP-1-ALPHA)
  misc_feature (1)..(499): Homolog of NCBI NO: 135538 NR Description: T-complex protein 1, alpha subunit (TCP-1-alpha)
  misc_feature (1)..(497): Homolog of NCBI NO: 13959583 NR Description: T-complex protein 1, alpha subunit (TCP-1-alpha)
  misc_feature (1)..(499): Homolog of NCBI NO: 15231024 NR Description: t-complex polypeptide 1 homologue
  misc_feature (1)..(499): Homolog of NCBI NO: 25083339 NR Description: t-complex polypeptide 1 homologue [Arabidopsis
  misc_feature (1)..(499): Homolog of NCBI NO: 9293959 NR Description: chaperonin, t-complex protein alpha subunit
  misc_feature (1)..(499): Homolog of NCBI NO: 24371053 NR Description: t-complex polypeptide 1 [Bruguiera sexangula]
  misc_feature (1)..(497): Homolog of NCBI NO: 17066720 NR Description: CCT chaperonin alpha subunit [Physarum
  misc_feature (1)..(499): Homolog of NCBI NO: 15231024 NR Description: t-complex polypeptide 1 homologue
  misc_feature (1)..(499): Homolog of NCBI NO: 25083339 NR Description: t-complex polypeptide 1 homologue [Arabidopsis
  misc_feature (1)..(499): Homolog of NCBI NO: 9293959 NR Description: chaperonin, t-complex protein alpha subunit
  misc_feature (1)..(499): Homolog of NCBI NO: 24371053 NR Description: t-complex polypeptide 1 [Bruguiera sexangula]
  misc_feature (1)..(497): Homolog of NCBI NO: 17066720 NR Description: CCT chaperonin alpha subunit [Physarum
  misc_feature (1)..(497): Homolog of NCBI NO: 27881870 NR Description: Unknown (protein for MGC:55424) [Danio rerio]
  misc_feature (1)..(497): Homolog of NCBI NO: 18859465 NR Description: t-complex polypeptide 1 [Danio rerio]
  misc_feature (1)..(499): Homolog of NCBI NO: 135538 NR Description: T-complex protein 1, alpha subunit (TCP-1-alpha)
  misc_feature (1)..(497): Homolog of NCBI NO: 17066720 NR Description: CCT chaperonin alpha subunit [Physarum
  misc_feature (1)..(499): Homolog of NCBI NO: 24371053 NR Description: t-complex polypeptide 1 [Bruguiera sexangula]
  misc_feature (1)..(499): Homolog of NCBI NO: 9293959 NR Description: chaperonin, t-complex protein alpha subunit
  misc_feature (1)..(499): Homolog of NCBI NO: 25083339 NR Description: t-complex polypeptide 1 homologue [Arabidopsis
  misc_feature (1)..(499): Homolog of NCBI NO: 15231024 NR Description: t-complex polypeptide 1 homologue

SEQ ID NO: 47798 - DNA, 537 bp, Arabidopsis thaliana
  misc_feature (1)..(537): Ceres Seq. ID no. 13648546
  misc_feature: MA Experiment ID: 20000169 Result: Up-regulated in Transcription
  misc_feature: MA Experiment 20000169 PARAMETER Experiment Name: At_100uM_ABA_P Parameter: Age (day) Value: 14
  misc_feature: MA Experiment 20000169 PARAMETER Experiment Name: At_100uM_ABA_P Parameter: Organism Value: A. thaliana
  misc_feature: MA Experiment 20000169 PARAMETER Experiment Name: At_100uM_ABA_P Parameter: Plant Line Value: WS
  misc_feature: MA Experiment 20000169 PARAMETER Experiment Name: At_100uM_ABA_P Parameter: Timepoint (hr) Value: 6
  misc_feature: MA Experiment 20000169 PARAMETER Experiment Name: At_100uM_ABA_P Parameter: Tissue Value: Aerial
  misc_feature: MA Experiment 20000169 PARAMETER Experiment Name: At_100uM_ABA_P Parameter: Treatment Value: 100uM ABA vs. No Treatment
  misc_feature: MA Experiment ID: 20000180 Result: Up-regulated in Transcription
  misc_feature: MA Experiment 20000180 PARAMETER Experiment Name: At_Germinating_Seeds_P Parameter: Age (hr) Value: 24 vs. 0
  misc_feature: MA Experiment 20000180 PARAMETER Experiment Name: At_Germinating_Seeds_P Parameter: Tissue Value: Germinating Seeds
  misc_feature: MA Experiment ID: 20000184 Result: Up-regulated in Transcription
  misc_feature: MA Experiment 20000184 PARAMETER Experiment Name: At_Shoots__P Parameter: Age (day) Value: 7
  misc_feature: MA Experiment 20000184 PARAMETER Experiment Name: At_Shoots__P Parameter: Tissue Value: Shoots vs. Whole Plant
  misc_feature: MA Experiment ID: 20000227 Result: Down-regulated in Transcription
  misc_feature: MA Experiment 20000227 PARAMETER Experiment Name: At_Root-Tips-vs-Tops_P Parameter: Tissue Value: Root Tips vs. Root Tops
  misc_feature: MA Experiment ID: 20000264 Result: Up-regulated in Transcription
  misc_feature: MA Experiment 20000264 PARAMETER Experiment Name: At_Open_Flower_P Parameter: Age (day) Value: 21
  misc_feature: MA Experiment 20000264 PARAMETER Experiment Name: At_Open_Flower_P Parameter: Plant Line Value: WS
  misc_feature: MA Experiment 20000264 PARAMETER Experiment Name: At_Open_Flower_P Parameter: Tissue Value: Open Flower vs. Whole Plant
  misc_feature: MA Experiment ID: 20000438 Result: Up-regulated in Transcription
  misc_feature: MA Experiment 20000438 PARAMETER Experiment Name: At_Shoots__P Parameter: Age (day) Value: 14
  misc_feature: MA Experiment 20000438 PARAMETER Experiment Name: At_Shoots__P Parameter: Tissue Value: Shoots vs. Whole Plant
  misc_feature: MA Experiment ID: 20000439 Result: Down-regulated in Transcription
  misc_feature: MA Experiment 20000439 PARAMETER Experiment Name: At_Roots__P Parameter: Age (day) Value: 14 vs. 21
  misc_feature: MA Experiment 20000439 PARAMETER Experiment Name: At_Roots__P Parameter: Organism Value: A. thaliana
  misc_feature: MA Experiment 20000439 PARAMETER Experiment Name: At_Roots__P Parameter: Tissue Value: Roots vs. Whole Plant
  misc_feature: MA Experiment ID: 20000451 Result: Up-regulated in Transcription
  misc_feature: MA Experiment 20000451 PARAMETER Experiment Name: At_CS6879_Shoots-Roots_P Parameter: Age (day) Value: 14
  misc_feature: MA Experiment 20000451 PARAMETER Experiment Name: At_CS6879_Shoots-Roots_P Parameter: Organism Value: A. thaliana
  misc_feature: MA Experiment 20000451 PARAMETER Experiment Name: At_CS6879_Shoots-Roots_P Parameter: Plant Line Value: CS6879 vs. WS
  misc_feature: MA Experiment 20000451 PARAMETER Experiment Name: At_CS6879_Shoots-Roots_P Parameter: Tissue Value: Roots
  misc_feature: MA Experiment ID: 20000794 Result: Up-regulated in Transcription
  misc_feature: MA Experiment 20000794 PARAMETER Experiment Name: At_Petals_P Parameter: Age (day) Value: 23-25 days
  misc_feature: MA Experiment 20000794 PARAMETER Experiment Name: At_Petals_P Parameter: Plant Line Value: WS
  misc_feature: MA Experiment 20000794 PARAMETER Experiment Name: At_Petals_P Parameter: Tissue Value: Petals vs. Whole plant
  misc_feature: MA Experiment ID: 20001555 Result: Up-regulated in Transcription
  misc_feature: MA Experiment 20001555 PARAMETER Experiment Name: At_Drought_Soil_Dry_P Parameter: Age (day) Value: 24
  misc_feature: MA Experiment 20001555 PARAMETER Experiment Name: At_Drought_Soil_Dry_P Parameter: Organism Value: A. thaliana
  misc_feature: MA Experiment 20001555 PARAMETER Experiment Name: At_Drought_Soil_Dry_P Parameter: Plant Line Value: WS
  misc_feature: MA Experiment 20001555 PARAMETER Experiment Name: At_Drought_Soil_Dry_P Parameter: Post Timepoint (hr) Value: None
  misc_feature: MA Experiment 20001555 PARAMETER Experiment Name: At_Drought_Soil_Dry_P Parameter: Post-Treatment Value: None
  misc_feature: MA Experiment 20001555 PARAMETER Experiment Name: At_Drought_Soil_Dry_P Parameter: Timepoint (day) Value: 10
  misc_feature: MA Experiment 20001555 PARAMETER Experiment Name: At_Drought_Soil_Dry_P Parameter: Treatment Value: Drought vs. No Drought
  misc_feature: MA Experiment ID: 20001556 Result: Up-regulated in Transcription
  misc_feature: MA Experiment 20001556 PARAMETER Experiment Name: At_Drought_Soil_Dry_P Parameter: Age (day) Value: 26
  misc_feature: MA Experiment 20001556 PARAMETER Experiment Name: At_Drought_Soil_Dry_P Parameter: Organism Value: A. thaliana
  misc_feature: MA Experiment 20001556 PARAMETER Experiment Name: At_Drought_Soil_Dry_P Parameter: Plant Line Value: WS
  misc_feature: MA Experiment 20001556 PARAMETER Experiment Name: At_Drought_Soil_Dry_P Parameter: Post Timepoint (hr) Value: None
  misc_feature: MA Experiment 20001556 PARAMETER Experiment Name: At_Drought_Soil_Dry_P Parameter: Post-Treatment Value: None
  misc_feature: MA Experiment 20001556 PARAMETER Experiment Name: At_Drought_Soil_Dry_P Parameter: Timepoint (day) Value: 12
  misc_feature: MA Experiment 20001556 PARAMETER Experiment Name: At_Drought_Soil_Dry_P Parameter: Treatment Value: Drought vs. No Drought
  misc_feature: MA Experiment ID: 20001559 Result: Up-regulated in Transcription
  misc_feature: MA Experiment 20001559 PARAMETER Experiment Name: At_Drought_Soil_Dry_P Parameter: Age (day) Value: 28
  misc_feature: MA Experiment 20001559 PARAMETER Experiment Name: At_Drought_Soil_Dry_P Parameter: Organism Value: A. thaliana
  misc_feature: MA Experiment 20001559 PARAMETER Experiment Name: At_Drought_Soil_Dry_P Parameter: Plant Line Value: WS
  misc_feature: MA Experiment 20001559 PARAMETER Experiment Name: At_Drought_Soil_Dry_P Parameter: Post Timepoint (hr) Value: 29
  misc_feature: MA Experiment 20001559 PARAMETER Experiment Name: At_Drought_Soil_Dry_P Parameter: Post-Treatment Value: Re-Water vs. No Drought
  misc_feature: MA Experiment 20001559 PARAMETER Experiment Name: At_Drought_Soil_Dry_P Parameter: Timepoint (day) Value: 14
  misc_feature: MA Experiment 20001559 PARAMETER Experiment Name: At_Drought_Soil_Dry_P Parameter: Treatment Value: Drought vs. No Drought
  misc_feature: MA Experiment ID: 20001560 Result: Up-regulated in Transcription
  misc_feature: MA Experiment 20001560 PARAMETER Experiment Name: At_Drought_Soil_Dry_P Parameter: Age (day) Value: 28
  misc_feature: MA Experiment 20001560 PARAMETER Experiment Name: At_Drought_Soil_Dry_P Parameter: Organism Value: A. thaliana
  misc_feature: MA Experiment 20001560 PARAMETER Experiment Name: At_Drought_Soil_Dry_P Parameter: Plant Line Value: WS
  misc_feature: MA Experiment 20001560 PARAMETER Experiment Name: At_Drought_Soil_Dry_P Parameter: Post Timepoint (hr) Value: None
  misc_feature: MA Experiment 20001560 PARAMETER Experiment Name: At_Drought_Soil_Dry_P Parameter: Post-Treatment Value: None
  misc_feature: MA Experiment 20001560 PARAMETER Experiment Name: At_Drought_Soil_Dry_P Parameter: Timepoint (day) Value: 14
  misc_feature: MA Experiment 20001560 PARAMETER Experiment Name: At_Drought_Soil_Dry_P Parameter: Treatment Value: Drought vs. No Drought
  misc_feature: MA Experiment ID: 20001904 Result: Up-regulated in Transcription
  misc_feature: MA Experiment 20001904 PARAMETER Experiment Name: At_Drought_Reproduction_P Parameter: Age (day) Value: 37
  misc_feature: MA Experiment 20001904 PARAMETER Experiment Name: At_Drought_Reproduction_P Parameter: Organism Value: A. thaliana
  misc_feature: MA Experiment 20001904 PARAMETER Experiment Name: At_Drought_Reproduction_P Parameter: Plant Line Value: WS
  misc_feature: MA Experiment 20001904 PARAMETER Experiment Name: At_Drought_Reproduction_P Parameter: Timepoint (day) Value: 7
  misc_feature: MA Experiment 20001904 PARAMETER Experiment Name: At_Drought_Reproduction_P Parameter: Tissue Value: Rosettes
  misc_feature: MA Experiment 20001904 PARAMETER Experiment Name: At_Drought_Reproduction_P Parameter: Treatment Value: Drought vs. No Drought
atcactacacnnnnctcctattgctaacgaacataaaacgctacctaagagatcaatatggctggagtgatgaaggtggtatgcttgctcttggcctgcatgattgaggccggtccaatcacatctaaggctgcgctaagctgtggctcaaataacatcgacttggcatcgcgaattgggtacgtgctccaaggtggagtcattcccccggcgtgttgctccggtgttagaaacctcaacagtataggcaagannnccccagacgcgtcngctagcttgcaattgcattcaaggtgccgctagagccttaggctctggtctcaacgctgggcgtgcaactggaattcctagggcatgtggagtcaatattccttacgaaatcagcaccagcaccaactgcaaaaccgtgaggtgatgagctnnnnacggcgagatgatgctactaccggaagattccaatccttattatataatggatgagattaatattaaataagatgatcgaatgtttgtttttagagatattaatttcttgtc

SEQ ID NO: 47799 - protein, 81 aa, Arabidopsis thaliana
  peptide (1)..(81): Ceres Seq. ID no. 13648547
  misc_feature (1)..(69): Homolog of NCBI NO: 2497740 NR Description: Nonspecific lipid-transfer protein D precursor
  misc_feature (1)..(69): Homolog of NCBI NO: 5777389 NR Description: non-specific lipid transfer protein [Brassica
  misc_feature (1)..(69): Homolog of NCBI NO: 15224898 NR Description: nonspecific lipid transfer protein 2 (LTP 2)
  misc_feature (1)..(69): Homolog of NCBI NO: 2497737 NR Description: NONSPECIFIC LIPID-TRANSFER PROTEIN 3 PRECURSOR
  misc_feature (1)..(69): Homolog of NCBI NO: 2497739 NR Description: NONSPECIFIC LIPID-TRANSFER PROTEIN B PRECURSOR
  misc_feature (1)..(69): Homolog of NCBI NO: 2497735 NR Description: NONSPECIFIC LIPID-TRANSFER PROTEIN 1 PRECURSOR
  misc_feature (1)..(69): Homolog of NCBI NO: 2497736 NR Description: NONSPECIFIC LIPID-TRANSFER PROTEIN 2 PRECURSOR
  misc_feature (1)..(69): Homolog of NCBI NO: 11273805 NR Description: lipid transfer protein [imported] - wild cabbage
  misc_feature (1)..(69): Homolog of NCBI NO: 2497738 NR Description: NONSPECIFIC LIPID-TRANSFER PROTEIN A PRECURSOR
  misc_feature (1)..(69): Homolog of NCBI NO: 15224899 NR Description: nonspecific lipid transfer protein 1 (LTP 1)
  misc_feature (66)..(66): Xaa is any aa, unknown or other
  misc_feature (67)..(67): Xaa is any aa, unknown or other
  misc_feature (71)..(71): Xaa is any aa, unknown or other
MAGVMKVVCLLLACMIEAGPITSKAALSCGSNNIDLASRIGYVLQGGVIPPACCSGVRNLNSIGKXXPDAXASLQLHSRCR

SEQ ID NO: 47800 - protein, 77 aa, Arabidopsis thaliana
  peptide (1)..(77): Ceres Seq. ID no. 13648548
  misc_feature (1)..(65): Homolog of NCBI NO: 2497740 NR Description: Nonspecific lipid-transfer protein D precursor
  misc_feature (1)..(65): Homolog of NCBI NO: 5777389 NR Description: non-specific lipid transfer protein [Brassica
  misc_feature (1)..(65): Homolog of NCBI NO: 15224898 NR Description: nonspecific lipid transfer protein 2 (LTP 2)
  misc_feature (1)..(65): Homolog of NCBI NO: 2497737 NR Description: NONSPECIFIC LIPID-TRANSFER PROTEIN 3 PRECURSOR
  misc_feature (1)..(65): Homolog of NCBI NO: 2497739 NR Description: NONSPECIFIC LIPID-TRANSFER PROTEIN B PRECURSOR
  misc_feature (1)..(65): Homolog of NCBI NO: 2497735 NR Description: NONSPECIFIC LIPID-TRANSFER PROTEIN 1 PRECURSOR
  misc_feature (1)..(65): Homolog of NCBI NO: 2497736 NR Description: NONSPECIFIC LIPID-TRANSFER PROTEIN 2 PRECURSOR
  misc_feature (1)..(65): Homolog of NCBI NO: 11273805 NR Description: lipid transfer protein [imported] - wild cabbage
  misc_feature (1)..(65): Homolog of NCBI NO: 2497738 NR Description: NONSPECIFIC LIPID-TRANSFER PROTEIN A PRECURSOR
  misc_feature (1)..(65): Homolog of NCBI NO: 15224899 NR Description: nonspecific lipid transfer protein 1 (LTP 1)
  misc_feature (62)..(62): Xaa is any aa, unknown or other
  misc_feature (63)..(63): Xaa is any aa, unknown or other
  misc_feature (67)..(67): Xaa is any aa, unknown or other
MKVVCLLLACMIEAGPITSKAALSCGSNNIDLASRIGYVLQGGVIPPACCSGVRNLNSIGKXXPDAXASLQLHSRCR

SEQ ID NO: 47801 - protein, 67 aa, Arabidopsis thaliana
  peptide (1)..(67): Ceres Seq. ID no. 13648549
  misc_feature (1)..(55): Homolog of NCBI NO: 2497740 NR Description: Nonspecific lipid-transfer protein D precursor
  misc_feature (1)..(55): Homolog of NCBI NO: 5777389 NR Description: non-specific lipid transfer protein [Brassica
  misc_feature (1)..(55): Homolog of NCBI NO: 15224898 NR Description: nonspecific lipid transfer protein 2 (LTP 2)
  misc_feature (1)..(55): Homolog of NCBI NO: 2497737 NR Description: NONSPECIFIC LIPID-TRANSFER PROTEIN 3 PRECURSOR
  misc_feature (1)..(55): Homolog of NCBI NO: 2497739 NR Description: NONSPECIFIC LIPID-TRANSFER PROTEIN B PRECURSOR
  misc_feature (1)..(55): Homolog of NCBI NO: 2497735 NR Description: NONSPECIFIC LIPID-TRANSFER PROTEIN 1 PRECURSOR
  misc_feature (1)..(55): Homolog of NCBI NO: 2497736 NR Description: NONSPECIFIC LIPID-TRANSFER PROTEIN 2 PRECURSOR
  misc_feature (1)..(55): Homolog of NCBI NO: 11273805 NR Description: lipid transfer protein [imported] - wild cabbage
  misc_feature (1)..(55): Homolog of NCBI NO: 2497738 NR Description: NONSPECIFIC LIPID-TRANSFER PROTEIN A PRECURSOR
  misc_feature (1)..(55): Homolog of NCBI NO: 15224899 NR Description: nonspecific lipid transfer protein 1 (LTP 1)
  misc_feature (52)..(52): Xaa is any aa, unknown or other
  misc_feature (53)..(53): Xaa is any aa, unknown or other
  misc_feature (57)..(57): Xaa is any aa, unknown or other
MIEAGPITSKAALSCGSNNIDLASRIGYVLQGGVIPPACCSGVRNLNSIGKXXPDAXASLQLHSRCR

SEQ ID NO: 47802 - DNA, 1377 bp, Arabidopsis thaliana
  misc_feature (1)..(1377): Ceres Seq. ID no. 13648551
  misc_feature: MA Experiment ID: 20000185 Result: Up-regulated in Transcription
  misc_feature: MA Experiment 20000185 PARAMETER Experiment Name: At_Roots__P Parameter: Age (day) Value: 7 vs. 21
  misc_feature: MA Experiment 20000185 PARAMETER Experiment Name: At_Roots__P Parameter: Organism Value: A. thaliana
  misc_feature: MA Experiment 20000185 PARAMETER Experiment Name: At_Roots__P Parameter: Tissue Value: Roots vs. Whole Plant
ttcaatctcttcctcaaatcactctttttggggttcgttttgtttgtgttgtaagcatccctgttgtgcatttcgtttatccaggtgaattcttgcaaagccttgagcagctttcagatgataaagactttggtctctccttatagtggatttggatctcagaagttgaagtttgacagatcttctgagaaagtgaagacgagagcagtaagaatggagctcacaatcactcaacctgatgattggcatcttcatctccgtgacggtgatcttcttcatgctgttgttccccacagtgcgagtaattttaagagagcgattgtgatgccgaatctgaagcctcctgtcacctccactgcagctgccattatttaccggaaatttatcatgaaagctttgccatctgagagtagctttgatccacttatgacactttatttgactgacaaaactctacctgaagagatcaggcttgcaagggaaagtggtgtggtttatgcggtgaagctgtaccctgccggagcaacaaccaactctcaagatggtgtcacggatctctttggaaaatgcttaccggtactagaagagatggtcaaacaaaacatgcctttgctggttcatggggaggtcacagatccgagtatcgatgtctttgaccgcgagaaaatcttcattgagacagttctgcagcctctaatccaacgccttccgcagctgaaagtagtgatggaacacatcacaaccatggatgctgtgaattttgttgaatcttgcaaagaagggtctgtgggtgcaacagtcacaccacaacatctccttctcaacaggaacgcccttttccaaggtggattacaacctcacaactactgtcttcccgttctcaaaagagaaatacatagagaagccattgtcaaagctgtaactagtggaagcaagaagttcttcctcggcacagatagtgctccacatgaacggagtagaaaagaatcatcctgcggatgtgctggtatttacagcgctcccattgccttgtccctatacgccaaggtctttgatgaggcgggtgcgctggacaagttggaagctttcaccagtttcaatggacctgatttctatggccttccgagaaactcgtcaaagatcacactgaagaaatctccttggaaggttccagacgttttcaacttcccattcggagagatcgtccctatgtttgctggagaaacccttcaatggcaaccgttgaaataatgtggtgatttgaagttgtcaaattttttctcccaaataagtgaactcgtgtaccttttggattgaattttcttacggctgagttatgccctgcattttttgaggaataaaagcaagatactgacc

SEQ ID NO: 47803 - protein, 377 aa, Arabidopsis thaliana
  peptide (1)..(377): Ceres Seq. ID no. 13648552
  misc_feature (32)..(377): Pfam Name: Amidohydrolase family Pfam Description: Amidohydrolase family
  misc_feature (34)..(376): Homolog of NCBI NO: 33598272 NR Description: dihydroorotase [Bordetella parapertussis]
  misc_feature (34)..(376): Homolog of NCBI NO: 33593964 NR Description: dihydroorotase [Bordetella pertussis]
  misc_feature (35)..(374): Homolog of NCBI NO: 22988480 NR Description: hypothetical protein [Burkholderia fungorum]
  misc_feature (34)..(374): Homolog of NCBI NO: 16331133 NR Description: dihydroorotase [Synechocystis sp. PCC 6803]
  misc_feature (35)..(374): Homolog of NCBI NO: 17545206 NR Description: PROBABLE DIHYDROOROTASE PROTEIN [Ralstonia
  misc_feature (35)..(374): Homolog of NCBI NO: 34499785 NR Description: dihydroorotase [Chromobacterium violaceum ATCC
  misc_feature (34)..(374): Homolog of NCBI NO: 30248736 NR Description: Dihydroorotase homodimeric type
  misc_feature (34)..(375): Homolog of NCBI NO: 34909480 NR Description: putative dihydroorotase [Oryza sativa (japonica
  misc_feature (33)..(375): Homolog of NCBI NO: 17977977 NR Description: dihydroorotase [Beta vulgaris]
  misc_feature (1)..(377): Homolog of NCBI NO: 15235865 NR Description: dihydroorotase [Arabidopsis thaliana]
MIKTLVSPYSGFGSQKLKFDRSSEKVKTRAVRMELTITQPDDWHLHLRDGDLLHAVVPHSASNFKRAIVMPNLKPPVTSTAAAIIYRKFIMKALPSESSFDPLMTLYLTDKTLPEEIRLARESGVVYAVKLYPAGATTNSQDGVTDLFGKCLPVLEEMVKQNMPLLVHGEVTDPSIDVFDREKIFIETVLQPLIQRLPQLKVVMEHITTMDAVNFVESCKEGSVGATVTPQHLLLNRNALFQGGLQPHNYCLPVLKREIHREAIVKAVTSGSKKFFLGTDSAPHERSRKESSCGCAGIYSAPIALSLYAKVFDEAGALDKLEAFTSFNGPDFYGLPRNSSKITLKKSPWKVPDVFNFPFGEIVPMFAGETLQWQPLK

SEQ ID NO: 47804 - protein, 345 aa, Arabidopsis thaliana
  peptide (1)..(345): Ceres Seq. ID no. 13648553
  misc_feature (1)..(345): Pfam Name: Amidohydrolase family Pfam Description: Amidohydrolase family
  misc_feature (2)..(344): Homolog of NCBI NO: 33598272 NR Description: dihydroorotase [Bordetella parapertussis]
  misc_feature (2)..(344): Homolog of NCBI NO: 33593964 NR Description: dihydroorotase [Bordetella pertussis]
  misc_feature (3)..(342): Homolog of NCBI NO: 22988480 NR Description: hypothetical protein [Burkholderia fungorum]
  misc_feature (2)..(342): Homolog of NCBI NO: 16331133 NR Description: dihydroorotase [Synechocystis sp. PCC 6803]
  misc_feature (3)..(342): Homolog of NCBI NO: 17545206 NR Description: PROBABLE DIHYDROOROTASE PROTEIN [Ralstonia
  misc_feature (3)..(342): Homolog of NCBI NO: 34499785 NR Description: dihydroorotase [Chromobacterium violaceum ATCC
  misc_feature (2)..(342): Homolog of NCBI NO: 30248736 NR Description: Dihydroorotase homodimeric type
  misc_feature (2)..(343): Homolog of NCBI NO: 34909480 NR Description: putative dihydroorotase [Oryza sativa (japonica
  misc_feature (1)..(343): Homolog of NCBI NO: 17977977 NR Description: dihydroorotase [Beta vulgaris]
  misc_feature (1)..(345): Homolog of NCBI NO: 15235865 NR Description: dihydroorotase [Arabidopsis thaliana]
MELTITQPDDWHLHLRDGDLLHAVVPHSASNFKRAIVMPNLKPPVTSTAAAIIYRKFIMKALPSESSFDPLMTLYLTDKTLPEEIRLARESGVVYAVKLYPAGATTNSQDGVTDLFGKCLPVLEEMVKQNMPLLVHGEVTDPSIDVFDREKIFIETVLQPLIQRLPQLKVVMEHITTMDAVNFVESCKEGSVGATVTPQHLLLNRNALFQGGLQPHNYCLPVLKREIHREAIVKAVTSGSKKFFLGTDSAPHERSRKESSCGCAGIYSAPIALSLYAKVFDEAGALDKLEAFTSFNGPDFYGLPRNSSKITLKKSPWKVPDVFNFPFGEIVPMFAGETLQWQPLK

SEQ ID NO: 47805 - protein, 308 aa, Arabidopsis thaliana
  peptide (1)..(308): Ceres Seq. ID no. 13648554
  misc_feature (1)..(308): Pfam Name: Amidohydrolase family Pfam Description: Amidohydrolase family
  misc_feature (1)..(307): Homolog of NCBI NO: 33598272 NR Description: dihydroorotase [Bordetella parapertussis]
  misc_feature (1)..(307): Homolog of NCBI NO: 33593964 NR Description: dihydroorotase [Bordetella pertussis]
  misc_feature (1)..(305): Homolog of NCBI NO: 22988480 NR Description: hypothetical protein [Burkholderia fungorum]
  misc_feature (1)..(305): Homolog of NCBI NO: 16331133 NR Description: dihydroorotase [Synechocystis sp. PCC 6803]
  misc_feature (1)..(305): Homolog of NCBI NO: 17545206 NR Description: PROBABLE DIHYDROOROTASE PROTEIN [Ralstonia
  misc_feature (1)..(305): Homolog of NCBI NO: 34499785 NR Description: dihydroorotase [Chromobacterium violaceum ATCC
  misc_feature (1)..(305): Homolog of NCBI NO: 30248736 NR Description: Dihydroorotase homodimeric type
  misc_feature (1)..(306): Homolog of NCBI NO: 34909480 NR Description: putative dihydroorotase [Oryza sativa (japonica
  misc_feature (1)..(306): Homolog of NCBI NO: 17977977 NR Description: dihydroorotase [Beta vulgaris]
  misc_feature (1)..(308): Homolog of NCBI NO: 15235865 NR Description: dihydroorotase [Arabidopsis thaliana]
MPNLKPPVTSTAAAIIYRKFIMKALPSESSFDPLMTLYLTDKTLPEEIRLARESGVVYAVKLYPAGATTNSQDGVTDLFGKCLPVLEEMVKQNMPLLVHGEVTDPSIDVFDREKIFIETVLQPLIQRLPQLKVVMEHITTMDAVNFVESCKEGSVGATVTPQHLLLNRNALFQGGLQPHNYCLPVLKREIHREAIVKAVTSGSKKFFLGTDSAPHERSRKESSCGCAGIYSAPIALSLYAKVFDEAGALDKLEAFTSFNGPDFYGLPRNSSKITLKKSPWKVPDVFNFPFGEIVPMFAGETLQWQPLK

SEQ ID NO: 47806 - DNA, 1493 bp, Arabidopsis thaliana; identical to SEQ ID NO: 30101
  misc_feature (1)..(1493): Ceres Seq. ID no. 13648561
  misc_feature: MA Experiment ID: 20000179 Result: Up-regulated in Transcription
  misc_feature: MA Experiment 20000179 PARAMETER Experiment Name: At_Germinating_Seeds_P Parameter: Age (hr) Value: 6 vs. 0
  misc_feature: MA Experiment 20000179 PARAMETER Experiment Name: At_Germinating_Seeds_P Parameter: Tissue Value: Germinating Seeds
  misc_feature: MA Experiment ID: 20000180 Result: Up-regulated in Transcription
  misc_feature: MA Experiment 20000180 PARAMETER Experiment Name: At_Germinating_Seeds_P Parameter: Age (hr) Value: 24 vs. 0
  misc_feature: MA Experiment 20000180 PARAMETER Experiment Name: At_Germinating_Seeds_P Parameter: Tissue Value: Germinating Seeds
  misc_feature: MA Experiment ID: 20000227 Result: Up-regulated in Transcription
  misc_feature: MA Experiment 20000227 PARAMETER Experiment Name: At_Root-Tips-vs-Tops_P Parameter: Tissue Value: Root Tips vs. Root Tops
  misc_feature: MA Experiment ID: 20000794 Result: Down-regulated in Transcription
  misc_feature: MA Experiment 20000794 PARAMETER Experiment Name: At_Petals_P Parameter: Age (day) Value: 23-25 days
  misc_feature: MA Experiment 20000794 PARAMETER Experiment Name: At_Petals_P Parameter: Plant Line Value: WS
  misc_feature: MA Experiment 20000794 PARAMETER Experiment Name: At_Petals_P Parameter: Tissue Value: Petals vs. Whole plant
  misc_feature: MA Experiment ID: 20001559 Result: Down-regulated in Transcription
  misc_feature: MA Experiment 20001559 PARAMETER Experiment Name: At_Drought_Soil_Dry_P Parameter: Age (day) Value: 28
  misc_feature: MA Experiment 20001559 PARAMETER Experiment Name: At_Drought_Soil_Dry_P Parameter: Organism Value: A. thaliana
  misc_feature: MA Experiment 20001559 PARAMETER Experiment Name: At_Drought_Soil_Dry_P Parameter: Plant Line Value: WS
  misc_feature: MA Experiment 20001559 PARAMETER Experiment Name: At_Drought_Soil_Dry_P Parameter: Post Timepoint (hr) Value: 29
  misc_feature: MA Experiment 20001559 PARAMETER Experiment Name: At_Drought_Soil_Dry_P Parameter: Post-Treatment Value: Re-Water vs. No Drought
  misc_feature: MA Experiment 20001559 PARAMETER Experiment Name: At_Drought_Soil_Dry_P Parameter: Timepoint (day) Value: 14
  misc_feature: MA Experiment 20001559 PARAMETER Experiment Name: At_Drought_Soil_Dry_P Parameter: Treatment Value: Drought vs. No Drought
  misc_feature: MA Experiment ID: 20001906 Result: Down-regulated in Transcription
  misc_feature: MA Experiment 20001906 PARAMETER Experiment Name: At_Drought_Reproduction_P Parameter: Age (day) Value: 35
  misc_feature: MA Experiment 20001906 PARAMETER Experiment Name: At_Drought_Reproduction_P Parameter: Organism Value: A. thaliana
  misc_feature: MA Experiment 20001906 PARAMETER Experiment Name: At_Drought_Reproduction_P Parameter: Plant Line Value: WS
  misc_feature: MA Experiment 20001906 PARAMETER Experiment Name: At_Drought_Reproduction_P Parameter: Timepoint (day) Value: 5
  misc_feature: MA Experiment 20001906 PARAMETER Experiment Name: At_Drought_Reproduction_P Parameter: Tissue Value: Siliques
  misc_feature: MA Experiment 20001906 PARAMETER Experiment Name: At_Drought_Reproduction_P Parameter: Treatment Value: Drought vs. No Drought
  misc_feature: MA Experiment ID: 20001908 Result: Down-regulated in Transcription
  misc_feature: MA Experiment 20001908 PARAMETER Experiment Name: At_Drought_Reproduction_P Parameter: Age (day) Value: 40
  misc_feature: MA Experiment 20001908 PARAMETER Experiment Name: At_Drought_Reproduction_P Parameter: Organism Value: A. thaliana
  misc_feature: MA Experiment 20001908 PARAMETER Experiment Name: At_Drought_Reproduction_P Parameter: Plant Line Value: WS
  misc_feature: MA Experiment 20001908 PARAMETER Experiment Name: At_Drought_Reproduction_P Parameter: Timepoint (day) Value: 10
  misc_feature: MA Experiment 20001908 PARAMETER Experiment Name: At_Drought_Reproduction_P Parameter: Tissue Value: Siliques
  misc_feature: MA Experiment 20001908 PARAMETER Experiment Name: At_Drought_Reproduction_P Parameter: Treatment Value: Drought vs. No Drought
  misc_feature: MA Experiment ID: 20001911 Result: Down-regulated in Transcription
  misc_feature: MA Experiment 20001911 PARAMETER Experiment Name: At_Drought_Reproduction_P Parameter: Age (day) Value: 40
  misc_feature: MA Experiment 20001911 PARAMETER Experiment Name: At_Drought_Reproduction_P Parameter: Organism Value: A. thaliana
  misc_feature: MA Experiment 20001911 PARAMETER Experiment Name: At_Drought_Reproduction_P Parameter: Plant Line Value: WS
  misc_feature: MA Experiment 20001911 PARAMETER Experiment Name: At_Drought_Reproduction_P Parameter: Timepoint (day) Value: 10
  misc_feature: MA Experiment 20001911 PARAMETER Experiment Name: At_Drought_Reproduction_P Parameter: Tissue Value: Flowers
  misc_feature: MA Experiment 20001911 PARAMETER Experiment Name: At_Drought_Reproduction_P Parameter: Treatment Value: Drought vs. No Drought

SEQ ID NO: 47807 - protein, 384 aa, Arabidopsis thaliana; identical to SEQ ID NO: 30102
  peptide (1)..(384): Ceres Seq. ID no. 13648562
  misc_feature (76)..(347): Pfam Name: Polyprenyl synthetase Pfam Description: Polyprenyl synthetase
  misc_feature (76)..(347): Pfam Name: Polyprenyl synthetase Pfam Description: Polyprenyl synthetase
  misc_feature (44)..(384): Homolog of NCBI NO: 14488053 NR Description: farnesyl diphosphate synthase [Mentha x piperita]
  misc_feature (45)..(384): Homolog of NCBI NO: 1922251 NR Description: farnesyl pyrophosphate synthase [Gossypium
  misc_feature (45)..(384): Homolog of NCBI NO: 7433992 NR Description: farnesyl-pyrophosphate synthetase - Para rubber
  misc_feature (45)..(384): Homolog of NCBI NO: 1346029 NR Description: Farnesyl pyrophosphate synthetase 2 (FPP
  misc_feature (45)..(384): Homolog of NCBI NO: 20135548 NR Description: farnesyl pyrophosphate synthase [Malus x
  misc_feature (44)..(384): Homolog of NCBI NO: 14488053 NR Description: farnesyl diphosphate synthase [Mentha x piperita]
  misc_feature (45)..(384): Homolog of NCBI NO: 7433992 NR Description: farnesyl-pyrophosphate synthetase - Para rubber
  misc_feature (45)..(384): Homolog of NCBI NO: 20135548 NR Description: farnesyl pyrophosphate synthase [Malus x
  misc_feature (1)..(384): Homolog of NCBI NO: 15238801 NR Description: farnesyl pyrophosphate synthetase 1 (FPS1)
  misc_feature (42)..(384): Homolog of NCBI NO: 1146159 NR Description: farnesyl diphosphate synthase short form
  misc_feature (42)..(384): Homolog of NCBI NO: 1076319 NR Description: farnesyl-pyrophosphate synthetase FPS1 -
  misc_feature (45)..(384): Homolog of NCBI NO: 15236002 NR Description: farnesyl pyrophosphate synthetase 2 (FPS2)
  misc_feature (45)..(384): Homolog of NCBI NO: 1346028 NR Description: Farnesyl pyrophosphate synthetase 1 (FPP
  misc_feature (45)..(384): Homolog of NCBI NO: 1346029 NR Description: Farnesyl pyrophosphate synthetase 2 (FPP
  misc_feature (45)..(384): Homolog of NCBI NO: 1922251 NR Description: farnesyl pyrophosphate synthase [Gossypium
  misc_feature (45)..(384): Homolog of NCBI NO: 1346028 NR Description: Farnesyl pyrophosphate synthetase 1 (FPP
  misc_feature (45)..(384): Homolog of NCBI NO: 15236002 NR Description: farnesyl pyrophosphate synthetase 2 (FPS2)
  misc_feature (42)..(384): Homolog of NCBI NO: 1076319 NR Description: farnesyl-pyrophosphate synthetase FPS1 -
  misc_feature (42)..(384): Homolog of NCBI NO: 1146159 NR Description: farnesyl diphosphate synthase short form
  misc_feature (1)..(384): Homolog of NCBI NO: 15238801 NR Description: farnesyl pyrophosphate synthetase 1 (FPS1)

SEQ ID NO: 47808 - protein, 343 aa, Arabidopsis thaliana; identical to SEQ ID NO: 30103
  peptide (1)..(343): Ceres Seq. ID no. 13648563
  misc_feature (35)..(306): Pfam Name: Polyprenyl synthetase Pfam Description: Polyprenyl synthetase
  misc_feature (35)..(306): Pfam Name: Polyprenyl synthetase Pfam Description: Polyprenyl synthetase
  misc_feature (3)..(343): Homolog of NCBI NO: 14488053 NR Description: farnesyl diphosphate synthase [Mentha x piperita]
  misc_feature (4)..(343): Homolog of NCBI NO: 1922251 NR Description: farnesyl pyrophosphate synthase [Gossypium
  misc_feature (4)..(343): Homolog of NCBI NO: 7433992 NR Description: farnesyl-pyrophosphate synthetase - Para rubber
  misc_feature (4)..(343): Homolog of NCBI NO: 1346029 NR Description: Farnesyl pyrophosphate synthetase 2 (FPP
  misc_feature (4)..(343): Homolog of NCBI NO: 20135548 NR Description: farnesyl pyrophosphate synthase [Malus x
  misc_feature (3)..(343): Homolog of NCBI NO: 14488053 NR Description: farnesyl diphosphate synthase [Mentha x piperita]
  misc_feature (4)..(343): Homolog of NCBI NO: 7433992 NR Description: farnesyl-pyrophosphate synthetase - Para rubber
  misc_feature (4)..(343): Homolog of NCBI NO: 20135548 NR Description: farnesyl pyrophosphate synthase [Malus x
  misc_feature (1)..(343): Homolog of NCBI NO: 15238801 NR Description: farnesyl pyrophosphate synthetase 1 (FPS1)
  misc_feature (1)..(343): Homolog of NCBI NO: 1146159 NR Description: farnesyl diphosphate synthase short form
  misc_feature (1)..(343): Homolog of NCBI NO: 1076319 NR Description: farnesyl-pyrophosphate synthetase FPS1 -
  misc_feature (4)..(343): Homolog of NCBI NO: 15236002 NR Description: farnesyl pyrophosphate synthetase 2 (FPS2)
  misc_feature (4)..(343): Homolog of NCBI NO: 1346028 NR Description: Farnesyl pyrophosphate synthetase 1 (FPP
  misc_feature (4)..(343): Homolog of NCBI NO: 1346029 NR Description: Farnesyl pyrophosphate synthetase 2 (FPP
  misc_feature (4)..(343): Homolog of NCBI NO: 1922251 NR Description: farnesyl pyrophosphate synthase [Gossypium
  misc_feature (4)..(343): Homolog of NCBI NO: 1346028 NR Description: Farnesyl pyrophosphate synthetase 1 (FPP
  misc_feature (4)..(343): Homolog of NCBI NO: 15236002 NR Description: farnesyl pyrophosphate synthetase 2 (FPS2)
  misc_feature (1)..(343): Homolog of NCBI NO: 1076319 NR Description: farnesyl-pyrophosphate synthetase FPS1 -
  misc_feature (1)..(343): Homolog of NCBI NO: 1146159 NR Description: farnesyl diphosphate synthase short form
  misc_feature (1)..(343): Homolog of NCBI NO: 15238801 NR Description: farnesyl pyrophosphate synthetase 1 (FPS1)

SEQ ID NO: 47809 - protein, 305 aa, Arabidopsis thaliana; identical to SEQ ID NO: 30104
  peptide (1)..(305): Ceres Seq. ID no. 13648564
  misc_feature (1)..(268): Pfam Name: Polyprenyl synthetase Pfam Description: Polyprenyl synthetase
  misc_feature (1)..(268): Pfam Name: Polyprenyl synthetase Pfam Description: Polyprenyl synthetase
  misc_feature (1)..(305): Homolog of NCBI NO: 14488053 NR Description: farnesyl diphosphate synthase [Mentha x piperita]
  misc_feature (1)..(305): Homolog of NCBI NO: 1922251 NR Description: farnesyl pyrophosphate synthase [Gossypium
  misc_feature (1)..(305): Homolog of NCBI NO: 7433992 NR Description: farnesyl-pyrophosphate synthetase - Para rubber
  misc_feature (1)..(305): Homolog of NCBI NO: 1346029 NR Description: Farnesyl pyrophosphate synthetase 2 (FPP
  misc_feature (1)..(305): Homolog of NCBI NO: 20135548 NR Description: farnesyl pyrophosphate synthase [Malus x
  misc_feature (1)..(305): Homolog of NCBI NO: 14488053 NR Description: farnesyl diphosphate synthase [Mentha x piperita]
  misc_feature (1)..(305): Homolog of NCBI NO: 7433992 NR Description: farnesyl-pyrophosphate synthetase - Para rubber
  misc_feature (1)..(305): Homolog of NCBI NO: 20135548 NR Description: farnesyl pyrophosphate synthase [Malus x
  misc_feature (1)..(305): Homolog of NCBI NO: 15238801 NR Description: farnesyl pyrophosphate synthetase 1 (FPS1)
  misc_feature (1)..(305): Homolog of NCBI NO: 1146159 NR Description: farnesyl diphosphate synthase short form
  misc_feature (1)..(305): Homolog of NCBI NO: 1076319 NR Description: farnesyl-pyrophosphate synthetase FPS1 -
  misc_feature (1)..(305): Homolog of NCBI NO: 15236002 NR Description: farnesyl pyrophosphate synthetase 2 (FPS2)
  misc_feature (1)..(305): Homolog of NCBI NO: 1346028 NR Description: Farnesyl pyrophosphate synthetase 1 (FPP
  misc_feature (1)..(305): Homolog of NCBI NO: 1346029 NR Description: Farnesyl pyrophosphate synthetase 2 (FPP
  misc_feature (1)..(305): Homolog of NCBI NO: 1922251 NR Description: farnesyl pyrophosphate synthase [Gossypium
  misc_feature (1)..(305): Homolog of NCBI NO: 1346028 NR Description: Farnesyl pyrophosphate synthetase 1 (FPP
  misc_feature (1)..(305): Homolog of NCBI NO: 15236002 NR Description: farnesyl pyrophosphate synthetase 2 (FPS2)
  misc_feature (1)..(305): Homolog of NCBI NO: 1076319 NR Description: farnesyl-pyrophosphate synthetase FPS1 -
  misc_feature (1)..(305): Homolog of NCBI NO: 1146159 NR Description: farnesyl diphosphate synthase short form
  misc_feature (1)..(305): Homolog of NCBI NO: 15238801 NR Description: farnesyl pyrophosphate synthetase 1 (FPS1)

SEQ ID NO: 47810 - DNA, 1459 bp, Arabidopsis thaliana; identical to SEQ ID NO: 23808
  misc_feature (1)..(1459): Ceres Seq. ID no. 12394733
  misc_feature: MA Experiment ID: 108461 Result: Down-regulated in Transcription
  misc_feature: MA Experiment 108461 PARAMETER Experiment Name: At_Germinating_Seeds_cDNA_P Parameter: Age (day) Value: 1 vs. 0
  misc_feature: MA Experiment 108461 PARAMETER Experiment Name: At_Germinating_Seeds_cDNA_P Parameter: Tissue Value: Germinating Seeds

SEQ ID NO: 47811 - protein, 395 aa, Arabidopsis thaliana; identical to SEQ ID NO: 23809
  peptide (1)..(395): Ceres Seq. ID no. 12394734
  misc_feature (228)..(362): Pfam Name: 7 transmembrane receptor (rhodopsin family) Pfam Description: 7 transmembrane receptor (rhodopsin family)
  misc_feature (228)..(362): Pfam Name: 7 transmembrane receptor (rhodopsin family) Pfam Description: 7 transmembrane receptor (rhodopsin family)
  misc_feature (69)..(236): Homolog of NCBI NO: 15226108 NR Description: plastid protein
  misc_feature (69)..(236): Homolog of NCBI NO: 2440029 NR Description: DAL1 protein [Arabidopsis thaliana]
  misc_feature (15)..(237): Homolog of NCBI NO: 15223247 NR Description: plastid protein, putative
  misc_feature (5)..(237): Homolog of NCBI NO: 15226934 NR Description: unknown protein
  misc_feature (71)..(207): Homolog of NCBI NO: 15218508 NR Description: DAG-like protein; protein id: At1g72530.1
  misc_feature (69)..(236): Homolog of NCBI NO: 15226108 NR Description: plastid protein
  misc_feature (15)..(237): Homolog of NCBI NO: 15223247 NR Description: plastid protein, putative
  misc_feature (71)..(207): Homolog of NCBI NO: 15218508 NR Description: DAG-like protein; protein id: At1g72530.1
  misc_feature (1)..(395): Homolog of NCBI NO: 18400602 NR Description: expressed protein
  misc_feature (113)..(377): Homolog of NCBI NO: 15219250 NR Description: plastid protein, putative; protein id:
  misc_feature (6)..(59): Homolog of NCBI NO: 15219250 NR Description: plastid protein, putative; protein id:
  misc_feature (16)..(237): Homolog of NCBI NO: 27754695 NR Description: putative DAG protein [Arabidopsis thaliana]
  misc_feature (16)..(237): Homolog of NCBI NO: 15230785 NR Description: DAG protein, putative; protein id: At3g06790.1
  misc_feature (5)..(237): Homolog of NCBI NO: 15226934 NR Description: unknown protein
  misc_feature (69)..(236): Homolog of NCBI NO: 2440029 NR Description: DAL1 protein [Arabidopsis thaliana]
  misc_feature (16)..(237): Homolog of NCBI NO: 15230785 NR Description: DAG protein, putative; protein id: At3g06790.1
  misc_feature (16)..(237): Homolog of NCBI NO: 27754695 NR Description: putative DAG protein [Arabidopsis thaliana]
  misc_feature (6)..(59): Homolog of NCBI NO: 15219250 NR Description: plastid protein, putative; protein id:
  misc_feature (113)..(377): Homolog of NCBI NO: 15219250 NR Description: plastid protein, putative; protein id:
  misc_feature (1)..(395): Homolog of NCBI NO: 18400602 NR Description: expressed protein

SEQ ID NO: 47812 - protein, 260 aa, Arabidopsis thaliana; identical to SEQ ID NO: 23810
  peptide (1)..(260): Ceres Seq. ID no. 12394735
  misc_feature (93)..(227): Pfam Name: 7 transmembrane receptor (rhodopsin family) Pfam Description: 7 transmembrane receptor (rhodopsin family)
  misc_feature (93)..(227): Pfam Name: 7 transmembrane receptor (rhodopsin family) Pfam Description: 7 transmembrane receptor (rhodopsin family)
  misc_feature (1)..(101): Homolog of NCBI NO: 21617909 NR Description: plastid protein [Arabidopsis thaliana]
  misc_feature (1)..(101): Homolog of NCBI NO: 15226108 NR Description: plastid protein
  misc_feature (1)..(101): Homolog of NCBI NO: 2440029 NR Description: DAL1 protein [Arabidopsis thaliana]
  misc_feature (1)..(102): Homolog of NCBI NO: 15223247 NR Description: plastid protein, putative
  misc_feature (1)..(102): Homolog of NCBI NO: 15226934 NR Description: unknown protein
  misc_feature (1)..(101): Homolog of NCBI NO: 21617909 NR Description: plastid protein [Arabidopsis thaliana]
  misc_feature (1)..(101): Homolog of NCBI NO: 2440029 NR Description: DAL1 protein [Arabidopsis thaliana]
  misc_feature (1)..(102): Homolog of NCBI NO: 15226934 NR Description: unknown protein
  misc_feature (1)..(260): Homolog of NCBI NO: 18400602 NR Description: expressed protein
  misc_feature (1)..(242): Homolog of NCBI NO: 15219250 NR Description: plastid protein, putative; protein id:
  misc_feature (1)..(102): Homolog of NCBI NO: 27754695 NR Description: putative DAG protein [Arabidopsis thaliana]
  misc_feature (1)..(102): Homolog of NCBI NO: 15230785 NR Description: DAG protein, putative; protein id: At3g06790.1
  misc_feature (1)..(72): Homolog of NCBI NO: 15218508 NR Description: DAG-like protein; protein id: At1g72530.1
  misc_feature (1)..(102): Homolog of NCBI NO: 15223247 NR Description: plastid protein, putative
  misc_feature (1)..(101): Homolog of NCBI NO: 15226108 NR Description: plastid protein
  misc_feature (1)..(72): Homolog of NCBI NO: 15218508 NR Description: DAG-like protein; protein id: At1g72530.1
  misc_feature (1)..(102): Homolog of NCBI NO: 15230785 NR Description: DAG protein, putative; protein id: At3g06790.1
  misc_feature (1)..(102): Homolog of NCBI NO: 27754695 NR Description: putative DAG protein [Arabidopsis thaliana]
  misc_feature (1)..(242): Homolog of NCBI NO: 15219250 NR Description: plastid protein, putative; protein id:
  misc_feature (1)..(260): Homolog of NCBI NO: 18400602 NR Description: expressed protein

SEQ ID NO: 47813 - protein, 208 aa, Arabidopsis thaliana; identical to SEQ ID NO: 23811
  peptide (1)..(208): Ceres Seq. ID no. 12394736

SEQ ID NO: 47814 - DNA, 1369 bp, Arabidopsis thaliana
  misc_feature (1)..(1369): Ceres Seq. ID no. 13648719
  misc_feature: MA Experiment ID: 20000306 Result: Up-regulated in Transcription
  misc_feature: MA Experiment 20000306 PARAMETER Experiment Name: At_Germinating_Seeds_Sub_P Parameter: Age (hr) Value: 6 vs. 0
  misc_feature: MA Experiment 20000306 PARAMETER Experiment Name: At_Germinating_Seeds_Sub_P Parameter: Organism Value: A. thaliana
  misc_feature: MA Experiment 20000306 PARAMETER Experiment Name: At_Germinating_Seeds_Sub_P Parameter: Plant Line Value: WS
  misc_feature: MA Experiment 20000306 PARAMETER Experiment Name: At_Germinating_Seeds_Sub_P Parameter: Tissue Value: Germinating Seeds
  misc_feature: MA Experiment ID: 20000307 Result: Up-regulated in Transcription
  misc_feature: MA Experiment 20000307 PARAMETER Experiment Name: At_Germinating_Seeds_Sub_P Parameter: Age (hr) Value: 24 vs. 0
  misc_feature: MA Experiment 20000307 PARAMETER Experiment Name: At_Germinating_Seeds_Sub_P Parameter: Organism Value: A. thaliana
  misc_feature: MA Experiment 20000307 PARAMETER Experiment Name: At_Germinating_Seeds_Sub_P Parameter: Plant Line Value: WS
  misc_feature: MA Experiment 20000307 PARAMETER Experiment Name: At_Germinating_Seeds_Sub_P Parameter: Tissue Value: Germinating Seeds
  misc_feature: MA Experiment ID: 20000314 Result: Up-regulated in Transcription
  misc_feature: MA Experiment 20000314 PARAMETER Experiment Name: At_14day_Shoots-Roots_Sub_P Parameter: Age (day) Value: 14
  misc_feature: MA Experiment 20000314 PARAMETER Experiment Name: At_14day_Shoots-Roots_Sub_P Parameter: Organism Value: A. thaliana
  misc_feature: MA Experiment 20000314 PARAMETER Experiment Name: At_14day_Shoots-Roots_Sub_P Parameter: Plant Line Value: WS
  misc_feature: MA Experiment 20000314 PARAMETER Experiment Name: At_14day_Shoots-Roots_Sub_P Parameter: Tissue Value: Roots vs. Whole Plant
  misc_feature: MA Experiment ID: 20001807 Result: Down-regulated in Transcription
  misc_feature: MA Experiment 20001807 PARAMETER Experiment Name: At_50mM_NH4NO3_L-to-H_Sub_P Parameter: Timepoint (hr) Value: 6
  misc_feature: MA Experiment 20001807 PARAMETER Experiment Name: At_50mM_NH4NO3_L-to-H_Sub_P Parameter: Tissue Value: Leaf
  misc_feature: MA Experiment 20001807 PARAMETER Experiment Name: At_50mM_NH4NO3_L-to-H_Sub_P Parameter: Treatment Value: 50mM NH4NO3 vs 100mM Mannitol
acttcttcacaactgtgtcctgtcctctgctgatttctcacctttccatcattcatttcattctttcttttttcccatccgtttcttttattcttctttctccttaaatttaaaatctttgtattaaatttattggatgttgttgtttctaagcgtttctttcaacaaacccattttcttcttcttcttaagattctgaatcattcattgtttgatttagcttctcttcgaattcttgattttacaggatctgaaggaagctatggtttaaattttttgatgggcaatctctaacagttctttacgggtatatatatacacaaaaaacggttaagctctagagaagatgttgggaggcaacaatgataaccctgtgccgcaggttctaatgaacgacagccagtttcggtatcaatcaaacacatcgttgaatcagcttcacttgcttgggacgatgagagctggttgtactattgatcctgtaaactactttgctaatgataaccttgctcctatgatgcggcttaatagcacacgcggaagggaaactgaaaacaacaatattatgcagagacagcagaagctgcagatctctttgaattataactacaacaacaataatactgttgttcaagatgaagtcccaaagcagaacttagtgtcaactggtctgagactatcttatgatgatgatgagcgcaactcttctgtaacttcagcaaatggaagcataacaactccagtctatcagtcactcggtgacaatatcagattggacctcaatagacagaacgacgagcttgatcagtttatcaaattccgggcagatcaaatggcgaaaggtgtgagagatattaaacagagacatgtcacgtcctttgtcacggccttagagaaggatgtgagtaagaagcttcaagagaaagaccatgagattgaaagcatgaacaagaagaaccgggaactcgtggataagataaaacaagtggcagtggaagctcagaactggcattacaaagcaaaatacaatgaatctgtggttaatgccttaaaggtaaatttgcaacaagtgatgtcacatggaaacgacaacaatgcagtaggaggaggagttgctgatcatcatcaaatgaaagaagggtttggggatagtgagattgatgacgaagcagcttcttacaattacttgaacatcccggggatgccaagtactgggatgagatgtaagttgtgtaacgtaaagaatgtttcggtcttgctcgtgccatgtaggcacttgagtttgtgtaaagattgtgatgtgtttactggtgtttgtcctgtttgccagtctttgaaaacttctagcgttcaggtcttcttcttctga

SEQ ID NO: 47815 - protein, 340 aa, Arabidopsis thaliana
  peptide (1)..(340): Ceres Seq. ID no. 13648720
  misc_feature (293)..(327): Pfam Name: Zinc finger, C3HC4 type (RING finger) Pfam Description: Zinc finger, C3HC4 type (RING finger)
  misc_feature (105)..(338): Homolog of NCBI NO: 34902144 NR Description: unknown protein [Oryza sativa (japonica
  misc_feature (90)..(338): Homolog of NCBI NO: 15220096 NR Description: conserved hypothetical protein [Arabidopsis
  misc_feature (65)..(338): Homolog of NCBI NO: 40807658 NR Description: S-RNase-binding protein [Solanum chacoense]
  misc_feature (65)..(338): Homolog of NCBI NO: 6760451 NR Description: S-ribonuclease binding protein SBP1 [Petunia x
  misc_feature (1)..(159): Homolog of NCBI NO: 6573749 NR Description: F20B24.9 [Arabidopsis thaliana]
  misc_feature (155)..(339): Homolog of NCBI NO: 6573749 NR Description: F20B24.9 [Arabidopsis thaliana]
  misc_feature (1)..(339): Homolog of NCBI NO: 15220181 NR Description: conserved hypothetical protein [Arabidopsis
  misc_feature (1)..(339): Homolog of NCBI NO: 21536706 NR Description: S-ribonuclease binding protein SBP1, putative
  misc_feature (13)..(340): Homolog of NCBI NO: 25404279 NR Description: hypothetical protein F8A5.13 [imported] -
  misc_feature (1)..(340): Homolog of NCBI NO: 15219772 NR Description: conserved hypothetical protein [Arabidopsis
MLGGNNDNPVPQVLMNDSQFRYQSNTSLNQLHLLGTMRAGCTIDPVNYFANDNLAPMMRLNSTRGRETENNNIMQRQQKLQISLNYNYNNNNTVVQDEVPKQNLVSTGLRLSYDDDERNSSVTSANGSITTPVYQSLGDNIRLDLNRQNDELDQFIKFRADQMAKGVRDIKQRHVTSFVTALEKDVSKKLQEKDHEIESMNKKNRELVDKIKQVAVEAQNWHYKAKYNESVVNALKVNLQQVMSHGNDNNAVGGGVADHHQMKEGFGDSEIDDEAASYNYLNIPGMPSTGMRCKLCNVKNVSVLLVPCRHLSLCKDCDVFTGVCPVCQSLKTSSVQVFFF

SEQ ID NO: 47816 - protein, 326 aa, Arabidopsis thaliana
  peptide (1)..(326): Ceres Seq. ID no. 13648721
  misc_feature (279)..(313): Pfam Name: Zinc finger, C3HC4 type (RING finger) Pfam Description: Zinc finger, C3HC4 type (RING finger)
  misc_feature (91)..(324): Homolog of NCBI NO: 34902144 NR Description: unknown protein [Oryza sativa (japonica
  misc_feature (76)..(324): Homolog of NCBI NO: 15220096 NR Description: conserved hypothetical protein [Arabidopsis
  misc_feature (51)..(324): Homolog of NCBI NO: 40807658 NR Description: S-RNase-binding protein [Solanum chacoense]
  misc_feature (51)..(324): Homolog of NCBI NO: 6760451 NR Description: S-ribonuclease binding protein SBP1 [Petunia x
  misc_feature (1)..(145): Homolog of NCBI NO: 6573749 NR Description: F20B24.9 [Arabidopsis thaliana]
  misc_feature (141)..(325): Homolog of NCBI NO: 6573749 NR Description: F20B24.9 [Arabidopsis thaliana]
  misc_feature (1)..(325): Homolog of NCBI NO: 15220181 NR Description: conserved hypothetical protein [Arabidopsis
  misc_feature (1)..(325): Homolog of NCBI NO: 21536706 NR Description: S-ribonuclease binding protein SBP1, putative
  misc_feature (1)..(326): Homolog of NCBI NO: 25404279 NR Description: hypothetical protein F8A5.13 [imported] -
  misc_feature (1)..(326): Homolog of NCBI NO: 15219772 NR Description: conserved hypothetical protein [Arabidopsis
MNDSQFRYQSNTSLNQLHLLGTMRAGCTIDPVNYFANDNLAPMMRLNSTRGRETENNNIMQRQQKLQISLNYNYNNNNTVVQDEVPKQNLVSTGLRLSYDDDERNSSVTSANGSITTPVYQSLGDNIRLDLNRQNDELDQFIKFRADQMAKGVRDIKQRHVTSFVTALEKDVSKKLQEKDHEIESMNKKNRELVDKIKQVAVEAQNWHYKAKYNESVVNALKVNLQQVMSHGNDNNAVGGGVADHHQMKEGFGDSEIDDEAASYNYLNIPGMPSTGMRCKLCNVKNVSVLLVPCRHLSLCKDCDVFTGVCPVCQSLKTSSVQVFFF

SEQ ID NO: 47817 - protein, 304 aa, Arabidopsis thaliana
  peptide (1)..(304): Ceres Seq. ID no. 13648722
  misc_feature (257)..(291): Pfam Name: Zinc finger, C3HC4 type (RING finger) Pfam Description: Zinc finger, C3HC4 type (RING finger)
  misc_feature (69)..(302): Homolog of NCBI NO: 34902144 NR Description: unknown protein [Oryza sativa (japonica
  misc_feature (54)..(302): Homolog of NCBI NO: 15220096 NR Description: conserved hypothetical protein [Arabidopsis
  misc_feature (29)..(302): Homolog of NCBI NO: 40807658 NR Description: S-RNase-binding protein [Solanum chacoense]
  misc_feature (29)..(302): Homolog of NCBI NO: 6760451 NR Description: S-ribonuclease binding protein SBP1 [Petunia x
  misc_feature (1)..(123): Homolog of NCBI NO: 6573749 NR Description: F20B24.9 [Arabidopsis thaliana]
  misc_feature (119)..(303): Homolog of NCBI NO: 6573749 NR Description: F20B24.9 [Arabidopsis thaliana]
  misc_feature (1)..(303): Homolog of NCBI NO: 15220181 NR Description: conserved hypothetical protein [Arabidopsis
  misc_feature (1)..(303): Homolog of NCBI NO: 21536706 NR Description: S-ribonuclease binding protein SBP1, putative
  misc_feature (1)..(304): Homolog of NCBI NO: 25404279 NR Description: hypothetical protein F8A5.13 [imported] -
  misc_feature (1)..(304): Homolog of NCBI NO: 15219772 NR Description: conserved hypothetical protein [Arabidopsis
MRAGCTIDPVNYFANDNLAPMMRLNSTRGRETENNNIMQRQQKLQISLNYNYNNNNTVVQDEVPKQNLVSTGLRLSYDDDERNSSVTSANGSITTPVYQSLGDNIRLDLNRQNDELDQFIKFRADQMAKGVRDIKQRHVTSFVTALEKDVSKKLQEKDHEIESMNKKNRELVDKIKQVAVEAQNWHYKAKYNESVVNALKVNLQQVMSHGNDNNAVGGGVADHHQMKEGFGDSEIDDEAASYNYLNIPGMPSTGMRCKLCNVKNVSVLLVPCRHLSLCKDCDVFTGVCPVCQSLKTSSVQVFFF

SEQ ID NO: 47818 - DNA, 1554 bp, Arabidopsis thaliana
  misc_feature (1)..(1554): Ceres Seq. ID no. 12733198
  misc_feature: MA Experiment ID: 20000179 Result: Up-regulated in Transcription
  misc_feature: MA Experiment 20000179 PARAMETER Experiment Name: At_Germinating_Seeds_P Parameter: Age (hr) Value: 6 vs. 0
  misc_feature: MA Experiment 20000179 PARAMETER Experiment Name: At_Germinating_Seeds_P Parameter: Tissue Value: Germinating Seeds
  misc_feature: MA Experiment ID: 20000180 Result: Up-regulated in Transcription
  misc_feature: MA Experiment 20000180 PARAMETER Experiment Name: At_Germinating_Seeds_P Parameter: Age (hr) Value: 24 vs. 0
  misc_feature: MA Experiment 20000180 PARAMETER Experiment Name: At_Germinating_Seeds_P Parameter: Tissue Value: Germinating Seeds
  misc_feature: MA Experiment ID: 20000264 Result: Up-regulated in Transcription
  misc_feature: MA Experiment 20000264 PARAMETER Experiment Name: At_Open_Flower_P Parameter: Age (day) Value: 21
  misc_feature: MA Experiment 20000264 PARAMETER Experiment Name: At_Open_Flower_P Parameter: Plant Line Value: WS
  misc_feature: MA Experiment 20000264 PARAMETER Experiment Name: At_Open_Flower_P Parameter: Tissue Value: Open Flower vs. Whole Plant
  misc_feature: MA Experiment ID: 20000286 Result: Up-regulated in Transcription
  misc_feature: MA Experiment 20000286 PARAMETER Experiment Name: At_Open_Flower_P Parameter: Age (day) Value: 21
  misc_feature: MA Experiment 20000286 PARAMETER Experiment Name: At_Open_Flower_P Parameter: Plant Line Value: WS
  misc_feature: MA Experiment 20000286 PARAMETER Experiment Name: At_Open_Flower_P Parameter: Tissue Value: Half Open vs. Whole Plant
  misc_feature: MA Experiment ID: 20000437 Result: Up-regulated in Transcription
  misc_feature: MA Experiment 20000437 PARAMETER Experiment Name: At_Drought_P Parameter: Age (day) Value: 8
  misc_feature: MA Experiment 20000437 PARAMETER Experiment Name: At_Drought_P Parameter: Organism Value: A. thaliana
  misc_feature: MA Experiment 20000437 PARAMETER Experiment Name: At_Drought_P Parameter: Plant Line Value: WS
  misc_feature: MA Experiment 20000437 PARAMETER Experiment Name: At_Drought_P Parameter: Timepoint (hr) Value: 24
  misc_feature: MA Experiment 20000437 PARAMETER Experiment Name: At_Drought_P Parameter: Tissue Value: Whole Plant
  misc_feature: MA Experiment 20000437 PARAMETER Experiment Name: At_Drought_P Parameter: Treatment Value: Drought vs. No Drought
  misc_feature: MA Experiment ID: 20000451 Result: Up-regulated in Transcription
  misc_feature: MA Experiment 20000451 PARAMETER Experiment Name: At_CS6879_Shoots-Roots_P Parameter: Age (day) Value: 14
  misc_feature: MA Experiment 20000451 PARAMETER Experiment Name: At_CS6879_Shoots-Roots_P Parameter: Organism Value: A. thaliana
  misc_feature: MA Experiment 20000451 PARAMETER Experiment Name: At_CS6879_Shoots-Roots_P Parameter: Plant Line Value: CS6879 vs. WS
  misc_feature: MA Experiment 20000451 PARAMETER Experiment Name: At_CS6879_Shoots-Roots_P Parameter: Tissue Value: Roots
  misc_feature: MA Experiment ID: 20000794 Result: Up-regulated in Transcription
  misc_feature: MA Experiment 20000794 PARAMETER Experiment Name: At_Petals_P Parameter: Age (day) Value: 23-25 days
  misc_feature: MA Experiment 20000794 PARAMETER Experiment Name: At_Petals_P Parameter: Plant Line Value: WS
  misc_feature: MA Experiment 20000794 PARAMETER Experiment Name: At_Petals_P Parameter: Tissue Value: Petals vs. Whole plant
  misc_feature: MA Experiment ID: 20001451 Result: Up-regulated in Transcription
  misc_feature: MA Experiment 20001451 PARAMETER Experiment Name: At_Far-red-induction_P Parameter: Age (day) Value: 7
  misc_feature: MA Experiment 20001451 PARAMETER Experiment Name: At_Far-red-induction_P Parameter: Light Value: Far-red vs. White
  misc_feature: MA Experiment 20001451 PARAMETER Experiment Name: At_Far-red-induction_P Parameter: Organism Value: A. thaliana
  misc_feature: MA Experiment 20001451 PARAMETER Experiment Name: At_Far-red-induction_P Parameter: Plant Line Value: Columbia
  misc_feature: MA Experiment 20001451 PARAMETER Experiment Name: At_Far-red-induction_P Parameter: Timepoint (hr) Value: 24
  misc_feature: MA Experiment 20001451 PARAMETER Experiment Name: At_Far-red-induction_P Parameter: Tissue Value: Whole Plant
  misc_feature: MA Experiment ID: 20001555 Result: Up-regulated in Transcription
  misc_feature: MA Experiment 20001555 PARAMETER Experiment Name: At_Drought_Soil_Dry_P Parameter: Age (day) Value: 24
  misc_feature: MA Experiment 20001555 PARAMETER Experiment Name: At_Drought_Soil_Dry_P Parameter: Organism Value: A. thaliana
  misc_feature: MA Experiment 20001555 PARAMETER Experiment Name: At_Drought_Soil_Dry_P Parameter: Plant Line Value: WS
  misc_feature: MA Experiment 20001555 PARAMETER Experiment Name: At_Drought_Soil_Dry_P Parameter: Post Timepoint (hr) Value: None
  misc_feature: MA Experiment 20001555 PARAMETER Experiment Name: At_Drought_Soil_Dry_P Parameter: Post-Treatment Value: None
  misc_feature: MA Experiment 20001555 PARAMETER Experiment Name: At_Drought_Soil_Dry_P Parameter: Timepoint (day) Value: 10
  misc_feature: MA Experiment 20001555 PARAMETER Experiment Name: At_Drought_Soil_Dry_P Parameter: Treatment Value: Drought vs. No Drought
  misc_feature: MA Experiment ID: 20001556 Result: Up-regulated in Transcription
  misc_feature: MA Experiment 20001556 PARAMETER Experiment Name: At_Drought_Soil_Dry_P Parameter: Age (day) Value: 26
  misc_feature: MA Experiment 20001556 PARAMETER Experiment Name: At_Drought_Soil_Dry_P Parameter: Organism Value: A. thaliana
  misc_feature: MA Experiment 20001556 PARAMETER Experiment Name: At_Drought_Soil_Dry_P Parameter: Plant Line Value: WS
  misc_feature: MA Experiment 20001556 PARAMETER Experiment Name: At_Drought_Soil_Dry_P Parameter: Post Timepoint (hr) Value: None
  misc_feature: MA Experiment 20001556 PARAMETER Experiment Name: At_Drought_Soil_Dry_P Parameter: Post-Treatment Value: None
  misc_feature: MA Experiment 20001556 PARAMETER Experiment Name: At_Drought_Soil_Dry_P Parameter: Timepoint (day) Value: 12
  misc_feature: MA Experiment 20001556 PARAMETER Experiment Name: At_Drought_Soil_Dry_P Parameter: Treatment Value: Drought vs. No Drought
  misc_feature: MA Experiment ID: 20001904 Result: Up-regulated in Transcription
  misc_feature: MA Experiment 20001904 PARAMETER Experiment Name: At_Drought_Reproduction_P Parameter: Age (day) Value: 37
  misc_feature: MA Experiment 20001904 PARAMETER Experiment Name: At_Drought_Reproduction_P Parameter: Organism Value: A. thaliana
  misc_feature: MA Experiment 20001904 PARAMETER Experiment Name: At_Drought_Reproduction_P Parameter: Plant Line Value: WS
  misc_feature: MA Experiment 20001904 PARAMETER Experiment Name: At_Drought_Reproduction_P Parameter: Timepoint (day) Value: 7
  misc_feature: MA Experiment 20001904 PARAMETER Experiment Name: At_Drought_Reproduction_P Parameter: Tissue Value: Rosettes
  misc_feature: MA Experiment 20001904 PARAMETER Experiment Name: At_Drought_Reproduction_P Parameter: Treatment Value: Drought vs. No Drought
atggagctcctgagcacgatcaatctcttagcaatagctctagtgcttcttgtagttccgaagatatatggagcttgtcggatccttgtttggcggccatggatgctatcgagaagattcaagaagcaaggaatctctggtccaaaatacaggatcttgtatgggaacctccgagagattaggaagatgaagaacgaagctaagcttatggttcttgatccaaactccaacgatatcgtccctcgcgtcttacctcatcttcagcaatggaagtctcaatatggagagacctttctttactggcaaggaacagatccaaggttgtgcatctcagatcatgagctcgcgaaacagatcttatcgaacaagtttgtttttttttctaaatcaaagacaaaacctgagatccttaaactttctggtaatggacttatcttcgtaaatggtcttgattgggttcgtcacagacgaatcttaaaccctgcattctctatggacaaactcaagctcatgacccaattgatggtggattgcacttttagaatgttccttgagtggaaaaaacagaggaatggtgtagaaacagagcaatttgtgttgattagcagagagtttaagagattgaccgctgatatcatagcgacggctgcgtttggaagcagttatgcggaaggaattgaagtatttaaatcacaattagagctccaaaagtgttgtgctgctgctcttactgacctctatttccctggaatccagtaccttcctacgccttcgaatcttcaaatatggaagcttgatatgaaagtgaatagctcgatcaaaagaatcatagatgcgaggttaacatcggaatccaaagattacggaaacgatcttctgggaatcatgttaacagctgcaagctctaacgagtctgagaaaaagatgagcattgatgagatcatagaagaatgcaagacgttcttcttcgcaggacacgaaactactgcgaatctattgacatggagtacaatgttgcttagcttgcaccaagattggcaagagaaactcagagaagaagttttcaatgaatgcggtaaagacaaaatcccagatgcagagacatgctccaaactaaaactgatgaacacggtgtttatggagtcccttcgtctatacggaccagtgttaaatctgctccgattagcatcagaagatatgaaattaggaaacctagagatccctaaaggcacgactataatcctcccgattgcgaagatgcacagagacaaagccgtttggggaagtgacgccgacaaattcaaccctatgcggtttgcaaacggtctttctcgggccgctaatcatccgaacgctctcctcgcgttttcaatgggaccaagagcttgcattggccaaaactttgcgataatggaagccaagaccgttctcgccatgattcttcaacggttccggctcaatctctccgccgattataaacatgcgccggcggatcacctcactcttcaacctcagtacgatctacctgtgatacttgaacctatcgacggttga

SEQ ID NO: 47819 - protein, 517 aa, Arabidopsis thaliana
  peptide (1)..(517): Ceres Seq. ID no. 12733199
  misc_feature (94)..(515): Homolog of NCBI NO: 13277362 NR Description: RIKEN cDNA 2310021J05; cytochrome P450, 4f16 [Mus
  misc_feature (7)..(516): Homolog of NCBI NO: 14719280 NR Description: cytochrome P450 [Zea mays]
  misc_feature (9)..(515): Homolog of NCBI NO: 22324446 NR Description: putative cytochrome P450 [Oryza sativa (japonica
  misc_feature (9)..(516): Homolog of NCBI NO: 38112707 NR Description: cytochrome P450 [Triticum aestivum]
  misc_feature (9)..(515): Homolog of NCBI NO: 34913354 NR Description: putative cytochrome P450 [Oryza sativa (japonica
  misc_feature (119)..(516): Homolog of NCBI NO: 30690559 NR Description: cytochrome P450 family [Arabidopsis thaliana]
  misc_feature (7)..(516): Homolog of NCBI NO: 7484896 NR Description: cytochrome P450 homolog F14M4.21 - Arabidopsis
  misc_feature (1)..(515): Homolog of NCBI NO: 15234248 NR Description: cytochrome P450 - like protein; protein id:
  misc_feature (7)..(516): Homolog of NCBI NO: 18407219 NR Description: cytochrome P450, putative
  misc_feature (1)..(517): Homolog of NCBI NO: 15226472 NR Description: cytochrome p450, putative; protein id:
MELLSTINLLAIALVLLVVPKIYGACRILVWRPWMLSRRFKKQGISGPKYRILYGNLREIRKMKNEAKLMVLDPNSNDIVPRVLPHLQQWKSQYGETFLYWQGTDPRLCISDHELAKQILSNKFVFFSKSKTKPEILKLSGNGLIFVNGLDWVRHRRILNPAFSMDKLKLMTQLMVDCTFRMFLEWKKQRNGVETEQFVLISREFKRLTADIIATAAFGSSYAEGIEVFKSQLELQKCCAAALTDLYFPGIQYLPTPSNLQIWKLDMKVNSSIKRIIDARLTSESKDYGNDLLGIMLTAASSNESEKKMSIDEIIEECKTFFFAGHETTANLLTWSTMLLSLHQDWQEKLREEVFNECGKDKIPDAETCSKLKLMNTVFMESLRLYGPVLNLLRLASEDMKLGNLEIPKGTTIILPIAKMHRDKAVWGSDADKFNPMRFANGLSRAANHPNALLAFSMGPRACIGQNFAIMEAKTVLAMILQRFRLNLSADYKHAPADHLTLQPQYDLPVILEPIDG

SEQ ID NO: 47820 - protein, 483 aa, Arabidopsis thaliana
  peptide (1)..(483): Ceres Seq. ID no. 12733200
  misc_feature (60)..(481): Homolog of NCBI NO: 13277362 NR Description: RIKEN cDNA 2310021J05; cytochrome P450, 4f16 [Mus
  misc_feature (1)..(482): Homolog of NCBI NO: 14719280 NR Description: cytochrome P450 [Zea mays]
  misc_feature (1)..(481): Homolog of NCBI NO: 22324446 NR Description: putative cytochrome P450 [Oryza sativa (japonica
  misc_feature (1)..(482): Homolog of NCBI NO: 38112707 NR Description: cytochrome P450 [Triticum aestivum]
  misc_feature (1)..(481): Homolog of NCBI NO: 34913354 NR Description: putative cytochrome P450 [Oryza sativa (japonica
  misc_feature (85)..(482): Homolog of NCBI NO: 30690559 NR Description: cytochrome P450 family [Arabidopsis thaliana]
  misc_feature (1)..(482): Homolog of NCBI NO: 7484896 NR Description: cytochrome P450 homolog F14M4.21 - Arabidopsis
  misc_feature (1)..(481): Homolog of NCBI NO: 15234248 NR Description: cytochrome P450 - like protein; protein id:
  misc_feature (1)..(482): Homolog of NCBI NO: 18407219 NR Description: cytochrome P450, putative
  misc_feature (1)..(483): Homolog of NCBI NO: 15226472 NR Description: cytochrome p450, putative; protein id:
MLSRRFKKQGISGPKYRILYGNLREIRKMKNEAKLMVLDPNSNDIVPRVLPHLQQWKSQYGETFLYWQGTDPRLCISDHELAKQILSNKFVFFSKSKTKPEILKLSGNGLIFVNGLDWVRHRRILNPAFSMDKLKLMTQLMVDCTFRMFLEWKKQRNGVETEQFVLISREFKRLTADIIATAAFGSSYAEGIEVFKSQLELQKCCAAALTDLYFPGIQYLPTPSNLQIWKLDMKVNSSIKRIIDARLTSESKDYGNDLLGIMLTAASSNESEKKMSIDEIIEECKTFFFAGHETTANLLTWSTMLLSLHQDWQEKLREEVFNECGKDKIPDAETCSKLKLMNTVFMESLRLYGPVLNLLRLASEDMKLGNLEIPKGTTIILPIAKMHRDKAVWGSDADKFNPMRFANGLSRAANHPNALLAFSMGPRACIGQNFAIMEAKTVLAMILQRFRLNLSADYKHAPADHLTLQPQYDLPVILEPIDG

SEQ ID NO: 47821 - protein, 455 aa, Arabidopsis thaliana
  peptide (1)..(455): Ceres Seq. ID no. 12733201
  misc_feature (32)..(453): Homolog of NCBI NO: 13277362 NR Description: RIKEN cDNA 2310021J05; cytochrome P450, 4f16 [Mus
  misc_feature (1)..(454): Homolog of NCBI NO: 14719280 NR Description: cytochrome P450 [Zea mays]
  misc_feature (1)..(453): Homolog of NCBI NO: 22324446 NR Description: putative cytochrome P450 [Oryza sativa (japonica
  misc_feature (1)..(454): Homolog of NCBI NO: 38112707 NR Description: cytochrome P450 [Triticum aestivum]
  misc_feature (1)..(453): Homolog of NCBI NO: 34913354 NR Description: putative cytochrome P450 [Oryza sativa (japonica
  misc_feature (57)..(454): Homolog of NCBI NO: 30690559 NR Description: cytochrome P450 family [Arabidopsis thaliana]
  misc_feature (1)..(454): Homolog of NCBI NO: 7484896 NR Description: cytochrome P450 homolog F14M4.21 - Arabidopsis
  misc_feature (1)..(453): Homolog of NCBI NO: 15234248 NR Description: cytochrome P450 - like protein; protein id:
  misc_feature (1)..(454): Homolog of NCBI NO: 18407219 NR Description: cytochrome P450, putative
  misc_feature (1)..(455): Homolog of NCBI NO: 15226472 NR Description: cytochrome p450, putative; protein id:
MKNEAKLMVLDPNSNDIVPRVLPHLQQWKSQYGETFLYWQGTDPRLCISDHELAKQILSNKFVFFSKSKTKPEILKLSGNGLIFVNGLDWVRHRRILNPAFSMDKLKLMTQLMVDCTFRMFLEWKKQRNGVETEQFVLISREFKRLTADIIATAAFGSSYAEGIEVFKSQLELQKCCAAALTDLYFPGIQYLPTPSNLQIWKLDMKVNSSIKRIIDARLTSESKDYGNDLLGIMLTAASSNESEKKMSIDEIIEECKTFFFAGHETTANLLTWSTMLLSLHQDWQEKLREEVFNECGKDKIPDAETCSKLKLMNTVFMESLRLYGPVLNLLRLASEDMKLGNLEIPKGTTIILPIAKMHRDKAVWGSDADKFNPMRFANGLSRAANHPNALLAFSMGPRACIGQNFAIMEAKTVLAMILQRFRLNLSADYKHAPADHLTLQPQYDLPVILEPIDG

SEQ ID NO: 47822 - DNA, 2124 bp, Arabidopsis thaliana
  misc_feature (1)..(2124): Ceres Seq. ID no. 13649412
  misc_feature: MA Experiment ID: 20000227 Result: Down-regulated in Transcription
  misc_feature: MA Experiment 20000227 PARAMETER Experiment Name: At_Root-Tips-vs-Tops_P Parameter: Tissue Value: Root Tips vs. Root Tops
gaattttgatttatcaaagaaaactcctttgtgagagattatttatgtactcttgattcagagaggataatccaattccgagttttctgagtcgtaatttagagagaatccaattcgatggatttagatatgaacggaggaaacaagagagtctttcaaagactgggcggtggctctaatcggccgacgacggactcaaatcagaaggtttgtttccactggcgagctggccggtgcaatcgttacccatgcccttacctgcatagagaattgccgggtccgggttcgggtccagtagcagcttcttcaaataaaagggtcgctgatgaatctgggtttgcgggtccgagtcaccggagagggcctgggttcagcgggactgctaataactggggaagatttggtgggaacagaacggtgaccaagacggagaaactttgcaaattctgggttgatggaaattgcccttatggtgataaatgtagatacttgcattgctggagcaaaggagatagtttctccttgttgacgcagcttgacgggcatcagaaggttgttactgggattgctctgccttcaggatcagataagctttacacggcgagtaaagatgaaactgtgcgaatatgggattgtgcttctggacagtgtacaggtgtactcaatcttggtggggaagttggctgcatcattagtgaaggtccctggctattggttggcatgccaaatcttgttaaggcgtggaatatccaaaacaatgcagacctgagcctcaatggacctgttggccaagtatattcattggttgtgggtactgatctattgttcgctggcacacaagatggctctattttggtttggagatacaatagcaccactagctgttttgatccagctgcatcactattgggtcacacgcttgcagttgtctctttatatgttggggcaaacagactctattctggtgccatggacaattctataaaagtttggagcctggataatctgcagtgtattcaaacgcttacagagcatacatcagttgttatgtctctcatttgctgggatcagtttcttctgtcatgttcattggacaataccgtcaagatatgggctgctactgaaggtggaaacttagaagtgacatatactcacaaagaagaatacggcgtgctagctctctgtggcgtccatgatgcagaagccaagccagtattgctatgttcgtgcaatgacaattcgttgcacctctatgatttgccatccatgtcagaccaagaggctcctctgcgtaatggagtagaacacaagattttcgaagtacttccgtttgtggatgatgattacggtggagtcatcgtggagatgaaaactcctatggatactaagaatttcgttgcagcgcttagagattcattcgagcagtggcgcttacagggtaaaaagggagtctggttgaacttgcctctctcacacgtaaacctcgtggaacccgcggttaaggaaggtttccggtatcaccatgctgagccaacttacctgatgctagtttattggattccggaagccgagagtactattcctttgaatgcttcccatcgtgttcgtgtaggtgctgttgtcttgaaccataacaaagaggaaaaatacggttcattatgcggatcaggtatctggaagatcccaacaggagttgttgacgagggtgaggagattttcgccgcagccattagagaagtaaaagaagaaacaggcgtaagaagatccatatatcttaatatcgacactgagtttttggagattctagctttctgccaaacccacgagtcattttttgcaaagtcagatttattcttcgtttgtctcttgagacctacctccttcgatattcaaaaacaggacttagagatcgaagcagctcaatggatgcggttcgaggactctgcctctcaacctatcacacacaagaacgatctcttcaaagatattcaccacatttgctcaatgaaaatggagaagagctatagtggtttttcaaaaaaacctattacaactttctttgacgacaagttaggttatctctacttgaataaacaagaagatatggaacaacctatttcttaa

SEQ ID NO: 47823 - protein, 668 aa, Arabidopsis thaliana
  peptide (1)..(668): Ceres Seq. ID no. 13649413
  misc_feature (494)..(630): Pfam Name: NUDIX domain Pfam Description: NUDIX domain
  misc_feature (134)..(433): Homolog of NCBI NO: 34906356 NR Description: unnamed protein product [Oryza sativa (japonica
  misc_feature (402)..(661): Homolog of NCBI NO: 18422823 NR Description: MutT/nudix family protein [Arabidopsis thaliana]
  misc_feature (83)..(387): Homolog of NCBI NO: 15239819 NR Description: zfwd protein, putative [Arabidopsis thaliana]
  misc_feature (82)..(387): Homolog of NCBI NO: 15237513 NR Description: zfwd3 protein [Arabidopsis thaliana]
  misc_feature (82)..(387): Homolog of NCBI NO: 12057168 NR Description: zfwd3 protein [Arabidopsis thaliana]
  misc_feature (384)..(584): Homolog of NCBI NO: 30686884 NR Description: MutT/nudix family protein [Arabidopsis thaliana]
  misc_feature (384)..(668): Homolog of NCBI NO: 38564312 NR Description: At4g25434 [Arabidopsis thaliana]
  misc_feature (1)..(384): Homolog of NCBI NO: 12057166 NR Description: zfwd2 protein [Arabidopsis thaliana]
  misc_feature (1)..(387): Homolog of NCBI NO: 15242242 NR Description: expressed protein [Arabidopsis thaliana]
  misc_feature (1)..(387): Homolog of NCBI NO: 30686888 NR Description: zfwd1 protein [Arabidopsis thaliana]
MDLDMNGGNKRVFQRLGGGSNRPTTDSNQKVCFHWRAGRCNRYPCPYLHRELPGPGSGPVAASSNKRVADESGFAGPSHRRGPGFSGTANNWGRFGGNRTVTKTEKLCKFWVDGNCPYGDKCRYLHCWSKGDSFSLLTQLDGHQKVVTGIALPSGSDKLYTASKDETVRIWDCASGQCTGVLNLGGEVGCIISEGPWLLVGMPNLVKAWNIQNNADLSLNGPVGQVYSLVVGTDLLFAGTQDGSILVWRYNSTTSCFDPAASLLGHTLAVVSLYVGANRLYSGAMDNSIKVWSLDNLQCIQTLTEHTSVVMSLICWDQFLLSCSLDNTVKIWAATEGGNLEVTYTHKEEYGVLALCGVHDAEAKPVLLCSCNDNSLHLYDLPSMSDQEAPLRNGVEHKIFEVLPFVDDDYGGVIVEMKTPMDTKNFVAALRDSFEQWRLQGKKGVWLNLPLSHVNLVEPAVKEGFRYHHAEPTYLMLVYWIPEAESTIPLNASHRVRVGAVVLNHNKEEKYGSLCGSGIWKIPTGVVDEGEEIFAAAIREVKEETGVRRSIYLNIDTEFLEILAFCQTHESFFAKSDLFFVCLLRPTSFDIQKQDLEIEAAQWMRFEDSASQPITHKNDLFKDIHHICSMKMEKSYSGFSKKPITTFFDDKLGYLYLNKQEDMEQPIS

SEQ ID NO: 47824 - protein, 664 aa, Arabidopsis thaliana
  peptide (1)..(664): Ceres Seq. ID no. 13649414
  misc_feature (490)..(626): Pfam Name: NUDIX domain Pfam Description: NUDIX domain
  misc_feature (130)..(429): Homolog of NCBI NO: 34906356 NR Description: unnamed protein product [Oryza sativa (japonica
  misc_feature (398)..(657): Homolog of NCBI NO: 18422823 NR Description: MutT/nudix family protein [Arabidopsis thaliana]
  misc_feature (79)..(383): Homolog of NCBI NO: 15239819 NR Description: zfwd protein, putative [Arabidopsis thaliana]
  misc_feature (78)..(383): Homolog of NCBI NO: 15237513 NR Description: zfwd3 protein [Arabidopsis thaliana]
  misc_feature (78)..(383): Homolog of NCBI NO: 12057168 NR Description: zfwd3 protein [Arabidopsis thaliana]
  misc_feature (380)..(580): Homolog of NCBI NO: 30686884 NR Description: MutT/nudix family protein [Arabidopsis thaliana]
  misc_feature (380)..(664): Homolog of NCBI NO: 38564312 NR Description: At4g25434 [Arabidopsis thaliana]
  misc_feature (1)..(380): Homolog of NCBI NO: 12057166 NR Description: zfwd2 protein [Arabidopsis thaliana]
  misc_feature (1)..(383): Homolog of NCBI NO: 15242242 NR Description: expressed protein [Arabidopsis thaliana]
  misc_feature (1)..(383): Homolog of NCBI NO: 30686888 NR Description: zfwd1 protein [Arabidopsis thaliana]
MNGGNKRVFQRLGGGSNRPTTDSNQKVCFHWRAGRCNRYPCPYLHRELPGPGSGPVAASSNKRVADESGFAGPSHRRGPGFSGTANNWGRFGGNRTVTKTEKLCKFWVDGNCPYGDKCRYLHCWSKGDSFSLLTQLDGHQKVVTGIALPSGSDKLYTASKDETVRIWDCASGQCTGVLNLGGEVGCIISEGPWLLVGMPNLVKAWNIQNNADLSLNGPVGQVYSLVVGTDLLFAGTQDGSILVWRYNSTTSCFDPAASLLGHTLAVVSLYVGANRLYSGAMDNSIKVWSLDNLQCIQTLTEHTSVVMSLICWDQFLLSCSLDNTVKIWAATEGGNLEVTYTHKEEYGVLALCGVHDAEAKPVLLCSCNDNSLHLYDLPSMSDQEAPLRNGVEHKIFEVLPFVDDDYGGVIVEMKTPMDTKNFVAALRDSFEQWRLQGKKGVWLNLPLSHVNLVEPAVKEGFRYHHAEPTYLMLVYWIPEAESTIPLNASHRVRVGAVVLNHNKEEKYGSLCGSGIWKIPTGVVDEGEEIFAAAIREVKEETGVRRSIYLNIDTEFLEILAFCQTHESFFAKSDLFFVCLLRPTSFDIQKQDLEIEAAQWMRFEDSASQPITHKNDLFKDIHHICSMKMEKSYSGFSKKPITTFFDDKLGYLYLNKQEDMEQPIS

SEQ ID NO: 47825 - protein, 467 aa, Arabidopsis thaliana
  peptide (1)..(467): Ceres Seq. ID no. 13649415
  misc_feature (293)..(429): Pfam Name: NUDIX domain Pfam Description: NUDIX domain
  misc_feature (1)..(232): Homolog of NCBI NO: 34906356 NR Description: unnamed protein product [Oryza sativa (japonica
  misc_feature (201)..(460): Homolog of NCBI NO: 18422823 NR Description: MutT/nudix family protein [Arabidopsis thaliana]
  misc_feature (1)..(186): Homolog of NCBI NO: 15239819 NR Description: zfwd protein, putative [Arabidopsis thaliana]
  misc_feature (1)..(186): Homolog of NCBI NO: 15237513 NR Description: zfwd3 protein [Arabidopsis thaliana]
  misc_feature (1)..(186): Homolog of NCBI NO: 12057168 NR Description: zfwd3 protein [Arabidopsis thaliana]
  misc_feature (183)..(383): Homolog of NCBI NO: 30686884 NR Description: MutT/nudix family protein [Arabidopsis thaliana]
  misc_feature (183)..(467): Homolog of NCBI NO: 38564312 NR Description: At4g25434 [Arabidopsis thaliana]
  misc_feature (1)..(183): Homolog of NCBI NO: 12057166 NR Description: zfwd2 protein [Arabidopsis thaliana]
  misc_feature (1)..(186): Homolog of NCBI NO: 15242242 NR Description: expressed protein [Arabidopsis thaliana]
  misc_feature (1)..(186): Homolog of NCBI NO: 30686888 NR Description: zfwd1 protein [Arabidopsis thaliana]
MPNLVKAWNIQNNADLSLNGPVGQVYSLVVGTDLLFAGTQDGSILVWRYNSTTSCFDPAASLLGHTLAVVSLYVGANRLYSGAMDNSIKVWSLDNLQCIQTLTEHTSVVMSLICWDQFLLSCSLDNTVKIWAATEGGNLEVTYTHKEEYGVLALCGVHDAEAKPVLLCSCNDNSLHLYDLPSMSDQEAPLRNGVEHKIFEVLPFVDDDYGGVIVEMKTPMDTKNFVAALRDSFEQWRLQGKKGVWLNLPLSHVNLVEPAVKEGFRYHHAEPTYLMLVYWIPEAESTIPLNASHRVRVGAVVLNHNKEEKYGSLCGSGIWKIPTGVVDEGEEIFAAAIREVKEETGVRRSIYLNIDTEFLEILAFCQTHESFFAKSDLFFVCLLRPTSFDIQKQDLEIEAAQWMRFEDSASQPITHKNDLFKDIHHICSMKMEKSYSGFSKKPITTFFDDKLGYLYLNKQEDMEQPIS

SEQ ID NO: 47826 - DNA, 2246 bp, Arabidopsis thaliana
  misc_feature (1)..(2246): Ceres Seq. ID no. 13648723
  misc_feature: MA Experiment ID: 20000173 Result: Down-regulated in Transcription
  misc_feature: MA Experiment 20000173 PARAMETER Experiment Name: At_42deg_Heat_P Parameter: Age (day) Value: 14
  misc_feature: MA Experiment 20000173 PARAMETER Experiment Name: At_42deg_Heat_P Parameter: Organism Value: A. thaliana
  misc_feature: MA Experiment 20000173 PARAMETER Experiment Name: At_42deg_Heat_P Parameter: Plant Line Value: WS
  misc_feature: MA Experiment 20000173 PARAMETER Experiment Name: At_42deg_Heat_P Parameter: Temperature (deg C) Value: 42 vs. 22
  misc_feature: MA Experiment 20000173 PARAMETER Experiment Name: At_42deg_Heat_P Parameter: Timepoint (hr) Value: 6
  misc_feature: MA Experiment 20000173 PARAMETER Experiment Name: At_42deg_Heat_P Parameter: Tissue Value: Aerial
  misc_feature: MA Experiment ID: 20000180 Result: Up-regulated in Transcription
  misc_feature: MA Experiment 20000180 PARAMETER Experiment Name: At_Germinating_Seeds_P Parameter: Age (hr) Value: 24 vs. 0
  misc_feature: MA Experiment 20000180 PARAMETER Experiment Name: At_Germinating_Seeds_P Parameter: Tissue Value: Germinating Seeds
  misc_feature: MA Experiment ID: 20000182 Result: Up-regulated in Transcription
  misc_feature: MA Experiment 20000182 PARAMETER Experiment Name: At_2mM_SA_P Parameter: Age (day) Value: 14
  misc_feature: MA Experiment 20000182 PARAMETER Experiment Name: At_2mM_SA_P Parameter: Organism Value: A. thaliana
  misc_feature: MA Experiment 20000182 PARAMETER Experiment Name: At_2mM_SA_P Parameter: Plant Line Value: WS
  misc_feature: MA Experiment 20000182 PARAMETER Experiment Name: At_2mM_SA_P Parameter: Timepoint (hr) Value: 6
  misc_feature: MA Experiment 20000182 PARAMETER Experiment Name: At_2mM_SA_P Parameter: Tissue Value: Aerial
  misc_feature: MA Experiment 20000182 PARAMETER Experiment Name: At_2mM_SA_P Parameter: Treatment Value: 2mM SA vs. No Treatment
  misc_feature: MA Experiment ID: 20001248 Result: Down-regulated in Transcription
  misc_feature: MA Experiment 20001248 PARAMETER Experiment Name: At_Far-red-induction_P Parameter: Age (day) Value: 7
  misc_feature: MA Experiment 20001248 PARAMETER Experiment Name: At_Far-red-induction_P Parameter: Light Value: Far-red vs. White
  misc_feature: MA Experiment 20001248 PARAMETER Experiment Name: At_Far-red-induction_P Parameter: Organism Value: A. thaliana
  misc_feature: MA Experiment 20001248 PARAMETER Experiment Name: At_Far-red-induction_P Parameter: Plant Line Value: Columbia
  misc_feature: MA Experiment 20001248 PARAMETER Experiment Name: At_Far-red-induction_P Parameter: Timepoint (hr) Value: 4
  misc_feature: MA Experiment 20001248 PARAMETER Experiment Name: At_Far-red-induction_P Parameter: Tissue Value: Whole Plant
agtagagaagaagaacatgttttcaactcctcgggagcaaaaaaaataattcagcaagagaaacggcgaataaggtggaaatgatttgacgaagaaacgcttggctgagagtaaaatcggaaaaacaaaatctgtaatttattattatcagcctctaaatcaatgggtggtggtggcaatctcgtcgacggtgttcgtcgttggcttttctttcaacgtcgtccttcttcttcttcttcttccaataatcacgatcagattcaaaatccccccaccgtttctaatcccaacgacgacgaagatttgaagaagcttaccgatccgtctaagctaagacagattaaggttcagcaacgaaatcacttacctatggagaagaagggaatacctaatgctgaattcttcacggagtatggagaagcaaatagatatcagattcaagaagtagttggcaaaggaagctatggagttgttggttctgctatagatactcacactggagaaagagttgctatcaaaaagattaacgatgtgtttgatcatatctctgatgcaaccaggattcttagggagattaagttgttacgcttgcttcttcatccagatgttgttgagattaaacatattatgcttcctccttctcgaagagagtttcgtgatgtttatgttgtctttgagttgatggaatctgatcttcatcaggttattaaagctaatgatgatttaactcctgagcatcatcagtttttcttgtatcagcttcttcgtggtttgaagtatgttcatgctgcgaatgtgtttcatcgggatttgaaaccaaagaacattcttgctaatgctgattgcaagttgaagatttgtgactttggtctagctcgtgtatcttttaatgatgcccctaccgctattttttggactgattatgttgctactcggtggtaccgtgcccctgaactctgtggatcatttttctcaaaatatacccctgcgattgatatttggagcgttggttgcatatttgctgaaatgctattagggaagccgctatttcctggcaaaaatgtggttcaccaattggatattatgaccgattttcttggcactccaccacctgaagccatatcaaagatcagaaatgataaggcgaggagatatcttggcaacatgaggaaaaaacagccagtcccattctctaaaaaattccctaaagcagatccttcggcccttcgcctgttggaacgcctgattgcctttgatccaaaagatcgtccatctgccgaagaagcattagctgatccatactttaatggtctgtcaagtaaagtgcgggaaccatcgacacagccgatttcaaagcttgaatttgagtttgagagaaagaaattgacaaaagatgatatcagagagttaatttaccgagaggtgatgagccttctatatatctcttctttggtttagattctcctctcttggtgattctaatggattacttaaaaaacatagatattagaatatcatcctcagatgctggaggaataccttcgtggtggcaatcagctcagcttcatgtaccccagtggggtagatcgatttaggaggcagtttgctcatcttgaagaaaatcaaggtccaggaggaagaagtaacgcacttcagagacagcatgcttccttaccaagagagcgagttccagcatccaagaatgaaacagtcgaagaaagaagcaacgatatcgagagaagaacaacagctgctgtagcttcaaccttagacagtcccaaagcttcacaacaagctgaaggtacagaaaatggaggaggaggagggtatagtgcgcgtaacctgatgaaaagctctagcattagtggttctaaatgcataggtgtacaatctaaaaccaacattgaggattccatagtagaggaacaagatgagactgttgctgtgaaagttgcatctctacacaattcttagtgtttttctttttctgtttaatttaagctataccccatagtagagttggagaagcaaaagtttggtttgtcactctcactcggggtttggggttttggttggtgtatttaatagttccggggagacattgtaaagaatatataaaacttggtaaccgatgtaattctttgcttttgtaaccgggtagatcattggttgaaactcgaaagtcgaaatcatgtaaaaatttggatatattcttgccagttttgttacttatattagttatattc

SEQ ID NO: 47827 - protein, 431 aa, Arabidopsis thaliana
  peptide (1)..(431): Ceres Seq. ID no. 15219572
  misc_feature (90)..(381): Pfam Name: Protein kinase domain Pfam Description: Protein kinase domain
  misc_feature (79)..(422): Homolog of NCBI NO: 5815410 NR Description: blast and wounding induced mitogen-activated
  misc_feature (1)..(422): Homolog of NCBI NO: 38174819 NR Description: putative MAP kinase [Hordeum vulgare subsp.
  misc_feature (72)..(422): Homolog of NCBI NO: 7106544 NR Description: ATMPK9 [Arabidopsis thaliana]
  misc_feature (72)..(422): Homolog of NCBI NO: 18401750 NR Description: mitogen-activated protein kinase (MAPK), putative
  misc_feature (53)..(422): Homolog of NCBI NO: 9294059 NR Description: MAP kinase [Arabidopsis thaliana]
  misc_feature (1)..(422): Homolog of NCBI NO: 7106542 NR Description: ATMPK8 [Arabidopsis thaliana]
  misc_feature (1)..(422): Homolog of NCBI NO: 8671782 NR Description: T10O22.12 [Arabidopsis thaliana]
  misc_feature (1)..(431): Homolog of NCBI NO: 18410420 NR Description: mitogen-activated protein kinase (MAPK), putative
  misc_feature (1)..(422): Homolog of NCBI NO: 15220976 NR Description: mitogen-activated protein kinase (MAPK), putative
  misc_feature (1)..(422): Homolog of NCBI NO: 25406284 NR Description: probable MAP kinase F25P22.9 [imported] -
MGGGGNLVDGVRRWLFFQRRPSSSSSSNNHDQIQNPPTVSNPNDDEDLKKLTDPSKLRQIKVQQRNHLPMEKKGIPNAEFFTEYGEANRYQIQEVVGKGSYGVVGSAIDTHTGERVAIKKINDVFDHISDATRILREIKLLRLLLHPDVVEIKHIMLPPSRREFRDVYVVFELMESDLHQVIKANDDLTPEHHQFFLYQLLRGLKYVHAANVFHRDLKPKNILANADCKLKICDFGLARVSFNDAPTAIFWTDYVATRWYRAPELCGSFFSKYTPAIDIWSVGCIFAEMLLGKPLFPGKNVVHQLDIMTDFLGTPPPEAISKIRNDKARRYLGNMRKKQPVPFSKKFPKADPSALRLLERLIAFDPKDRPSAEEALADPYFNGLSSKVREPSTQPISKLEFEFERKKLTKDDIRELIYREVMSLLYISSLV

SEQ ID NO: 47828 - protein, 362 aa, Arabidopsis thaliana
  peptide (1)..(362): Ceres Seq. ID no. 15219573
  misc_feature (21)..(312): Pfam Name: Protein kinase domain Pfam Description: Protein kinase domain
  misc_feature (10)..(353): Homolog of NCBI NO: 5815410 NR Description: blast and wounding induced mitogen-activated
  misc_feature (1)..(353): Homolog of NCBI NO: 38174819 NR Description: putative MAP kinase [Hordeum vulgare subsp.
  misc_feature (3)..(353): Homolog of NCBI NO: 7106544 NR Description: ATMPK9 [Arabidopsis thaliana]
  misc_feature (3)..(353): Homolog of NCBI NO: 18401750 NR Description: mitogen-activated protein kinase (MAPK), putative
  misc_feature (1)..(353): Homolog of NCBI NO: 9294059 NR Description: MAP kinase [Arabidopsis thaliana]
  misc_feature (1)..(353): Homolog of NCBI NO: 7106542 NR Description: ATMPK8 [Arabidopsis thaliana]
  misc_feature (1)..(353): Homolog of NCBI NO: 8671782 NR Description: T10O22.12 [Arabidopsis thaliana]
  misc_feature (1)..(362): Homolog of NCBI NO: 18410420 NR Description: mitogen-activated protein kinase (MAPK), putative
  misc_feature (1)..(353): Homolog of NCBI NO: 15220976 NR Description: mitogen-activated protein kinase (MAPK), putative
  misc_feature (1)..(353): Homolog of NCBI NO: 25406284 NR Description: probable MAP kinase F25P22.9 [imported] -
MEKKGIPNAEFFTEYGEANRYQIQEVVGKGSYGVVGSAIDTHTGERVAIKKINDVFDHISDATRILREIKLLRLLLHPDVVEIKHIMLPPSRREFRDVYVVFELMESDLHQVIKANDDLTPEHHQFFLYQLLRGLKYVHAANVFHRDLKPKNILANADCKLKICDFGLARVSFNDAPTAIFWTDYVATRWYRAPELCGSFFSKYTPAIDIWSVGCIFAEMLLGKPLFPGKNVVHQLDIMTDFLGTPPPEAISKIRNDKARRYLGNMRKKQPVPFSKKFPKADPSALRLLERLIAFDPKDRPSAEEALADPYFNGLSSKVREPSTQPISKLEFEFERKKLTKDDIRELIYREVMSLLYISSLV

SEQ ID NO: 47829 - protein, 276 aa, Arabidopsis thaliana
  peptide (1)..(276): Ceres Seq. ID no. 15219574
  misc_feature (1)..(226): Pfam Name: Protein kinase domain Pfam Description: Protein kinase domain
  misc_feature (1)..(267): Homolog of NCBI NO: 5815410 NR Description: blast and wounding induced mitogen-activated
  misc_feature (1)..(267): Homolog of NCBI NO: 38174819 NR Description: putative MAP kinase [Hordeum vulgare subsp.
  misc_feature (1)..(267): Homolog of NCBI NO: 7106544 NR Description: ATMPK9 [Arabidopsis thaliana]
  misc_feature (1)..(267): Homolog of NCBI NO: 18401750 NR Description: mitogen-activated protein kinase (MAPK), putative
  misc_feature (1)..(267): Homolog of NCBI NO: 9294059 NR Description: MAP kinase [Arabidopsis thaliana]
  misc_feature (1)..(267): Homolog of NCBI NO: 7106542 NR Description: ATMPK8 [Arabidopsis thaliana]
  misc_feature (1)..(267): Homolog of NCBI NO: 8671782 NR Description: T10O22.12 [Arabidopsis thaliana]
  misc_feature (1)..(276): Homolog of NCBI NO: 18410420 NR Description: mitogen-activated protein kinase (MAPK), putative
  misc_feature (1)..(267): Homolog of NCBI NO: 15220976 NR Description: mitogen-activated protein kinase (MAPK), putative
  misc_feature (1)..(267): Homolog of NCBI NO: 25406284 NR Description: probable MAP kinase F25P22.9 [imported] -
MLPPSRREFRDVYVVFELMESDLHQVIKANDDLTPEHHQFFLYQLLRGLKYVHAANVFHRDLKPKNILANADCKLKICDFGLARVSFNDAPTAIFWTDYVATRWYRAPELCGSFFSKYTPAIDIWSVGCIFAEMLLGKPLFPGKNVVHQLDIMTDFLGTPPPEAISKIRNDKARRYLGNMRKKQPVPFSKKFPKADPSALRLLERLIAFDPKDRPSAEEALADPYFNGLSSKVREPSTQPISKLEFEFERKKLTKDDIRELIYREVMSLLYISSLV

SEQ ID NO: 47830 - DNA, 1386 bp, Arabidopsis thaliana
  misc_feature (1)..(1386): Ceres Seq. ID no. 13648185
  misc_feature: MA Experiment ID: 20000171 Result: Down-regulated in Transcription
  misc_feature: MA Experiment 20000171 PARAMETER Experiment Name: At_42deg_Heat_P Parameter: Age (day) Value: 14
  misc_feature: MA Experiment 20000171 PARAMETER Experiment Name: At_42deg_Heat_P Parameter: Organism Value: A. thaliana
  misc_feature: MA Experiment 20000171 PARAMETER Experiment Name: At_42deg_Heat_P Parameter: Plant Line Value: WS
  misc_feature: MA Experiment 20000171 PARAMETER Experiment Name: At_42deg_Heat_P Parameter: Temperature (deg C) Value: 42 vs. 22
  misc_feature: MA Experiment 20000171 PARAMETER Experiment Name: At_42deg_Heat_P Parameter: Timepoint (hr) Value: 1
  misc_feature: MA Experiment 20000171 PARAMETER Experiment Name: At_42deg_Heat_P Parameter: Tissue Value: Aerial
  misc_feature: MA Experiment ID: 20000173 Result: Down-regulated in Transcription
  misc_feature: MA Experiment 20000173 PARAMETER Experiment Name: At_42deg_Heat_P Parameter: Age (day) Value: 14
  misc_feature: MA Experiment 20000173 PARAMETER Experiment Name: At_42deg_Heat_P Parameter: Organism Value: A. thaliana
  misc_feature: MA Experiment 20000173 PARAMETER Experiment Name: At_42deg_Heat_P Parameter: Plant Line Value: WS
  misc_feature: MA Experiment 20000173 PARAMETER Experiment Name: At_42deg_Heat_P Parameter: Temperature (deg C) Value: 42 vs. 22
  misc_feature: MA Experiment 20000173 PARAMETER Experiment Name: At_42deg_Heat_P Parameter: Timepoint (hr) Value: 6
  misc_feature: MA Experiment 20000173 PARAMETER Experiment Name: At_42deg_Heat_P Parameter: Tissue Value: Aerial
  misc_feature: MA Experiment ID: 20000185 Result: Down-regulated in Transcription
  misc_feature: MA Experiment 20000185 PARAMETER Experiment Name: At_Roots__P Parameter: Age (day) Value: 7 vs. 21
  misc_feature: MA Experiment 20000185 PARAMETER Experiment Name: At_Roots__P Parameter: Organism Value: A. thaliana
  misc_feature: MA Experiment 20000185 PARAMETER Experiment Name: At_Roots__P Parameter: Tissue Value: Roots vs. Whole Plant
  misc_feature: MA Experiment ID: 20000438 Result: Up-regulated in Transcription
  misc_feature: MA Experiment 20000438 PARAMETER Experiment Name: At_Shoots__P Parameter: Age (day) Value: 14
  misc_feature: MA Experiment 20000438 PARAMETER Experiment Name: At_Shoots__P Parameter: Tissue Value: Shoots vs. Whole Plant
  misc_feature: MA Experiment ID: 20000573 Result: Down-regulated in Transcription
  misc_feature: MA Experiment 20000573 PARAMETER Experiment Name: At_100uM_ABA_Mutants__P Parameter: Organism Value: A. thaliana
  misc_feature: MA Experiment 20000573 PARAMETER Experiment Name: At_100uM_ABA_Mutants__P Parameter: Plant Line Value: CS22 vs. Ler wt
  misc_feature: MA Experiment 20000573 PARAMETER Experiment Name: At_100uM_ABA_Mutants__P Parameter: Timepoint (hr) Value: N/A
  misc_feature: MA Experiment 20000573 PARAMETER Experiment Name: At_100uM_ABA_Mutants__P Parameter: Tissue Value: Whole Plant
  misc_feature: MA Experiment 20000573 PARAMETER Experiment Name: At_100uM_ABA_Mutants__P Parameter: Treatment Value: None
  misc_feature: MA Experiment ID: 20001558 Result: Up-regulated in Transcription
  misc_feature: MA Experiment 20001558 PARAMETER Experiment Name: At_Drought_Soil_Dry_P Parameter: Age (day) Value: 27
  misc_feature: MA Experiment 20001558 PARAMETER Experiment Name: At_Drought_Soil_Dry_P Parameter: Organism Value: A. thaliana
  misc_feature: MA Experiment 20001558 PARAMETER Experiment Name: At_Drought_Soil_Dry_P Parameter: Plant Line Value: WS
  misc_feature: MA Experiment 20001558 PARAMETER Experiment Name: At_Drought_Soil_Dry_P Parameter: Post Timepoint (hr) Value: 6
  misc_feature: MA Experiment 20001558 PARAMETER Experiment Name: At_Drought_Soil_Dry_P Parameter: Post-Treatment Value: Re-Water vs. No Drought
  misc_feature: MA Experiment 20001558 PARAMETER Experiment Name: At_Drought_Soil_Dry_P Parameter: Timepoint (day) Value: 13
  misc_feature: MA Experiment 20001558 PARAMETER Experiment Name: At_Drought_Soil_Dry_P Parameter: Treatment Value: Drought vs. No Drought
gagtttagaaagtgtcaacccctaaaggaatgtttttagtttagaggaaagagagagaagaagaagcagcagcagaagttgttaatttgaagactatttgaggaaagacacctatatctaaatactcaaagttacaaaaatattacttcagaaaacagttccattagagagactcataaagcttctcatctaattatgagtggattgatgagttttggtgaattagaagaccaatttggtcagatttcagacactactatggaagagaagataccatttctgcaaatgcttcaatgcatagaacacccttttacaacaacagaaccaaatcagtttctccaatcacttctccagatccaaaccctagaatcaaagagctgtctcacccttgaaacaaacatcaaaagagatccgggtcaaacagatgacccggaaaaggatccaagaacagaaaacggagcagtaacggtcaaagaaaaaagaaaacggaaacgtacaagagctccaaagaacaaagacgaagttgaaaaccaaaggatgactcacattgccgtcgaacgtaatcgaagacgacaaatgaacgaacacttaaactctctccgatctctcatgcctccttcgtttcttcaacggggtgaccaagcttcgattgtaggaggggcaatagatttcatcaaggaactagagcaactcttgcaatctctagaagctgagaaacgaaaggatggaactgatgaaactcctaaaacggcgtcgtgttcttcatcttcgtctcttgcatgcactaactcttctatttctagcgtgtctacgacgtcggaaaatggatttacggcgagattcggcggtggagatacgacagaagtggaggctacggtgatacagaaccatgtgagcttaaaagttcggtgtaagagaggaaaacgacagatcttaaaagctattgtctcgattgaagaactaaagcttgcgattctacatctcactatctcttcttcctttgactttgtcatctactctttcaatctcaagatggaagatggttgtaaattaggatcagcagatgagatagcgacagccgttcatcagatcttcgagcaaatcaacggtgaagtcatgtggtcaaatcttagtcgaacttagttgacttttgactcctagtaacgtgtgtaaactttaggttacaaagaaaagggacgtgatataaataagaaaaaccaaagaggtgaaattttgggagttttaattattatcttatactttttggattttagattagtagcaaactcgcagtgttctacgatgacattattattggtcacatgaaggtttaggttattattgcctgtaatttttgaatataaactaacctatgagttcagtttg

SEQ ID NO: 47831 - protein, 315 aa, Arabidopsis thaliana
  peptide (1)..(315): Ceres Seq. ID no. 13648186
  misc_feature (113)..(164): Pfam Name: Helix-loop-helix DNA-binding domain Pfam Description: Helix-loop-helix DNA-binding domain
  misc_feature (93)..(310): Homolog of NCBI NO: 21593808 NR Description: unknown [Arabidopsis thaliana]
  misc_feature (74)..(310): Homolog of NCBI NO: 15218391 NR Description: bHLH protein family [Arabidopsis thaliana]
  misc_feature (66)..(306): Homolog of NCBI NO: 37533680 NR Description: putative helix-loop-helix DNA-binding protein
  misc_feature (89)..(301): Homolog of NCBI NO: 15226442 NR Description: bHLH protein family [Arabidopsis thaliana]
  misc_feature (1)..(301): Homolog of NCBI NO: 11282339 NR Description: hypothetical protein F21F14.120 - Arabidopsis
  misc_feature (1)..(301): Homolog of NCBI NO: 21618009 NR Description: unknown [Arabidopsis thaliana]
  misc_feature (37)..(301): Homolog of NCBI NO: 30695519 NR Description: bHLH protein family [Arabidopsis thaliana]
  misc_feature (1)..(301): Homolog of NCBI NO: 18412203 NR Description: bHLH protein family [Arabidopsis thaliana]
  misc_feature (1)..(280): Homolog of NCBI NO: 7485383 NR Description: hypothetical protein F11O4.13 - Arabidopsis
  misc_feature (1)..(315): Homolog of NCBI NO: 15234187 NR Description: bHLH protein family [Arabidopsis thaliana]
MSGLMSFGELEDQFGQISDTTMEEKIPFLQMLQCIEHPFTTTEPNQFLQSLLQIQTLESKSCLTLETNIKRDPGQTDDPEKDPRTENGAVTVKEKRKRKRTRAPKNKDEVENQRMTHIAVERNRRRQMNEHLNSLRSLMPPSFLQRGDQASIVGGAIDFIKELEQLLQSLEAEKRKDGTDETPKTASCSSSSSLACTNSSISSVSTTSENGFTARFGGGDTTEVEATVIQNHVSLKVRCKRGKRQILKAIVSIEELKLAILHLTISSSFDFVIYSFNLKMEDGCKLGSADEIATAVHQIFEQINGEVMWSNLSRT

SEQ ID NO: 47832 - protein, 311 aa, Arabidopsis thaliana
  peptide (1)..(311): Ceres Seq. ID no. 13648187
  misc_feature (109)..(160): Pfam Name: Helix-loop-helix DNA-binding domain Pfam Description: Helix-loop-helix DNA-binding domain
  misc_feature (89)..(306): Homolog of NCBI NO: 21593808 NR Description: unknown [Arabidopsis thaliana]
  misc_feature (70)..(306): Homolog of NCBI NO: 15218391 NR Description: bHLH protein family [Arabidopsis thaliana]
  misc_feature (62)..(302): Homolog of NCBI NO: 37533680 NR Description: putative helix-loop-helix DNA-binding protein
  misc_feature (85)..(297): Homolog of NCBI NO: 15226442 NR Description: bHLH protein family [Arabidopsis thaliana]
  misc_feature (1)..(297): Homolog of NCBI NO: 11282339 NR Description: hypothetical protein F21F14.120 - Arabidopsis
  misc_feature (1)..(297): Homolog of NCBI NO: 21618009 NR Description: unknown [Arabidopsis thaliana]
  misc_feature (33)..(297): Homolog of NCBI NO: 30695519 NR Description: bHLH protein family [Arabidopsis thaliana]
  misc_feature (1)..(297): Homolog of NCBI NO: 18412203 NR Description: bHLH protein family [Arabidopsis thaliana]
  misc_feature (1)..(276): Homolog of NCBI NO: 7485383 NR Description: hypothetical protein F11O4.13 - Arabidopsis
  misc_feature (1)..(311): Homolog of NCBI NO: 15234187 NR Description: bHLH protein family [Arabidopsis thaliana]
MSFGELEDQFGQISDTTMEEKIPFLQMLQCIEHPFTTTEPNQFLQSLLQIQTLESKSCLTLETNIKRDPGQTDDPEKDPRTENGAVTVKEKRKRKRTRAPKNKDEVENQRMTHIAVERNRRRQMNEHLNSLRSLMPPSFLQRGDQASIVGGAIDFIKELEQLLQSLEAEKRKDGTDETPKTASCSSSSSLACTNSSISSVSTTSENGFTARFGGGDTTEVEATVIQNHVSLKVRCKRGKRQILKAIVSIEELKLAILHLTISSSFDFVIYSFNLKMEDGCKLGSADEIATAVHQIFEQINGEVMWSNLSRT

SEQ ID NO: 47833 - protein, 294 aa, Arabidopsis thaliana
  peptide (1)..(294): Ceres Seq. ID no. 13648188
  misc_feature (92)..(143): Pfam Name: Helix-loop-helix DNA-binding domain Pfam Description: Helix-loop-helix DNA-binding domain
  misc_feature (72)..(289): Homolog of NCBI NO: 21593808 NR Description: unknown [Arabidopsis thaliana]
  misc_feature (53)..(289): Homolog of NCBI NO: 15218391 NR Description: bHLH protein family [Arabidopsis thaliana]
  misc_feature (45)..(285): Homolog of NCBI NO: 37533680 NR Description: putative helix-loop-helix DNA-binding protein
  misc_feature (68)..(280): Homolog of NCBI NO: 15226442 NR Description: bHLH protein family [Arabidopsis thaliana]
  misc_feature (1)..(280): Homolog of NCBI NO: 11282339 NR Description: hypothetical protein F21F14.120 - Arabidopsis
  misc_feature (1)..(280): Homolog of NCBI NO: 21618009 NR Description: unknown [Arabidopsis thaliana]
  misc_feature (16)..(280): Homolog of NCBI NO: 30695519 NR Description: bHLH protein family [Arabidopsis thaliana]
  misc_feature (1)..(280): Homolog of NCBI NO: 18412203 NR Description: bHLH protein family [Arabidopsis thaliana]
  misc_feature (1)..(259): Homolog of NCBI NO: 7485383 NR Description: hypothetical protein F11O4.13 - Arabidopsis
  misc_feature (1)..(294): Homolog of NCBI NO: 15234187 NR Description: bHLH protein family [Arabidopsis thaliana]
MEEKIPFLQMLQCIEHPFTTTEPNQFLQSLLQIQTLESKSCLTLETNIKRDPGQTDDPEKDPRTENGAVTVKEKRKRKRTRAPKNKDEVENQRMTHIAVERNRRRQMNEHLNSLRSLMPPSFLQRGDQASIVGGAIDFIKELEQLLQSLEAEKRKDGTDETPKTASCSSSSSLACTNSSISSVSTTSENGFTARFGGGDTTEVEATVIQNHVSLKVRCKRGKRQILKAIVSIEELKLAILHLTISSSFDFVIYSFNLKMEDGCKLGSADEIATAVHQIFEQINGEVMWSNLSRT

SEQ ID NO: 47834 - DNA, 501 bp, Arabidopsis thaliana
  misc_feature (1)..(501): Ceres Seq. ID no. 13649174
  misc_feature: MA Experiment ID: 20000185 Result: Down-regulated in Transcription
  misc_feature: MA Experiment 20000185 PARAMETER Experiment Name: At_Roots__P Parameter: Age (day) Value: 7 vs. 21
  misc_feature: MA Experiment 20000185 PARAMETER Experiment Name: At_Roots__P Parameter: Organism Value: A. thaliana
  misc_feature: MA Experiment 20000185 PARAMETER Experiment Name: At_Roots__P Parameter: Tissue Value: Roots vs. Whole Plant
  misc_feature: MA Experiment ID: 20000438 Result: Up-regulated in Transcription
  misc_feature: MA Experiment 20000438 PARAMETER Experiment Name: At_Shoots__P Parameter: Age (day) Value: 14
  misc_feature: MA Experiment 20000438 PARAMETER Experiment Name: At_Shoots__P Parameter: Tissue Value: Shoots vs. Whole Plant
  misc_feature: MA Experiment ID: 20000439 Result: Down-regulated in Transcription
  misc_feature: MA Experiment 20000439 PARAMETER Experiment Name: At_Roots__P Parameter: Age (day) Value: 14 vs. 21
  misc_feature: MA Experiment 20000439 PARAMETER Experiment Name: At_Roots__P Parameter: Organism Value: A. thaliana
  misc_feature: MA Experiment 20000439 PARAMETER Experiment Name: At_Roots__P Parameter: Tissue Value: Roots vs. Whole Plant
  misc_feature: MA Experiment ID: 20001248 Result: Down-regulated in Transcription
  misc_feature: MA Experiment 20001248 PARAMETER Experiment Name: At_Far-red-induction_P Parameter: Age (day) Value: 7
  misc_feature: MA Experiment 20001248 PARAMETER Experiment Name: At_Far-red-induction_P Parameter: Light Value: Far-red vs. White
  misc_feature: MA Experiment 20001248 PARAMETER Experiment Name: At_Far-red-induction_P Parameter: Organism Value: A. thaliana
  misc_feature: MA Experiment 20001248 PARAMETER Experiment Name: At_Far-red-induction_P Parameter: Plant Line Value: Columbia
  misc_feature: MA Experiment 20001248 PARAMETER Experiment Name: At_Far-red-induction_P Parameter: Timepoint (hr) Value: 4
  misc_feature: MA Experiment 20001248 PARAMETER Experiment Name: At_Far-red-induction_P Parameter: Tissue Value: Whole Plant
  misc_feature: MA Experiment ID: 20001557 Result: Down-regulated in Transcription
  misc_feature: MA Experiment 20001557 PARAMETER Experiment Name: At_Drought_Soil_Dry_P Parameter: Age (day) Value: 27
  misc_feature: MA Experiment 20001557 PARAMETER Experiment Name: At_Drought_Soil_Dry_P Parameter: Organism Value: A. thaliana
  misc_feature: MA Experiment 20001557 PARAMETER Experiment Name: At_Drought_Soil_Dry_P Parameter: Plant Line Value: WS
  misc_feature: MA Experiment 20001557 PARAMETER Experiment Name: At_Drought_Soil_Dry_P Parameter: Post Timepoint (hr) Value: 3
  misc_feature: MA Experiment 20001557 PARAMETER Experiment Name: At_Drought_Soil_Dry_P Parameter: Post-Treatment Value: Re-Water vs. No Drought
  misc_feature: MA Experiment 20001557 PARAMETER Experiment Name: At_Drought_Soil_Dry_P Parameter: Timepoint (day) Value: 13
  misc_feature: MA Experiment 20001557 PARAMETER Experiment Name: At_Drought_Soil_Dry_P Parameter: Treatment Value: Drought vs. No Drought
gggctcattctctcatctctgtttcatatctaaattattgattgagaattcgacttgtggaaatgacaacagttgcatcaaatctcgcttgtatcggaaaagtaggatggaggttgcagataaattgcagaaagaaagagaaaggaagagatcagagtcattatccttacaaagtcattgaaatcactcctcctcctaaatctctcggcattcgttgccttcctcataaccttcaatgtggagagaacgtgatgatcgaagggcaaacgtacacaatctctgctgtgactcaccggtatcagctccggaaaggcaaatacgagccgagtgagaggcggctcgatgttctctctgctgctagatacgttttaaacctttacttcgacaatttgctccaaaactcctgacaacttttatttagctaaaaagtttggtctagaggattttcattgtatccatgaatgcttgtgaatttgttaagcaatgatttgtacttctctt

SEQ ID NO: 47835 - protein, 114 aa, Arabidopsis thaliana
  peptide (1)..(114): Ceres Seq. ID no. 13649175
  misc_feature (17)..(114): Homolog of NCBI NO: 32488468 NR Description: OSJNBa0081L15.1 [Oryza sativa (japonica
  misc_feature (1)..(114): Homolog of NCBI NO: 22327475 NR Description: expressed protein [Arabidopsis thaliana]
MTTVASNLACIGKVGWRLQINCRKKEKGRDQSHYPYKVIEITPPPKSLGIRCLPHNLQCGENVMIEGQTYTISAVTHRYQLRKGKYEPSERRLDVLSAARYVLNLYFDNLLQNS

SEQ ID NO: 47836 - protein, 59 aa, Arabidopsis thaliana
  peptide (1)..(59): Ceres Seq. ID no. 13649176
GSFSHLCFISKLLIENSTCGNDNSCIKSRLYRKSRMEVADKLQKERERKRSESLSLQSH

SEQ ID NO: 47837 - DNA, 1688 bp, Arabidopsis thaliana
  misc_feature (1)..(1688): Ceres Seq. ID no. 13649428
  misc_feature: MA Experiment ID: 20000180 Result: Up-regulated in Transcription
  misc_feature: MA Experiment 20000180 PARAMETER Experiment Name: At_Germinating_Seeds_P Parameter: Age (hr) Value: 24 vs. 0
  misc_feature: MA Experiment 20000180 PARAMETER Experiment Name: At_Germinating_Seeds_P Parameter: Tissue Value: Germinating Seeds
  misc_feature: MA Experiment ID: 20001247 Result: Down-regulated in Transcription
  misc_feature: MA Experiment 20001247 PARAMETER Experiment Name: At_Far-red-induction_P Parameter: Age (day) Value: 7
  misc_feature: MA Experiment 20001247 PARAMETER Experiment Name: At_Far-red-induction_P Parameter: Light Value: Far-red vs. White
  misc_feature: MA Experiment 20001247 PARAMETER Experiment Name: At_Far-red-induction_P Parameter: Organism Value: A. thaliana
  misc_feature: MA Experiment 20001247 PARAMETER Experiment Name: At_Far-red-induction_P Parameter: Plant Line Value: Columbia
  misc_feature: MA Experiment 20001247 PARAMETER Experiment Name: At_Far-red-induction_P Parameter: Timepoint (hr) Value: 1
  misc_feature: MA Experiment 20001247 PARAMETER Experiment Name: At_Far-red-induction_P Parameter: Tissue Value: Whole Plant
  misc_feature: MA Experiment ID: 20001451 Result: Down-regulated in Transcription
  misc_feature: MA Experiment 20001451 PARAMETER Experiment Name: At_Far-red-induction_P Parameter: Age (day) Value: 7
  misc_feature: MA Experiment 20001451 PARAMETER Experiment Name: At_Far-red-induction_P Parameter: Light Value: Far-red vs. White
  misc_feature: MA Experiment 20001451 PARAMETER Experiment Name: At_Far-red-induction_P Parameter: Organism Value: A. thaliana
  misc_feature: MA Experiment 20001451 PARAMETER Experiment Name: At_Far-red-induction_P Parameter: Plant Line Value: Columbia
  misc_feature: MA Experiment 20001451 PARAMETER Experiment Name: At_Far-red-induction_P Parameter: Timepoint (hr) Value: 24
  misc_feature: MA Experiment 20001451 PARAMETER Experiment Name: At_Far-red-induction_P Parameter: Tissue Value: Whole Plant
  misc_feature: MA Experiment ID: 20001911 Result: Down-regulated in Transcription
  misc_feature: MA Experiment 20001911 PARAMETER Experiment Name: At_Drought_Reproduction_P Parameter: Age (day) Value: 40
  misc_feature: MA Experiment 20001911 PARAMETER Experiment Name: At_Drought_Reproduction_P Parameter: Organism Value: A. thaliana
  misc_feature: MA Experiment 20001911 PARAMETER Experiment Name: At_Drought_Reproduction_P Parameter: Plant Line Value: WS
  misc_feature: MA Experiment 20001911 PARAMETER Experiment Name: At_Drought_Reproduction_P Parameter: Timepoint (day) Value: 10
  misc_feature: MA Experiment 20001911 PARAMETER Experiment Name: At_Drought_Reproduction_P Parameter: Tissue Value: Flowers
  misc_feature: MA Experiment 20001911 PARAMETER Experiment Name: At_Drought_Reproduction_P Parameter: Treatment Value: Drought vs. No Drought
tcggtaataaaaatctaaacgtcacgcgcgtgatgaaaaaacaggaagtaaatcgtcgacgtcgttattcaactaccatttctggatcacaactcccatacactcttttaaatcaaaacaaaatatctctttcctgttagagacaatggacggattgatcagaggtttggtcgactcgacgtggctatcggaggaaaccaacgccgcggcggagacgatggtggtgatgatgaaggcaactcgagggacgagagatccagatctacttgggctaatgtggtttccggtgaggaggaggatcagaatcgcgcgggaggatcgtcgcacggccgtcgccagaattcagaggagaatcaatgggagaagaagggcgaaaggcttcccacaagacattcacaatcacatgaggaggaccaggaagagaatacatatgcggctaaagtgagcgagaaacaagacttctcggagagccagcaagaggaaaatgatggttgggaaactgtgggcaaaaagaaacctgcaaggcaatcacataaggtccagaaggagcaatggcaagattacaaacgcccagcaagtgaacaacactactcagacgaagttgaaacttatggaaacctagaaccctcacaactagagctctcaggtctctcagaagcttgcaacaaactgtgggagctcgatttaaaccgccttgttcctggaagggattatcaaatcgactgcggagatgggaaaagggtccatgagagagctgatatggctgaaggactactgttctcttgggtgagcgaggaagtctctagaaaaccgactttcgccagattctgttcattgcttgacaactacaaccccaacgaaggttacaaagaagtggtcacagaagaagagaggcaagagcaagcggctttcattgaagaaattagcagaacctctgtgatcaagtaccttcacaggtaccttgtgctcaaggacgtcgctcctggaagctacttagagttcaagagaatgttgacaagtctctggttcgatctgtatggccgcggaggtacatctggctcatcttctgcgtttgagcatgtctttgtaggtgagatcaaacaatctggtgggaacaagtctctggattccataactggcttcagttttacttggaggaagccaaaggaactgtagattatcaaggctatatatttccccgacgtcgcggtgaaattcctgattcagagactcagctgctaacaatccaattcgagtggaacggtgttctaaaatcagtctcaagtactctagttggagtaagtccagagttcgagttggctctatacaccatgtgtttcttcatgggcacagaagataaccacattcagttgggtccatacaatgtcaatgtcaaatgttaccgacttggcaacaaccgtatcgcgctcagctttccccattgcagaatcttgaaacctctcttgatggctctggtcacaaaatatctgccccttgcgcagtactgtattgaattattgtgattgtcagatctttctgtctacatgtgtagactagaaatatcttcatgtgatatttatgggaaaccatgtcttgtcctttctgaaaatgatacaacataagaagagatgtaagagaaaatatcttctaataatttttatttcaaagagatatttaatttgttttgg

SEQ ID NO: 47838 - protein, 138 aa, Arabidopsis thaliana
  peptide (1)..(138): Ceres Seq. ID no. 13649429
  misc_feature (1)..(121): Homolog of NCBI NO: 6561907 NR Description: pancreatic protein with two somatomedin B domains
  misc_feature (1)..(115): Homolog of NCBI NO: 6679429 NR Description: placental protein 11 related [Mus musculus]
  misc_feature (1)..(115): Homolog of NCBI NO: 5174623 NR Description: placental protein 11 precursor; 22 serine
  misc_feature (1)..(115): Homolog of NCBI NO: 22797893 NR Description: endoU protein [Xenopus laevis]
  misc_feature (1)..(128): Homolog of NCBI NO: 30683929 NR Description: serine protease protein -related [Arabidopsis
  misc_feature (1)..(128): Homolog of NCBI NO: 7488185 NR Description: probable serine proteinase - Arabidopsis thaliana
  misc_feature (1)..(132): Homolog of NCBI NO: 29367523 NR Description: putative serine protease-like protein
  misc_feature (1)..(132): Homolog of NCBI NO: 38345945 NR Description: OSJNBb0103I08.16 [Oryza sativa (japonica
  misc_feature (1)..(129): Homolog of NCBI NO: 25407557 NR Description: probable serine proteinase-like protein
  misc_feature (1)..(132): Homolog of NCBI NO: 20260612 NR Description: putative serine protease-like protein
MAEGLLFSWVSEEVSRKPTFARFCSLLDNYNPNEGYKEVVTEEERQEQAAFIEEISRTSVIKYLHRYLVLKDVAPGSYLEFKRMLTSLWFDLYGRGGTSGSSSAFEHVFVGEIKQSGGNKSLDSITGFSFTWRKPKEL

SEQ ID NO: 47839 - protein, 99 aa, Arabidopsis thaliana
  peptide (1)..(99): Ceres Seq. ID no. 13649430
  misc_feature (25)..(45): Homolog of NCBI NO: 30683929 NR Description: serine protease protein -related [Arabidopsis
  misc_feature (25)..(46): Homolog of NCBI NO: 7488185 NR Description: probable serine proteinase - Arabidopsis thaliana
  misc_feature (25)..(45): Homolog of NCBI NO: 25407557 NR Description: probable serine proteinase-like protein
MDGLIRGLVDSTWLSEETNAAAETMVVMMKATRGTRDPDLLGLMWFPVRRRIRIAREDRRTAVARIQRRINGRRRAKGFPQDIHNHMRRTRKRIHMRLK

SEQ ID NO: 47840 - protein, 75 aa, Arabidopsis thaliana
  peptide (1)..(75): Ceres Seq. ID no. 13649431
  misc_feature (1)..(21): Homolog of NCBI NO: 30683929 NR Description: serine protease protein -related [Arabidopsis
  misc_feature (1)..(22): Homolog of NCBI NO: 7488185 NR Description: probable serine proteinase - Arabidopsis thaliana
  misc_feature (1)..(21): Homolog of NCBI NO: 25407557 NR Description: probable serine proteinase-like protein
MVVMMKATRGTRDPDLLGLMWFPVRRRIRIAREDRRTAVARIQRRINGRRRAKGFPQDIHNHMRRTRKRIHMRLK

SEQ ID NO: 47841 - DNA, 1724 bp, Arabidopsis thaliana
  misc_feature (1)..(1724): Ceres Seq. ID no. 13649440
  misc_feature: MA Experiment ID: 108435 Result: Down-regulated in Transcription
  misc_feature: MA Experiment 108435 PARAMETER Experiment Name: At_stm_Mutants_cDNA_P Parameter: Plant Line Value: wt Landsburg vs stm
  misc_feature: MA Experiment 108435 PARAMETER Experiment Name: At_stm_Mutants_cDNA_P Parameter: Tissue Value: Shoot Apical Meristem Region
  misc_feature: MA Experiment ID: 108461 Result: Up-regulated in Transcription
  misc_feature: MA Experiment 108461 PARAMETER Experiment Name: At_Germinating_Seeds_cDNA_P Parameter: Age (day) Value: 1 vs. 0
  misc_feature: MA Experiment 108461 PARAMETER Experiment Name: At_Germinating_Seeds_cDNA_P Parameter: Tissue Value: Germinating Seeds
  misc_feature: MA Experiment ID: 108462 Result: Up-regulated in Transcription
  misc_feature: MA Experiment 108462 PARAMETER Experiment Name: At_Germinating_Seeds_cDNA_P Parameter: Age (day) Value: 2 vs. 0
  misc_feature: MA Experiment 108462 PARAMETER Experiment Name: At_Germinating_Seeds_cDNA_P Parameter: Tissue Value: Germinating Seeds
  misc_feature: MA Experiment ID: 108463 Result: Up-regulated in Transcription
  misc_feature: MA Experiment 108463 PARAMETER Experiment Name: At_Germinating_Seeds_cDNA_P Parameter: Age (day) Value: 3 vs. 0
  misc_feature: MA Experiment 108463 PARAMETER Experiment Name: At_Germinating_Seeds_cDNA_P Parameter: Tissue Value: Germinating Seeds
  misc_feature: MA Experiment ID: 108464 Result: Up-regulated in Transcription
  misc_feature: MA Experiment 108464 PARAMETER Experiment Name: At_Germinating_Seeds_cDNA_P Parameter: Age (day) Value: 4 vs. 0
  misc_feature: MA Experiment 108464 PARAMETER Experiment Name: At_Germinating_Seeds_cDNA_P Parameter: Tissue Value: Germinating Seeds
  misc_feature: MA Experiment ID: 108579 Result: Up-regulated in Transcription
  misc_feature: MA Experiment 108579 PARAMETER Experiment Name: At_4deg_Cold_cDNA_P Parameter: Temperature (deg C) Value: 4 vs. 22
  misc_feature: MA Experiment 108579 PARAMETER Experiment Name: At_4deg_Cold_cDNA_P Parameter: Timepoint (hr) Value: 6
  misc_feature: MA Experiment 108579 PARAMETER Experiment Name: At_4deg_Cold_cDNA_P Parameter: Tissue Value: Aerial
  misc_feature: MA Experiment ID: 108585 Result: Down-regulated in Transcription
  misc_feature: MA Experiment 108585 PARAMETER Experiment Name: At_5mM_NaNP_cDNA_P Parameter: Timepoint (hr) Value: 6
  misc_feature: MA Experiment 108585 PARAMETER Experiment Name: At_5mM_NaNP_cDNA_P Parameter: Tissue Value: Aerial
  misc_feature: MA Experiment 108585 PARAMETER Experiment Name: At_5mM_NaNP_cDNA_P Parameter: Treatment Value: null
  misc_feature: MA Experiment ID: 108595 Result: Down-regulated in Transcription
  misc_feature: MA Experiment 108595 PARAMETER Experiment Name: At_Ler-pi_Ovule_cDNA_P Parameter: Plant Line Value: null
  misc_feature: MA Experiment ID: 20000069 Result: Down-regulated in Transcription
  misc_feature: MA Experiment 20000069 PARAMETER Experiment Name: At_100uM_ABA_Mutants_cDNA_P Parameter: Plant Line Value: CS23
  misc_feature: MA Experiment 20000069 PARAMETER Experiment Name: At_100uM_ABA_Mutants_cDNA_P Parameter: Timepoint (hr) Value: 6
  misc_feature: MA Experiment 20000069 PARAMETER Experiment Name: At_100uM_ABA_Mutants_cDNA_P Parameter: Tissue Value: Aerial
  misc_feature: MA Experiment 20000069 PARAMETER Experiment Name: At_100uM_ABA_Mutants_cDNA_P Parameter: Treatment Value: 100uM ABA vs. No Treatment
  misc_feature: MA Experiment ID: 20000070 Result: Down-regulated in Transcription
  misc_feature: MA Experiment 20000070 PARAMETER Experiment Name: At_100uM_ABA_Mutants_cDNA_P Parameter: Plant Line Value: CS24
  misc_feature: MA Experiment 20000070 PARAMETER Experiment Name: At_100uM_ABA_Mutants_cDNA_P Parameter: Timepoint (hr) Value: 6
  misc_feature: MA Experiment 20000070 PARAMETER Experiment Name: At_100uM_ABA_Mutants_cDNA_P Parameter: Tissue Value: Aerial
  misc_feature: MA Experiment 20000070 PARAMETER Experiment Name: At_100uM_ABA_Mutants_cDNA_P Parameter: Treatment Value: 100uM ABA vs. No Treatment
  misc_feature: MA Experiment ID: 20000071 Result: Down-regulated in Transcription
  misc_feature: MA Experiment 20000071 PARAMETER Experiment Name: At_100uM_ABA_Mutants_cDNA_P Parameter: Plant Line Value: CS8104
  misc_feature: MA Experiment 20000071 PARAMETER Experiment Name: At_100uM_ABA_Mutants_cDNA_P Parameter: Timepoint (hr) Value: 6
  misc_feature: MA Experiment 20000071 PARAMETER Experiment Name: At_100uM_ABA_Mutants_cDNA_P Parameter: Tissue Value: Aerial
  misc_feature: MA Experiment 20000071 PARAMETER Experiment Name: At_100uM_ABA_Mutants_cDNA_P Parameter: Treatment Value: 100uM ABA vs. No Treatment
  misc_feature: MA Experiment ID: 20000072 Result: Down-regulated in Transcription
  misc_feature: MA Experiment 20000072 PARAMETER Experiment Name: At_100uM_ABA_Mutants_cDNA_P Parameter: Plant Line Value: CS8105
  misc_feature: MA Experiment 20000072 PARAMETER Experiment Name: At_100uM_ABA_Mutants_cDNA_P Parameter: Timepoint (hr) Value: 6
  misc_feature: MA Experiment 20000072 PARAMETER Experiment Name: At_100uM_ABA_Mutants_cDNA_P Parameter: Tissue Value: Aerial
  misc_feature: MA Experiment 20000072 PARAMETER Experiment Name: At_100uM_ABA_Mutants_cDNA_P Parameter: Treatment Value: 100uM ABA vs. No Treatment
  misc_feature: MA Experiment ID: 20000086 Result: Down-regulated in Transcription
  misc_feature: MA Experiment 20000086 PARAMETER Experiment Name: At_100uM_ABA_Mutants_cDNA_P Parameter: Plant Line Value: CS22
  misc_feature: MA Experiment 20000086 PARAMETER Experiment Name: At_100uM_ABA_Mutants_cDNA_P Parameter: Timepoint (hr) Value: 6
  misc_feature: MA Experiment 20000086 PARAMETER Experiment Name: At_100uM_ABA_Mutants_cDNA_P Parameter: Tissue Value: Aerial
  misc_feature: MA Experiment 20000086 PARAMETER Experiment Name: At_100uM_ABA_Mutants_cDNA_P Parameter: Treatment Value: 100uM ABA vs. No Treatment
  misc_feature: MA Experiment ID: 20000087 Result: Down-regulated in Transcription
  misc_feature: MA Experiment 20000087 PARAMETER Experiment Name: At_100uM_ABA_Mutants_cDNA_P Parameter: Plant Line Value: WS
  misc_feature: MA Experiment 20000087 PARAMETER Experiment Name: At_100uM_ABA_Mutants_cDNA_P Parameter: Timepoint (hr) Value: 6
  misc_feature: MA Experiment 20000087 PARAMETER Experiment Name: At_100uM_ABA_Mutants_cDNA_P Parameter: Tissue Value: Aerial
  misc_feature: MA Experiment 20000087 PARAMETER Experiment Name: At_100uM_ABA_Mutants_cDNA_P Parameter: Treatment Value: 100uM ABA vs. No Treatment
  misc_feature: MA Experiment ID: 20000088 Result: Down-regulated in Transcription
  misc_feature: MA Experiment 20000088 PARAMETER Experiment Name: At_100uM_ABA_Mutants_cDNA_P Parameter: Plant Line Value: Landsberg
  misc_feature: MA Experiment 20000088 PARAMETER Experiment Name: At_100uM_ABA_Mutants_cDNA_P Parameter: Timepoint (hr) Value: 6
  misc_feature: MA Experiment 20000088 PARAMETER Experiment Name: At_100uM_ABA_Mutants_cDNA_P Parameter: Tissue Value: Aerial
  misc_feature: MA Experiment 20000088 PARAMETER Experiment Name: At_100uM_ABA_Mutants_cDNA_P Parameter: Treatment Value: 100uM ABA vs. No Treatment
  misc_feature: MA Experiment ID: 20000089 Result: Down-regulated in Transcription
  misc_feature: MA Experiment ID: 20000090 Result: Down-regulated in Transcription
  misc_feature: MA Experiment ID: 20000117 Result: Down-regulated in Transcription
  misc_feature: MA Experiment 20000117 PARAMETER Experiment Name: At_100uM_ABA_Mutants_cDNA_P Parameter: Plant Line Value: Columbia
  misc_feature: MA Experiment 20000117 PARAMETER Experiment Name: At_100uM_ABA_Mutants_cDNA_P Parameter: Timepoint (hr) Value: 6
  misc_feature: MA Experiment 20000117 PARAMETER Experiment Name: At_100uM_ABA_Mutants_cDNA_P Parameter: Tissue Value: Aerial
  misc_feature: MA Experiment 20000117 PARAMETER Experiment Name: At_100uM_ABA_Mutants_cDNA_P Parameter: Treatment Value: 100uM ABA vs. No Treatment
  misc_feature: MA Experiment ID: 20000180 Result: Up-regulated in Transcription
  misc_feature: MA Experiment 20000180 PARAMETER Experiment Name: At_Germinating_Seeds_P Parameter: Age (hr) Value: 24 vs. 0
  misc_feature: MA Experiment 20000180 PARAMETER Experiment Name: At_Germinating_Seeds_P Parameter: Tissue Value: Germinating Seeds
  misc_feature: MA Experiment ID: 20000185 Result: Down-regulated in Transcription
  misc_feature: MA Experiment 20000185 PARAMETER Experiment Name: At_Roots__P Parameter: Age (day) Value: 7 vs. 21
  misc_feature: MA Experiment 20000185 PARAMETER Experiment Name: At_Roots__P Parameter: Organism Value: A. thaliana
  misc_feature: MA Experiment 20000185 PARAMETER Experiment Name: At_Roots__P Parameter: Tissue Value: Roots vs. Whole Plant
  misc_feature: MA Experiment ID: 20000224 Result: Up-regulated in Transcription
  misc_feature: MA Experiment ID: 20000235 Result: Up-regulated in Transcription
  misc_feature: MA Experiment 20000235 PARAMETER Experiment Name: At_Siliques_P Parameter: Age (day) Value: 21
  misc_feature: MA Experiment 20000235 PARAMETER Experiment Name: At_Siliques_P Parameter: Organism Value: A. thaliana
  misc_feature: MA Experiment 20000235 PARAMETER Experiment Name: At_Siliques_P Parameter: Plant Line Value: WS
  misc_feature: MA Experiment 20000235 PARAMETER Experiment Name: At_Siliques_P Parameter: Tissue Value: 5-10mm Siliques vs. Whole Plant
  misc_feature: MA Experiment ID: 20000438 Result: Up-regulated in Transcription
  misc_feature: MA Experiment 20000438 PARAMETER Experiment Name: At_Shoots__P Parameter: Age (day) Value: 14
  misc_feature: MA Experiment 20000438 PARAMETER Experiment Name: At_Shoots__P Parameter: Tissue Value: Shoots vs. Whole Plant
  misc_feature: MA Experiment ID: 20000439 Result: Down-regulated in Transcription
  misc_feature: MA Experiment 20000439 PARAMETER Experiment Name: At_Roots__P Parameter: Age (day) Value: 14 vs. 21
  misc_feature: MA Experiment 20000439 PARAMETER Experiment Name: At_Roots__P Parameter: Organism Value: A. thaliana
  misc_feature: MA Experiment 20000439 PARAMETER Experiment Name: At_Roots__P Parameter: Tissue Value: Roots vs. Whole Plant
  misc_feature: MA Experiment ID: 20000794 Result: Up-regulated in Transcription
  misc_feature: MA Experiment 20000794 PARAMETER Experiment Name: At_Petals_P Parameter: Age (day) Value: 23-25 days
  misc_feature: MA Experiment 20000794 PARAMETER Experiment Name: At_Petals_P Parameter: Plant Line Value: WS
  misc_feature: MA Experiment 20000794 PARAMETER Experiment Name: At_Petals_P Parameter: Tissue Value: Petals vs. Whole plant
  misc_feature: MA Experiment ID: 20001248 Result: Down-regulated in Transcription
  misc_feature: MA Experiment 20001248 PARAMETER Experiment Name: At_Far-red-induction_P Parameter: Age (day) Value: 7
  misc_feature: MA Experiment 20001248 PARAMETER Experiment Name: At_Far-red-induction_P Parameter: Light Value: Far-red vs. White
  misc_feature: MA Experiment 20001248 PARAMETER Experiment Name: At_Far-red-induction_P Parameter: Organism Value: A. thaliana
  misc_feature: MA Experiment 20001248 PARAMETER Experiment Name: At_Far-red-induction_P Parameter: Plant Line Value: Columbia
  misc_feature: MA Experiment 20001248 PARAMETER Experiment Name: At_Far-red-induction_P Parameter: Timepoint (hr) Value: 4
  misc_feature: MA Experiment 20001248 PARAMETER Experiment Name: At_Far-red-induction_P Parameter: Tissue Value: Whole Plant
  misc_feature: MA Experiment ID: 20001450 Result: Down-regulated in Transcription
  misc_feature: MA Experiment 20001450 PARAMETER Experiment Name: At_Far-red-induction_P Parameter: Age (day) Value: 7
  misc_feature: MA Experiment 20001450 PARAMETER Experiment Name: At_Far-red-induction_P Parameter: Light Value: Far-red vs. White
  misc_feature: MA Experiment 20001450 PARAMETER Experiment Name: At_Far-red-induction_P Parameter: Organism Value: A. thaliana
  misc_feature: MA Experiment 20001450 PARAMETER Experiment Name: At_Far-red-induction_P Parameter: Plant Line Value: Columbia
  misc_feature: MA Experiment 20001450 PARAMETER Experiment Name: At_Far-red-induction_P Parameter: Timepoint (hr) Value: 8
  misc_feature: MA Experiment 20001450 PARAMETER Experiment Name: At_Far-red-induction_P Parameter: Tissue Value: Whole Plant
gagttgaacccagttgagtatttagccaatacgattagaggatttacttgttttttctcttttcatgttcttcatttgcttttgaagatcttctctttatgaaagctttagtcttttaccagtttgatccaattctgggtttcactgaaaaaaagttgggagtttgattcttctaactgtagaagaaacagagtcaacagaagaaaactaaaaaagttgagatttttctctcacgcgctcaagagcttgagtatgtcttcttctgtagcagtgttatgggttgctacttcttctctaaatccagacccaatgaacaattgtgggttggtaagggttctagaatcttctagactgttctctccttgtcagaatcagagactaaacaaaggtaagaagaagcagataccaacttggagttcttcttttgtaaggaaccgaagtagaagaattggtgttgtgtcttcaagcttagtagcaagtccttctggagagatagctctttcatctgaagagaaggtttacaatgttgtgttgaaacaagctgctttggtgaacaaacagctaaggtcttcttcttatgaccttgatgtgaagaaaccacaagatgttgttcttcctgggagtttgagtttgttgggtgaagcttatgatcgatgcggtgaagtttgcgctgaatatgctaagacgttttatcttggaactttgcttatgacacccgaaaggcgaaaggcgatttgggcaatctacgtttggtgtagaagaactgatgaacttgtggatgggccaaatgcttcacatataactcccatggctttagatagatgggaagcaaggttagaagatcttttccgtggtcgtcctttcgatatgcttgatgctgctctcgctgatacagttgctagatacccggtcgatattcagccatttcgagacatgatcgaaggaatgagaatggacttgaagaaatcgagataccagaacttcgatgatctatacctttactgctactacgtcgctggaaccgtcggattgatgagcgttccggttatgggaatcgatcctaagtcgaaagcaacaaccgaaagtgtttacaacgctgccttggcccttggtatagccaatcagcttactaacatactcagagacgtaggcgaagatgcgagaagaggaagggtttatctgcctcaggatgaattggctcaggctggtctttcagatgaagacatattcgccggaaaagtaactgataaatggagaaacttcatgaaaatgcagcttaaacgagcaagaatgttcttcgacgaagctgagaaaggcgtcaccgagctcagtgccgctagcagatggcctgtatgggcttcattgctattgtacaggagaatactggacgagattgaagcgaatgattacaacaattttactaagagagcttatgtggggaaagtcaagaaaattgcagctttgccattggcttatgctaaatcagtactaaagacttcaagttcaagactatcgatatgagagcgagaggaaagtggaacaaaaacaacctaagagcgctttttgtgattaagaaaaaacttaggctcgaatttattatgttaactaatatatacatattaatggggaagcaaattcttataatgttacattatctttctgaatgtaaaaaagtatttttttttttaattttattttagttatagttctcttggcctaatgag

SEQ ID NO: 47842 - protein, 422 aa, Arabidopsis thaliana
  peptide (1)..(422): Ceres Seq. ID no. 13649441
  misc_feature (71)..(416): Homolog of NCBI NO: 13542332 NR Description: phytoene synthase [Citrus x paradisi]
  misc_feature (68)..(416): Homolog of NCBI NO: 1346882 NR Description: Phytoene synthase, chloroplast precursor (MEL5)
  misc_feature (4)..(421): Homolog of NCBI NO: 11990226 NR Description: phytoene synthase [Helianthus annuus]
  misc_feature (4)..(421): Homolog of NCBI NO: 12584564 NR Description: phytoene synthase [Helianthus annuus]
  misc_feature (71)..(416): Homolog of NCBI NO: 6959860 NR Description: phytoene synthase [Citrus unshiu]
  misc_feature (30)..(416): Homolog of NCBI NO: 40456029 NR Description: phytoene synthase [Momordica charantia var.
  misc_feature (4)..(416): Homolog of NCBI NO: 585749 NR Description: Phytoene synthase, chloroplast precursor
  misc_feature (1)..(422): Homolog of NCBI NO: 413732 NR Description: phytoene synthase
  misc_feature (1)..(422): Homolog of NCBI NO: 21553694 NR Description: phytoene synthase [Arabidopsis thaliana]
  misc_feature (1)..(422): Homolog of NCBI NO: 15237933 NR Description: phytoene synthase
MSSSVAVLWVATSSLNPDPMNNCGLVRVLESSRLFSPCQNQRLNKGKKKQIPTWSSSFVRNRSRRIGVVSSSLVASPSGEIALSSEEKVYNVVLKQAALVNKQLRSSSYDLDVKKPQDVVLPGSLSLLGEAYDRCGEVCAEYAKTFYLGTLLMTPERRKAIWAIYVWCRRTDELVDGPNASHITPMALDRWEARLEDLFRGRPFDMLDAALADTVARYPVDIQPFRDMIEGMRMDLKKSRYQNFDDLYLYCYYVAGTVGLMSVPVMGIDPKSKATTESVYNAALALGIANQLTNILRDVGEDARRGRVYLPQDELAQAGLSDEDIFAGKVTDKWRNFMKMQLKRARMFFDEAEKGVTELSAASRWPVWASLLLYRRILDEIEANDYNNFTKRAYVGKVKKIAALPLAYAKSVLKTSSSRLSI

SEQ ID NO: 47843 - protein, 403 aa, Arabidopsis thaliana
  peptide (1)..(403): Ceres Seq. ID no. 13649442
  misc_feature (52)..(397): Homolog of NCBI NO: 13542332 NR Description: phytoene synthase [Citrus x paradisi]
  misc_feature (49)..(397): Homolog of NCBI NO: 1346882 NR Description: Phytoene synthase, chloroplast precursor (MEL5)
  misc_feature (1)..(402): Homolog of NCBI NO: 11990226 NR Description: phytoene synthase [Helianthus annuus]
  misc_feature (1)..(402): Homolog of NCBI NO: 12584564 NR Description: phytoene synthase [Helianthus annuus]
  misc_feature (52)..(397): Homolog of NCBI NO: 6959860 NR Description: phytoene synthase [Citrus unshiu]
  misc_feature (11)..(397): Homolog of NCBI NO: 40456029 NR Description: phytoene synthase [Momordica charantia var.
  misc_feature (1)..(397): Homolog of NCBI NO: 585749 NR Description: Phytoene synthase, chloroplast precursor
  misc_feature (1)..(403): Homolog of NCBI NO: 413732 NR Description: phytoene synthase
  misc_feature (1)..(403): Homolog of NCBI NO: 21553694 NR Description: phytoene synthase [Arabidopsis thaliana]
  misc_feature (1)..(403): Homolog of NCBI NO: 15237933 NR Description: phytoene synthase
MNNCGLVRVLESSRLFSPCQNQRLNKGKKKQIPTWSSSFVRNRSRRIGVVSSSLVASPSGEIALSSEEKVYNVVLKQAALVNKQLRSSSYDLDVKKPQDVVLPGSLSLLGEAYDRCGEVCAEYAKTFYLGTLLMTPERRKAIWAIYVWCRRTDELVDGPNASHITPMALDRWEARLEDLFRGRPFDMLDAALADTVARYPVDIQPFRDMIEGMRMDLKKSRYQNFDDLYLYCYYVAGTVGLMSVPVMGIDPKSKATTESVYNAALALGIANQLTNILRDVGEDARRGRVYLPQDELAQAGLSDEDIFAGKVTDKWRNFMKMQLKRARMFFDEAEKGVTELSAASRWPVWASLLLYRRILDEIEANDYNNFTKRAYVGKVKKIAALPLAYAKSVLKTSSSRLSI

SEQ ID NO: 47844 - protein, 270 aa, Arabidopsis thaliana; identical to SEQ ID NO: 29905
  peptide (1)..(270): Ceres Seq. ID no. 13649443
  misc_feature (1)..(264): Homolog of NCBI NO: 13542332 NR Description: phytoene synthase [Citrus x paradisi]
  misc_feature (1)..(264): Homolog of NCBI NO: 1346882 NR Description: Phytoene synthase, chloroplast precursor (MEL5)
  misc_feature (1)..(269): Homolog of NCBI NO: 11990226 NR Description: phytoene synthase [Helianthus annuus]
  misc_feature (1)..(269): Homolog of NCBI NO: 12584564 NR Description: phytoene synthase [Helianthus annuus]
  misc_feature (1)..(264): Homolog of NCBI NO: 6959860 NR Description: phytoene synthase [Citrus unshiu]
  misc_feature (1)..(264): Homolog of NCBI NO: 40456029 NR Description: phytoene synthase [Momordica charantia var.
  misc_feature (1)..(264): Homolog of NCBI NO: 585749 NR Description: Phytoene synthase, chloroplast precursor
  misc_feature (1)..(270): Homolog of NCBI NO: 413732 NR Description: phytoene synthase
  misc_feature (1)..(270): Homolog of NCBI NO: 21553694 NR Description: phytoene synthase [Arabidopsis thaliana]
  misc_feature (1)..(270): Homolog of NCBI NO: 15237933 NR Description: phytoene synthase

SEQ ID NO: 47845 - DNA, 1115 bp, Arabidopsis thaliana
  misc_feature (1)..(1115): Ceres Seq. ID no. 13648194
  misc_feature: MA Experiment ID: 20000306 Result: Down-regulated in Transcription
  misc_feature: MA Experiment 20000306 PARAMETER Experiment Name: At_Germinating_Seeds_Sub_P Parameter: Age (hr) Value: 6 vs. 0
  misc_feature: MA Experiment 20000306 PARAMETER Experiment Name: At_Germinating_Seeds_Sub_P Parameter: Organism Value: A. thaliana
  misc_feature: MA Experiment 20000306 PARAMETER Experiment Name: At_Germinating_Seeds_Sub_P Parameter: Plant Line Value: WS
  misc_feature: MA Experiment 20000306 PARAMETER Experiment Name: At_Germinating_Seeds_Sub_P Parameter: Tissue Value: Germinating Seeds
  misc_feature: MA Experiment ID: 20000307 Result: Down-regulated in Transcription
  misc_feature: MA Experiment 20000307 PARAMETER Experiment Name: At_Germinating_Seeds_Sub_P Parameter: Age (hr) Value: 24 vs. 0
  misc_feature: MA Experiment 20000307 PARAMETER Experiment Name: At_Germinating_Seeds_Sub_P Parameter: Organism Value: A. thaliana
  misc_feature: MA Experiment 20000307 PARAMETER Experiment Name: At_Germinating_Seeds_Sub_P Parameter: Plant Line Value: WS
  misc_feature: MA Experiment 20000307 PARAMETER Experiment Name: At_Germinating_Seeds_Sub_P Parameter: Tissue Value: Germinating Seeds
  misc_feature: MA Experiment ID: 20000315 Result: Down-regulated in Transcription
  misc_feature: MA Experiment 20000315 PARAMETER Experiment Name: At_14day_Shoots-Roots_Sub_P Parameter: Age (day) Value: 14
  misc_feature: MA Experiment 20000315 PARAMETER Experiment Name: At_14day_Shoots-Roots_Sub_P Parameter: Organism Value: A. thaliana
  misc_feature: MA Experiment 20000315 PARAMETER Experiment Name: At_14day_Shoots-Roots_Sub_P Parameter: Plant Line Value: WS
  misc_feature: MA Experiment 20000315 PARAMETER Experiment Name: At_14day_Shoots-Roots_Sub_P Parameter: Tissue Value: Shoots vs. Whole Plant
  misc_feature: MA Experiment ID: 20000349 Result: Down-regulated in Transcription
  misc_feature: MA Experiment 20000349 PARAMETER Experiment Name: At_100uM_ABA_Sub_P Parameter: Age (day) Value: 14
  misc_feature: MA Experiment 20000349 PARAMETER Experiment Name: At_100uM_ABA_Sub_P Parameter: Organism Value: A. thaliana
  misc_feature: MA Experiment 20000349 PARAMETER Experiment Name: At_100uM_ABA_Sub_P Parameter: Plant Line Value: WS
  misc_feature: MA Experiment 20000349 PARAMETER Experiment Name: At_100uM_ABA_Sub_P Parameter: Timepoint (hr) Value: 6
  misc_feature: MA Experiment 20000349 PARAMETER Experiment Name: At_100uM_ABA_Sub_P Parameter: Tissue Value: Aerial
  misc_feature: MA Experiment 20000349 PARAMETER Experiment Name: At_100uM_ABA_Sub_P Parameter: Treatment Value: 100uM ABA vs. No Treatment
  misc_feature: MA Experiment ID: 20000440 Result: Up-regulated in Transcription
  misc_feature: MA Experiment 20000440 PARAMETER Experiment Name: At_Closed-Flower__Sub_P Parameter: Tissue Value: Closed Flower vs. Whole Plant
  misc_feature: MA Experiment ID: 20001807 Result: Up-regulated in Transcription
  misc_feature: MA Experiment 20001807 PARAMETER Experiment Name: At_50mM_NH4NO3_L-to-H_Sub_P Parameter: Timepoint (hr) Value: 6
  misc_feature: MA Experiment 20001807 PARAMETER Experiment Name: At_50mM_NH4NO3_L-to-H_Sub_P Parameter: Tissue Value: Leaf
  misc_feature: MA Experiment 20001807 PARAMETER Experiment Name: At_50mM_NH4NO3_L-to-H_Sub_P Parameter: Treatment Value: 50mM NH4NO3 vs 100mM Mannitol
ccggtctctacgcggaaaaacaaaaaaatggggaggaagcggaagcacagtgagacggaagctccggcgccggtgaaaaagagcgatgagcctgctccggatagacccaaaaggactctattgggatggaaagataagagtgaaggtgaagctgagaaagctaaagctttgacttcatctggattcaagaacaaagagaaggttttggtgacttgttctcgtcgtatcagtttcaggtatcggagtttgatgttgaacattgtttcacttctaccacactgtaagaaagacagtaaagttgaagcaaagagtagcaaaggcgcgactttgaatgagctcattgagcttaagaattctaattcctgcttgttcttcgagtgtaggaaacataaagatctttacatgtggatggtcaaatcccctaatggaccatctgtgaagtttttggttaaagctgtgcacgcaatggaagagatgaaactcactggaaatcatctcaaagggtcacgtccacttttgacattctcatccaattttgataaagatgcgcactggaaactcttgaaggagatgcttactcaggtcttcggaattcctaaggaacacaggaaatctaagccttaccatgaccatgtatttgtcttttcaattgttgatgagcatatatggttccgaaattaccagatttcggttcctcacaatgagtcagataaaattgcaaaaggtggcctggataaaatgacccttatcgaggttggtccaaggttttgtctgaatccaatcaagatattcgcgggcagctttggaggtcctactctttatgagaacccgttatacgtatctccaaaccagattcgagcattggagaagagaaataaagctgggaaatttgctaagaagatcaaggcgaagacgaggaaaaagatgcatgagctctcaaacccgttggagcctgatgagtttgcagatatgtggaaagatgatgaatgatcagagttcaggaaaattgtatcacttcactttgtcttactgttattttagttttgtcttgttttcgctcactatcaaacataaacaaagttttgtcttgcaatgatatgtttctaagtttcttg

SEQ ID NO: 47846 - protein, 329 aa, Arabidopsis thaliana
  peptide (1)..(329): Ceres Seq. ID no. 13648195
  misc_feature (44)..(242): Homolog of NCBI NO: 32414967 NR Description: hypothetical protein [Neurospora crassa]
  misc_feature (41)..(323): Homolog of NCBI NO: 6324496 NR Description: Essential nucleolar protein required for
  misc_feature (44)..(319): Homolog of NCBI NO: 33604118 NR Description: Unknown (protein for IMAGE:6789379) [Danio rerio]
  misc_feature (35)..(318): Homolog of NCBI NO: 30580353 NR Description: Ribosome biogenesis protein Brix (Bx24)
  misc_feature (35)..(318): Homolog of NCBI NO: 27370947 NR Description: Similar to BRIX [Xenopus laevis]
  misc_feature (2)..(318): Homolog of NCBI NO: 19311012 NR Description: BRIX [Homo sapiens]
  misc_feature (12)..(325): Homolog of NCBI NO: 30580352 NR Description: Ribosome biogenesis protein Brix
  misc_feature (10)..(328): Homolog of NCBI NO: 16648689 NR Description: AT3g15460/MJK13_12 [Arabidopsis thaliana]
  misc_feature (10)..(328): Homolog of NCBI NO: 18400776 NR Description: expressed protein [Arabidopsis thaliana]
  misc_feature (10)..(329): Homolog of NCBI NO: 18404250 NR Description: expressed protein [Arabidopsis thaliana]
PVSTRKNKKMGRKRKHSETEAPAPVKKSDEPAPDRPKRTLLGWKDKSEGEAEKAKALTSSGFKNKEKVLVTCSRRISFRYRSLMLNIVSLLPHCKKDSKVEAKSSKGATLNELIELKNSNSCLFFECRKHKDLYMWMVKSPNGPSVKFLVKAVHAMEEMKLTGNHLKGSRPLLTFSSNFDKDAHWKLLKEMLTQVFGIPKEHRKSKPYHDHVFVFSIVDEHIWFRNYQISVPHNESDKIAKGGLDKMTLIEVGPRFCLNPIKIFAGSFGGPTLYENPLYVSPNQIRALEKRNKAGKFAKKIKAKTRKKMHELSNPLEPDEFADMWKDDE

SEQ ID NO: 47847 - protein, 320 aa, Arabidopsis thaliana
  peptide (1)..(320): Ceres Seq. ID no. 13648196
  misc_feature (35)..(233): Homolog of NCBI NO: 32414967 NR Description: hypothetical protein [Neurospora crassa]
  misc_feature (32)..(314): Homolog of NCBI NO: 6324496 NR Description: Essential nucleolar protein required for
  misc_feature (35)..(310): Homolog of NCBI NO: 33604118 NR Description: Unknown (protein for IMAGE:6789379) [Danio rerio]
  misc_feature (26)..(309): Homolog of NCBI NO: 30580353 NR Description: Ribosome biogenesis protein Brix (Bx24)
  misc_feature (26)..(309): Homolog of NCBI NO: 27370947 NR Description: Similar to BRIX [Xenopus laevis]
  misc_feature (1)..(309): Homolog of NCBI NO: 19311012 NR Description: BRIX [Homo sapiens]
  misc_feature (3)..(316): Homolog of NCBI NO: 30580352 NR Description: Ribosome biogenesis protein Brix
  misc_feature (1)..(319): Homolog of NCBI NO: 16648689 NR Description: AT3g15460/MJK13_12 [Arabidopsis thaliana]
  misc_feature (1)..(319): Homolog of NCBI NO: 18400776 NR Description: expressed protein [Arabidopsis thaliana]
  misc_feature (1)..(320): Homolog of NCBI NO: 18404250 NR Description: expressed protein [Arabidopsis thaliana]
MGRKRKHSETEAPAPVKKSDEPAPDRPKRTLLGWKDKSEGEAEKAKALTSSGFKNKEKVLVTCSRRISFRYRSLMLNIVSLLPHCKKDSKVEAKSSKGATLNELIELKNSNSCLFFECRKHKDLYMWMVKSPNGPSVKFLVKAVHAMEEMKLTGNHLKGSRPLLTFSSNFDKDAHWKLLKEMLTQVFGIPKEHRKSKPYHDHVFVFSIVDEHIWFRNYQISVPHNESDKIAKGGLDKMTLIEVGPRFCLNPIKIFAGSFGGPTLYENPLYVSPNQIRALEKRNKAGKFAKKIKAKTRKKMHELSNPLEPDEFADMWKDDE

SEQ ID NO: 47848 - protein, 246 aa, Arabidopsis thaliana
  peptide (1)..(246): Ceres Seq. ID no. 13648197
  misc_feature (1)..(159): Homolog of NCBI NO: 32414967 NR Description: hypothetical protein [Neurospora crassa]
  misc_feature (1)..(240): Homolog of NCBI NO: 6324496 NR Description: Essential nucleolar protein required for
  misc_feature (1)..(236): Homolog of NCBI NO: 33604118 NR Description: Unknown (protein for IMAGE:6789379) [Danio rerio]
  misc_feature (1)..(235): Homolog of NCBI NO: 30580353 NR Description: Ribosome biogenesis protein Brix (Bx24)
  misc_feature (1)..(235): Homolog of NCBI NO: 27370947 NR Description: Similar to BRIX [Xenopus laevis]
  misc_feature (1)..(235): Homolog of NCBI NO: 19311012 NR Description: BRIX [Homo sapiens]
  misc_feature (1)..(242): Homolog of NCBI NO: 30580352 NR Description: Ribosome biogenesis protein Brix
  misc_feature (1)..(245): Homolog of NCBI NO: 16648689 NR Description: AT3g15460/MJK13_12 [Arabidopsis thaliana]
  misc_feature (1)..(245): Homolog of NCBI NO: 18400776 NR Description: expressed protein [Arabidopsis thaliana]
  misc_feature (1)..(246): Homolog of NCBI NO: 18404250 NR Description: expressed protein [Arabidopsis thaliana]
MLNIVSLLPHCKKDSKVEAKSSKGATLNELIELKNSNSCLFFECRKHKDLYMWMVKSPNGPSVKFLVKAVHAMEEMKLTGNHLKGSRPLLTFSSNFDKDAHWKLLKEMLTQVFGIPKEHRKSKPYHDHVFVFSIVDEHIWFRNYQISVPHNESDKIAKGGLDKMTLIEVGPRFCLNPIKIFAGSFGGPTLYENPLYVSPNQIRALEKRNKAGKFAKKIKAKTRKKMHELSNPLEPDEFADMWKDDE

SEQ ID NO: 47849 - DNA, 2123 bp, Arabidopsis thaliana; identical to SEQ ID NO: 45220
  misc_feature (1)..(2123): Ceres Seq. ID no. 13575963
  misc_feature: MA Experiment ID: 20000171 Result: Down-regulated in Transcription
  misc_feature: MA Experiment 20000171 PARAMETER Experiment Name: At_42deg_Heat_P Parameter: Age (day) Value: 14
  misc_feature: MA Experiment 20000171 PARAMETER Experiment Name: At_42deg_Heat_P Parameter: Organism Value: A. thaliana
  misc_feature: MA Experiment 20000171 PARAMETER Experiment Name: At_42deg_Heat_P Parameter: Plant Line Value: WS
  misc_feature: MA Experiment 20000171 PARAMETER Experiment Name: At_42deg_Heat_P Parameter: Temperature (deg C) Value: 42 vs. 22
  misc_feature: MA Experiment 20000171 PARAMETER Experiment Name: At_42deg_Heat_P Parameter: Timepoint (hr) Value: 1
  misc_feature: MA Experiment 20000171 PARAMETER Experiment Name: At_42deg_Heat_P Parameter: Tissue Value: Aerial
  misc_feature: MA Experiment ID: 20000173 Result: Down-regulated in Transcription
  misc_feature: MA Experiment 20000173 PARAMETER Experiment Name: At_42deg_Heat_P Parameter: Age (day) Value: 14
  misc_feature: MA Experiment 20000173 PARAMETER Experiment Name: At_42deg_Heat_P Parameter: Organism Value: A. thaliana
  misc_feature: MA Experiment 20000173 PARAMETER Experiment Name: At_42deg_Heat_P Parameter: Plant Line Value: WS
  misc_feature: MA Experiment 20000173 PARAMETER Experiment Name: At_42deg_Heat_P Parameter: Temperature (deg C) Value: 42 vs. 22
  misc_feature: MA Experiment 20000173 PARAMETER Experiment Name: At_42deg_Heat_P Parameter: Timepoint (hr) Value: 6
  misc_feature: MA Experiment 20000173 PARAMETER Experiment Name: At_42deg_Heat_P Parameter: Tissue Value: Aerial

SEQ ID NO: 47850 - protein, 537 aa, Arabidopsis thaliana; identical to SEQ ID NO: 45221
  peptide (1)..(537): Ceres Seq. ID no. 13575964
  misc_feature (70)..(534): Homolog of NCBI NO: 15233046 NR Description: glycosyltransferase family 8 [Arabidopsis
  misc_feature (79)..(534): Homolog of NCBI NO: 18422837 NR Description: glycosyltransferase family 8 [Arabidopsis
  misc_feature (79)..(534): Homolog of NCBI NO: 10177914 NR Description: emb|CAB71043.1~gene_id:MCA23.10~strong similarity
  misc_feature (70)..(534): Homolog of NCBI NO: 7271113 NR Description: 68 kDa protein [Cicer arietinum]
  misc_feature (59)..(325): Homolog of NCBI NO: 25518488 NR Description: hypothetical protein F25I16.8 - Arabidopsis
  misc_feature (2)..(536): Homolog of NCBI NO: 32492171 NR Description: OSJNBb0034I13.1 [Oryza sativa (japonica
  misc_feature (65)..(518): Homolog of NCBI NO: 25411994 NR Description: hypothetical protein At2g20810 [imported] -
  misc_feature (1)..(534): Homolog of NCBI NO: 18399484 NR Description: glycosyltransferase family 8 [Arabidopsis
  misc_feature (1)..(325): Homolog of NCBI NO: 18394628 NR Description: glycosyltransferase family 8 [Arabidopsis
  misc_feature (1)..(537): Homolog of NCBI NO: 15293067 NR Description: unknown protein [Arabidopsis thaliana]
  misc_feature (70)..(534): Homolog of NCBI NO: 15233046 NR Description: glycosyltransferase family 8 [Arabidopsis
  misc_feature (79)..(534): Homolog of NCBI NO: 18422837 NR Description: glycosyltransferase family 8 [Arabidopsis
  misc_feature (79)..(534): Homolog of NCBI NO: 10177914 NR Description: emb|CAB71043.1~gene_id:MCA23.10~strong similarity
  misc_feature (70)..(534): Homolog of NCBI NO: 7271113 NR Description: 68 kDa protein [Cicer arietinum]
  misc_feature (59)..(325): Homolog of NCBI NO: 25518488 NR Description: hypothetical protein F25I16.8 - Arabidopsis
  misc_feature (2)..(536): Homolog of NCBI NO: 32492171 NR Description: OSJNBb0034I13.1 [Oryza sativa (japonica
  misc_feature (65)..(518): Homolog of NCBI NO: 25411994 NR Description: hypothetical protein At2g20810 [imported] -
  misc_feature (1)..(534): Homolog of NCBI NO: 18399484 NR Description: glycosyltransferase family 8 [Arabidopsis
  misc_feature (1)..(325): Homolog of NCBI NO: 18394628 NR Description: glycosyltransferase family 8 [Arabidopsis
  misc_feature (1)..(537): Homolog of NCBI NO: 15293067 NR Description: unknown protein [Arabidopsis thaliana]

SEQ ID NO: 47851 - protein, 479 aa, Arabidopsis thaliana; identical to SEQ ID NO: 45222
  peptide (1)..(479): Ceres Seq. ID no. 13575965
  misc_feature (12)..(476): Homolog of NCBI NO: 15233046 NR Description: glycosyltransferase family 8 [Arabidopsis
  misc_feature (21)..(476): Homolog of NCBI NO: 18422837 NR Description: glycosyltransferase family 8 [Arabidopsis
  misc_feature (21)..(476): Homolog of NCBI NO: 10177914 NR Description: emb|CAB71043.1~gene_id:MCA23.10~strong similarity
  misc_feature (12)..(476): Homolog of NCBI NO: 7271113 NR Description: 68 kDa protein [Cicer arietinum]
  misc_feature (1)..(267): Homolog of NCBI NO: 25518488 NR Description: hypothetical protein F25I16.8 - Arabidopsis
  misc_feature (1)..(478): Homolog of NCBI NO: 32492171 NR Description: OSJNBb0034I13.1 [Oryza sativa (japonica
  misc_feature (7)..(460): Homolog of NCBI NO: 25411994 NR Description: hypothetical protein At2g20810 [imported] -
  misc_feature (1)..(476): Homolog of NCBI NO: 18399484 NR Description: glycosyltransferase family 8 [Arabidopsis
  misc_feature (1)..(267): Homolog of NCBI NO: 18394628 NR Description: glycosyltransferase family 8 [Arabidopsis
  misc_feature (1)..(479): Homolog of NCBI NO: 15293067 NR Description: unknown protein [Arabidopsis thaliana]
  misc_feature (12)..(476): Homolog of NCBI NO: 15233046 NR Description: glycosyltransferase family 8 [Arabidopsis
  misc_feature (21)..(476): Homolog of NCBI NO: 18422837 NR Description: glycosyltransferase family 8 [Arabidopsis
  misc_feature (21)..(476): Homolog of NCBI NO: 10177914 NR Description: emb|CAB71043.1~gene_id:MCA23.10~strong similarity
  misc_feature (12)..(476): Homolog of NCBI NO: 7271113 NR Description: 68 kDa protein [Cicer arietinum]
  misc_feature (1)..(267): Homolog of NCBI NO: 25518488 NR Description: hypothetical protein F25I16.8 - Arabidopsis
  misc_feature (1)..(478): Homolog of NCBI NO: 32492171 NR Description: OSJNBb0034I13.1 [Oryza sativa (japonica
  misc_feature (7)..(460): Homolog of NCBI NO: 25411994 NR Description: hypothetical protein At2g20810 [imported] -
  misc_feature (1)..(476): Homolog of NCBI NO: 18399484 NR Description: glycosyltransferase family 8 [Arabidopsis
  misc_feature (1)..(267): Homolog of NCBI NO: 18394628 NR Description: glycosyltransferase family 8 [Arabidopsis
  misc_feature (1)..(479): Homolog of NCBI NO: 15293067 NR Description: unknown protein [Arabidopsis thaliana]

SEQ ID NO: 47852 - protein, 453 aa, Arabidopsis thaliana; identical to SEQ ID NO: 45223
  peptide (1)..(453): Ceres Seq. ID no. 13575966
  misc_feature (1)..(450): Homolog of NCBI NO: 15233046 NR Description: glycosyltransferase family 8 [Arabidopsis
  misc_feature (1)..(450): Homolog of NCBI NO: 18422837 NR Description: glycosyltransferase family 8 [Arabidopsis
  misc_feature (1)..(450): Homolog of NCBI NO: 10177914 NR Description: emb|CAB71043.1~gene_id:MCA23.10~strong similarity
  misc_feature (1)..(450): Homolog of NCBI NO: 7271113 NR Description: 68 kDa protein [Cicer arietinum]
  misc_feature (1)..(241): Homolog of NCBI NO: 25518488 NR Description: hypothetical protein F25I16.8 - Arabidopsis
  misc_feature (1)..(452): Homolog of NCBI NO: 32492171 NR Description: OSJNBb0034I13.1 [Oryza sativa (japonica
  misc_feature (1)..(434): Homolog of NCBI NO: 25411994 NR Description: hypothetical protein At2g20810 [imported] -
  misc_feature (1)..(450): Homolog of NCBI NO: 18399484 NR Description: glycosyltransferase family 8 [Arabidopsis
  misc_feature (1)..(241): Homolog of NCBI NO: 18394628 NR Description: glycosyltransferase family 8 [Arabidopsis
  misc_feature (1)..(453): Homolog of NCBI NO: 15293067 NR Description: unknown protein [Arabidopsis thaliana]
  misc_feature (1)..(450): Homolog of NCBI NO: 15233046 NR Description: glycosyltransferase family 8 [Arabidopsis
  misc_feature (1)..(450): Homolog of NCBI NO: 18422837 NR Description: glycosyltransferase family 8 [Arabidopsis
  misc_feature (1)..(450): Homolog of NCBI NO: 10177914 NR Description: emb|CAB71043.1~gene_id:MCA23.10~strong similarity
  misc_feature (1)..(450): Homolog of NCBI NO: 7271113 NR Description: 68 kDa protein [Cicer arietinum]
  misc_feature (1)..(241): Homolog of NCBI NO: 25518488 NR Description: hypothetical protein F25I16.8 - Arabidopsis
  misc_feature (1)..(452): Homolog of NCBI NO: 32492171 NR Description: OSJNBb0034I13.1 [Oryza sativa (japonica
  misc_feature (1)..(434): Homolog of NCBI NO: 25411994 NR Description: hypothetical protein At2g20810 [imported] -
  misc_feature (1)..(450): Homolog of NCBI NO: 18399484 NR Description: glycosyltransferase family 8 [Arabidopsis
  misc_feature (1)..(241): Homolog of NCBI NO: 18394628 NR Description: glycosyltransferase family 8 [Arabidopsis
  misc_feature (1)..(453): Homolog of NCBI NO: 15293067 NR Description: unknown protein [Arabidopsis thaliana]

SEQ ID NO: 47853 - DNA, 1701 bp, Arabidopsis thaliana
  misc_feature (1)..(1701): Ceres Seq. ID no. 12562851
  misc_feature: MA Experiment ID: 20000179 Result: Up-regulated in Transcription
  misc_feature: MA Experiment 20000179 PARAMETER Experiment Name: At_Germinating_Seeds_P Parameter: Age (hr) Value: 6 vs. 0
  misc_feature: MA Experiment 20000179 PARAMETER Experiment Name: At_Germinating_Seeds_P Parameter: Tissue Value: Germinating Seeds
  misc_feature: MA Experiment ID: 20000180 Result: Up-regulated in Transcription
  misc_feature: MA Experiment 20000180 PARAMETER Experiment Name: At_Germinating_Seeds_P Parameter: Age (hr) Value: 24 vs. 0
  misc_feature: MA Experiment 20000180 PARAMETER Experiment Name: At_Germinating_Seeds_P Parameter: Tissue Value: Germinating Seeds
  misc_feature: MA Experiment ID: 20000185 Result: Down-regulated in Transcription
  misc_feature: MA Experiment 20000185 PARAMETER Experiment Name: At_Roots__P Parameter: Age (day) Value: 7 vs. 21
  misc_feature: MA Experiment 20000185 PARAMETER Experiment Name: At_Roots__P Parameter: Organism Value: A. thaliana
  misc_feature: MA Experiment 20000185 PARAMETER Experiment Name: At_Roots__P Parameter: Tissue Value: Roots vs. Whole Plant
  misc_feature: MA Experiment ID: 20000438 Result: Up-regulated in Transcription
  misc_feature: MA Experiment 20000438 PARAMETER Experiment Name: At_Shoots__P Parameter: Age (day) Value: 14
  misc_feature: MA Experiment 20000438 PARAMETER Experiment Name: At_Shoots__P Parameter: Tissue Value: Shoots vs. Whole Plant
  misc_feature: MA Experiment ID: 20000439 Result: Down-regulated in Transcription
  misc_feature: MA Experiment 20000439 PARAMETER Experiment Name: At_Roots__P Parameter: Age (day) Value: 14 vs. 21
  misc_feature: MA Experiment 20000439 PARAMETER Experiment Name: At_Roots__P Parameter: Organism Value: A. thaliana
  misc_feature: MA Experiment 20000439 PARAMETER Experiment Name: At_Roots__P Parameter: Tissue Value: Roots vs. Whole Plant
  misc_feature: MA Experiment ID: 20001247 Result: Up-regulated in Transcription
  misc_feature: MA Experiment 20001247 PARAMETER Experiment Name: At_Far-red-induction_P Parameter: Age (day) Value: 7
  misc_feature: MA Experiment 20001247 PARAMETER Experiment Name: At_Far-red-induction_P Parameter: Light Value: Far-red vs. White
  misc_feature: MA Experiment 20001247 PARAMETER Experiment Name: At_Far-red-induction_P Parameter: Organism Value: A. thaliana
  misc_feature: MA Experiment 20001247 PARAMETER Experiment Name: At_Far-red-induction_P Parameter: Plant Line Value: Columbia
  misc_feature: MA Experiment 20001247 PARAMETER Experiment Name: At_Far-red-induction_P Parameter: Timepoint (hr) Value: 1
  misc_feature: MA Experiment 20001247 PARAMETER Experiment Name: At_Far-red-induction_P Parameter: Tissue Value: Whole Plant
  misc_feature: MA Experiment ID: 20001450 Result: Down-regulated in Transcription
  misc_feature: MA Experiment 20001450 PARAMETER Experiment Name: At_Far-red-induction_P Parameter: Age (day) Value: 7
  misc_feature: MA Experiment 20001450 PARAMETER Experiment Name: At_Far-red-induction_P Parameter: Light Value: Far-red vs. White
  misc_feature: MA Experiment 20001450 PARAMETER Experiment Name: At_Far-red-induction_P Parameter: Organism Value: A. thaliana
  misc_feature: MA Experiment 20001450 PARAMETER Experiment Name: At_Far-red-induction_P Parameter: Plant Line Value: Columbia
  misc_feature: MA Experiment 20001450 PARAMETER Experiment Name: At_Far-red-induction_P Parameter: Timepoint (hr) Value: 8
  misc_feature: MA Experiment 20001450 PARAMETER Experiment Name: At_Far-red-induction_P Parameter: Tissue Value: Whole Plant
  misc_feature: MA Experiment ID: 20001556 Result: Down-regulated in Transcription
  misc_feature: MA Experiment 20001556 PARAMETER Experiment Name: At_Drought_Soil_Dry_P Parameter: Age (day) Value: 26
  misc_feature: MA Experiment 20001556 PARAMETER Experiment Name: At_Drought_Soil_Dry_P Parameter: Organism Value: A. thaliana
  misc_feature: MA Experiment 20001556 PARAMETER Experiment Name: At_Drought_Soil_Dry_P Parameter: Plant Line Value: WS
  misc_feature: MA Experiment 20001556 PARAMETER Experiment Name: At_Drought_Soil_Dry_P Parameter: Post Timepoint (hr) Value: None
  misc_feature: MA Experiment 20001556 PARAMETER Experiment Name: At_Drought_Soil_Dry_P Parameter: Post-Treatment Value: None
  misc_feature: MA Experiment 20001556 PARAMETER Experiment Name: At_Drought_Soil_Dry_P Parameter: Timepoint (day) Value: 12
  misc_feature: MA Experiment 20001556 PARAMETER Experiment Name: At_Drought_Soil_Dry_P Parameter: Treatment Value: Drought vs. No Drought
  misc_feature: MA Experiment ID: 20001559 Result: Down-regulated in Transcription
  misc_feature: MA Experiment 20001559 PARAMETER Experiment Name: At_Drought_Soil_Dry_P Parameter: Age (day) Value: 28
  misc_feature: MA Experiment 20001559 PARAMETER Experiment Name: At_Drought_Soil_Dry_P Parameter: Organism Value: A. thaliana
  misc_feature: MA Experiment 20001559 PARAMETER Experiment Name: At_Drought_Soil_Dry_P Parameter: Plant Line Value: WS
  misc_feature: MA Experiment 20001559 PARAMETER Experiment Name: At_Drought_Soil_Dry_P Parameter: Post Timepoint (hr) Value: 29
  misc_feature: MA Experiment 20001559 PARAMETER Experiment Name: At_Drought_Soil_Dry_P Parameter: Post-Treatment Value: Re-Water vs. No Drought
  misc_feature: MA Experiment 20001559 PARAMETER Experiment Name: At_Drought_Soil_Dry_P Parameter: Timepoint (day) Value: 14
  misc_feature: MA Experiment 20001559 PARAMETER Experiment Name: At_Drought_Soil_Dry_P Parameter: Treatment Value: Drought vs. No Drought
  misc_feature: MA Experiment ID: 20001904 Result: Down-regulated in Transcription
  misc_feature: MA Experiment 20001904 PARAMETER Experiment Name: At_Drought_Reproduction_P Parameter: Age (day) Value: 37
  misc_feature: MA Experiment 20001904 PARAMETER Experiment Name: At_Drought_Reproduction_P Parameter: Organism Value: A. thaliana
  misc_feature: MA Experiment 20001904 PARAMETER Experiment Name: At_Drought_Reproduction_P Parameter: Plant Line Value: WS
  misc_feature: MA Experiment 20001904 PARAMETER Experiment Name: At_Drought_Reproduction_P Parameter: Timepoint (day) Value: 7
  misc_feature: MA Experiment 20001904 PARAMETER Experiment Name: At_Drought_Reproduction_P Parameter: Tissue Value: Rosettes
  misc_feature: MA Experiment 20001904 PARAMETER Experiment Name: At_Drought_Reproduction_P Parameter: Treatment Value: Drought vs. No Drought
  misc_feature: MA Experiment ID: 20001905 Result: Down-regulated in Transcription
  misc_feature: MA Experiment 20001905 PARAMETER Experiment Name: At_Drought_Reproduction_P Parameter: Age (day) Value: 40
  misc_feature: MA Experiment 20001905 PARAMETER Experiment Name: At_Drought_Reproduction_P Parameter: Organism Value: A. thaliana
  misc_feature: MA Experiment 20001905 PARAMETER Experiment Name: At_Drought_Reproduction_P Parameter: Plant Line Value: WS
  misc_feature: MA Experiment 20001905 PARAMETER Experiment Name: At_Drought_Reproduction_P Parameter: Timepoint (day) Value: 10
  misc_feature: MA Experiment 20001905 PARAMETER Experiment Name: At_Drought_Reproduction_P Parameter: Tissue Value: Rosettes
  misc_feature: MA Experiment 20001905 PARAMETER Experiment Name: At_Drought_Reproduction_P Parameter: Treatment Value: Drought vs. No Drought
  misc_feature: MA Experiment ID: 20001906 Result: Down-regulated in Transcription
  misc_feature: MA Experiment 20001906 PARAMETER Experiment Name: At_Drought_Reproduction_P Parameter: Age (day) Value: 35
  misc_feature: MA Experiment 20001906 PARAMETER Experiment Name: At_Drought_Reproduction_P Parameter: Organism Value: A. thaliana
  misc_feature: MA Experiment 20001906 PARAMETER Experiment Name: At_Drought_Reproduction_P Parameter: Plant Line Value: WS
  misc_feature: MA Experiment 20001906 PARAMETER Experiment Name: At_Drought_Reproduction_P Parameter: Timepoint (day) Value: 5
  misc_feature: MA Experiment 20001906 PARAMETER Experiment Name: At_Drought_Reproduction_P Parameter: Tissue Value: Siliques
  misc_feature: MA Experiment 20001906 PARAMETER Experiment Name: At_Drought_Reproduction_P Parameter: Treatment Value: Drought vs. No Drought
atctctctaagcttcttcttctaccaatctaattcctctcttcagcttcttgtgttgtgacgcatactcgtcgcagtcttgagatatggccgccgcagtttccaccgtcggtgccatcaacagagctccgttgagcttgaacgggtcaggatcaggagctgtatcagccccagcttcaaccttcttgggaaagaaagttgtaactgtgtcgagattcgcacagagcaacaagaagagcaacggatcattcaaggtgttggctgtgaaagaagacaaacaaaccgatggagacagatggagaggtcttgcctacgacacttctgatgatcaacaagacatcaccagaggcaagggtatggttgactctgtcttccaagctcctatgggaaccggaactcaccacgctgtccttagctcatacgaatacgttagccaaggccttaggcagtacaacttggacaacatgatggatgggttttacattgctcctgctttcatggacaagcttgttgttcacatcaccaagaacttcttgactctgcctaacatcaaggttccacttattttgggtatatggggaggcaaaggtcaaggtaaatccttccagtgtgagcttgtcatggccaagatgggtatcaacccaatcatgatgagtgctggagagcttgagagtggaaacgcaggagaacccgcaaagcttatccgtcagaggtaccgtgaggcagctgacttgatcaagaagggaaagatgtgttgtctcttcatcaacgatcttgacgctggtgcgggtcgtatgggtggtactactcagtacactgtcaacaaccagatggttaacgcaacactcatgaacattgctgataacccaaccaacgtccagctcccaggaatgtacaacaaggaagagaacgcacgtgtccccatcatttgcactggtaacgatttctccaccctatacgctcctctcatccgtgatggacgtatggagaagttctactgggccccgacccgtgaagaccgtatcggtgtctgcaagggtatcttcagaactgacaagatcaaggacgaagacattgtcacacttgttgatcagttccctggtcaatctatcgatttcttcggtgctttgagggcgagagtgtacgatgatgaagtgaggaagttcgttgagagccttggagttgagaagatcggaaagaggctggttaactcaagggaaggacctcccgtgttcgagcaacccgagatgacttatgagaagcttatggaatacggaaacatgcttgtgatggaacaagagaatgtcaagagagtccaacttgccgagacctacctcagccaggctgctttgggagacgcaaacgctgacgccatcggccgcggaactttctacggtaaaacagaggaaaaggagcccagcaagtaaacctgccagttcctgaagggtgtactgatcctgtggctgaaaactttgatccaacggctagaagtgacgatggaacctgtgtctacaacttttgagcaatattatcctgcttattaatttgctgttttactcctattgtctcttttggtttatttttctcctttgtgtaattgtggattggatcttgtcctcttttgttccctttttttttttttatgatgtacaacacattggtaatttaaaattgccttgtcataaactacacttcttattcc

SEQ ID NO: 47854 - protein, 446 aa, Arabidopsis thaliana
  peptide (1)..(446): Ceres Seq. ID no. 12562852
  misc_feature (160)..(358): Pfam Name: ATPase family associated with various cellular Pfam Description: ATPase family associated with various cellular
  misc_feature (160)..(358): Pfam Name: ATPase family associated with various cellular Pfam Description: ATPase family associated with various cellular
  misc_feature (23)..(438): Homolog of NCBI NO: 32481061 NR Description: Rubisco activase alpha form precursor
  misc_feature (44)..(442): Homolog of NCBI NO: 12620883 NR Description: ribulose-1,5-bisphosphate carboxylase/oxygenase
  misc_feature (23)..(438): Homolog of NCBI NO: 8918359 NR Description: RuBisCO activase large isoform precursor
  misc_feature (1)..(437): Homolog of NCBI NO: 32481065 NR Description: Rubisco activase alpha form precursor [Larrea
  misc_feature (1)..(440): Homolog of NCBI NO: 30687999 NR Description: auxin-regulated protein [Arabidopsis thaliana]
  misc_feature (23)..(438): Homolog of NCBI NO: 32481061 NR Description: Rubisco activase alpha form precursor
  misc_feature (23)..(438): Homolog of NCBI NO: 8918359 NR Description: RuBisCO activase large isoform precursor
  misc_feature (1)..(440): Homolog of NCBI NO: 30687999 NR Description: auxin-regulated protein [Arabidopsis thaliana]
  misc_feature (1)..(438): Homolog of NCBI NO: 18405145 NR Description: auxin-regulated protein
  misc_feature (1)..(438): Homolog of NCBI NO: 15450379 NR Description: At2g39730/T5I7.3 [Arabidopsis thaliana]
  misc_feature (1)..(438): Homolog of NCBI NO: 23308421 NR Description: At2g39730/T5I7.3 [Arabidopsis thaliana]
  misc_feature (1)..(438): Homolog of NCBI NO: 81660 NR Description: ribulose-bisphosphate carboxylase activase (EC
  misc_feature (1)..(446): Homolog of NCBI NO: 30687995 NR Description: auxin-regulated protein [Arabidopsis thaliana]
  misc_feature (1)..(437): Homolog of NCBI NO: 32481065 NR Description: Rubisco activase alpha form precursor [Larrea
  misc_feature (44)..(442): Homolog of NCBI NO: 12620883 NR Description: ribulose-1,5-bisphosphate carboxylase/oxygenase
  misc_feature (1)..(446): Homolog of NCBI NO: 30687995 NR Description: auxin-regulated protein [Arabidopsis thaliana]
  misc_feature (1)..(438): Homolog of NCBI NO: 81660 NR Description: ribulose-bisphosphate carboxylase activase (EC
  misc_feature (1)..(438): Homolog of NCBI NO: 23308421 NR Description: At2g39730/T5I7.3 [Arabidopsis thaliana]
  misc_feature (1)..(438): Homolog of NCBI NO: 15450379 NR Description: At2g39730/T5I7.3 [Arabidopsis thaliana]
  misc_feature (1)..(438): Homolog of NCBI NO: 18405145 NR Description: auxin-regulated protein
MAAAVSTVGAINRAPLSLNGSGSGAVSAPASTFLGKKVVTVSRFAQSNKKSNGSFKVLAVKEDKQTDGDRWRGLAYDTSDDQQDITRGKGMVDSVFQAPMGTGTHHAVLSSYEYVSQGLRQYNLDNMMDGFYIAPAFMDKLVVHITKNFLTLPNIKVPLILGIWGGKGQGKSFQCELVMAKMGINPIMMSAGELESGNAGEPAKLIRQRYREAADLIKKGKMCCLFINDLDAGAGRMGGTTQYTVNNQMVNATLMNIADNPTNVQLPGMYNKEENARVPIICTGNDFSTLYAPLIRDGRMEKFYWAPTREDRIGVCKGIFRTDKIKDEDIVTLVDQFPGQSIDFFGALRARVYDDEVRKFVESLGVEKIGKRLVNSREGPPVFEQPEMTYEKLMEYGNMLVMEQENVKRVQLAETYLSQAALGDANADAIGRGTFYGKTEEKEPSK

SEQ ID NO: 47855 - protein, 356 aa, Arabidopsis thaliana
  peptide (1)..(356): Ceres Seq. ID no. 12562853
  misc_feature (70)..(268): Pfam Name: ATPase family associated with various cellular Pfam Description: ATPase family associated with various cellular
  misc_feature (70)..(268): Pfam Name: ATPase family associated with various cellular Pfam Description: ATPase family associated with various cellular
  misc_feature (1)..(348): Homolog of NCBI NO: 32481061 NR Description: Rubisco activase alpha form precursor
  misc_feature (1)..(352): Homolog of NCBI NO: 12620883 NR Description: ribulose-1,5-bisphosphate carboxylase/oxygenase
  misc_feature (1)..(348): Homolog of NCBI NO: 8918359 NR Description: RuBisCO activase large isoform precursor
  misc_feature (1)..(347): Homolog of NCBI NO: 32481065 NR Description: Rubisco activase alpha form precursor [Larrea
  misc_feature (1)..(350): Homolog of NCBI NO: 30687999 NR Description: auxin-regulated protein [Arabidopsis thaliana]
  misc_feature (1)..(348): Homolog of NCBI NO: 32481061 NR Description: Rubisco activase alpha form precursor
  misc_feature (1)..(348): Homolog of NCBI NO: 8918359 NR Description: RuBisCO activase large isoform precursor
  misc_feature (1)..(350): Homolog of NCBI NO: 30687999 NR Description: auxin-regulated protein [Arabidopsis thaliana]
  misc_feature (1)..(348): Homolog of NCBI NO: 18405145 NR Description: auxin-regulated protein
  misc_feature (1)..(348): Homolog of NCBI NO: 15450379 NR Description: At2g39730/T5I7.3 [Arabidopsis thaliana]
  misc_feature (1)..(348): Homolog of NCBI NO: 23308421 NR Description: At2g39730/T5I7.3 [Arabidopsis thaliana]
  misc_feature (1)..(348): Homolog of NCBI NO: 81660 NR Description: ribulose-bisphosphate carboxylase activase (EC
  misc_feature (1)..(356): Homolog of NCBI NO: 30687995 NR Description: auxin-regulated protein [Arabidopsis thaliana]
  misc_feature (1)..(347): Homolog of NCBI NO: 32481065 NR Description: Rubisco activase alpha form precursor [Larrea
  misc_feature (1)..(352): Homolog of NCBI NO: 12620883 NR Description: ribulose-1,5-bisphosphate carboxylase/oxygenase
  misc_feature (1)..(356): Homolog of NCBI NO: 30687995 NR Description: auxin-regulated protein [Arabidopsis thaliana]
  misc_feature (1)..(348): Homolog of NCBI NO: 81660 NR Description: ribulose-bisphosphate carboxylase activase (EC
  misc_feature (1)..(348): Homolog of NCBI NO: 23308421 NR Description: At2g39730/T5I7.3 [Arabidopsis thaliana]
  misc_feature (1)..(348): Homolog of NCBI NO: 15450379 NR Description: At2g39730/T5I7.3 [Arabidopsis thaliana]
  misc_feature (1)..(348): Homolog of NCBI NO: 18405145 NR Description: auxin-regulated protein
MVDSVFQAPMGTGTHHAVLSSYEYVSQGLRQYNLDNMMDGFYIAPAFMDKLVVHITKNFLTLPNIKVPLILGIWGGKGQGKSFQCELVMAKMGINPIMMSAGELESGNAGEPAKLIRQRYREAADLIKKGKMCCLFINDLDAGAGRMGGTTQYTVNNQMVNATLMNIADNPTNVQLPGMYNKEENARVPIICTGNDFSTLYAPLIRDGRMEKFYWAPTREDRIGVCKGIFRTDKIKDEDIVTLVDQFPGQSIDFFGALRARVYDDEVRKFVESLGVEKIGKRLVNSREGPPVFEQPEMTYEKLMEYGNMLVMEQENVKRVQLAETYLSQAALGDANADAIGRGTFYGKTEEKEPSK

SEQ ID NO: 47856 - protein, 347 aa, Arabidopsis thaliana
  peptide (1)..(347): Ceres Seq. ID no. 12562854
  misc_feature (61)..(259): Pfam Name: ATPase family associated with various cellular Pfam Description: ATPase family associated with various cellular
  misc_feature (61)..(259): Pfam Name: ATPase family associated with various cellular Pfam Description: ATPase family associated with various cellular
  misc_feature (1)..(339): Homolog of NCBI NO: 32481061 NR Description: Rubisco activase alpha form precursor
  misc_feature (1)..(343): Homolog of NCBI NO: 12620883 NR Description: ribulose-1,5-bisphosphate carboxylase/oxygenase
  misc_feature (1)..(339): Homolog of NCBI NO: 8918359 NR Description: RuBisCO activase large isoform precursor
  misc_feature (1)..(338): Homolog of NCBI NO: 32481065 NR Description: Rubisco activase alpha form precursor [Larrea
  misc_feature (1)..(341): Homolog of NCBI NO: 30687999 NR Description: auxin-regulated protein [Arabidopsis thaliana]
  misc_feature (1)..(339): Homolog of NCBI NO: 32481061 NR Description: Rubisco activase alpha form precursor
  misc_feature (1)..(339): Homolog of NCBI NO: 8918359 NR Description: RuBisCO activase large isoform precursor
  misc_feature (1)..(341): Homolog of NCBI NO: 30687999 NR Description: auxin-regulated protein [Arabidopsis thaliana]
  misc_feature (1)..(339): Homolog of NCBI NO: 18405145 NR Description: auxin-regulated protein
  misc_feature (1)..(339): Homolog of NCBI NO: 15450379 NR Description: At2g39730/T5I7.3 [Arabidopsis thaliana]
  misc_feature (1)..(339): Homolog of NCBI NO: 23308421 NR Description: At2g39730/T5I7.3 [Arabidopsis thaliana]
  misc_feature (1)..(339): Homolog of NCBI NO: 81660 NR Description: ribulose-bisphosphate carboxylase activase (EC
  misc_feature (1)..(347): Homolog of NCBI NO: 30687995 NR Description: auxin-regulated protein [Arabidopsis thaliana]
  misc_feature (1)..(338): Homolog of NCBI NO: 32481065 NR Description: Rubisco activase alpha form precursor [Larrea
  misc_feature (1)..(343): Homolog of NCBI NO: 12620883 NR Description: ribulose-1,5-bisphosphate carboxylase/oxygenase
  misc_feature (1)..(347): Homolog of NCBI NO: 30687995 NR Description: auxin-regulated protein [Arabidopsis thaliana]
  misc_feature (1)..(339): Homolog of NCBI NO: 81660 NR Description: ribulose-bisphosphate carboxylase activase (EC
  misc_feature (1)..(339): Homolog of NCBI NO: 23308421 NR Description: At2g39730/T5I7.3 [Arabidopsis thaliana]
  misc_feature (1)..(339): Homolog of NCBI NO: 15450379 NR Description: At2g39730/T5I7.3 [Arabidopsis thaliana]
  misc_feature (1)..(339): Homolog of NCBI NO: 18405145 NR Description: auxin-regulated protein
MGTGTHHAVLSSYEYVSQGLRQYNLDNMMDGFYIAPAFMDKLVVHITKNFLTLPNIKVPLILGIWGGKGQGKSFQCELVMAKMGINPIMMSAGELESGNAGEPAKLIRQRYREAADLIKKGKMCCLFINDLDAGAGRMGGTTQYTVNNQMVNATLMNIADNPTNVQLPGMYNKEENARVPIICTGNDFSTLYAPLIRDGRMEKFYWAPTREDRIGVCKGIFRTDKIKDEDIVTLVDQFPGQSIDFFGALRARVYDDEVRKFVESLGVEKIGKRLVNSREGPPVFEQPEMTYEKLMEYGNMLVMEQENVKRVQLAETYLSQAALGDANADAIGRGTFYGKTEEKEPSK

SEQ ID NO: 47857 - DNA, 1117 bp, Arabidopsis thaliana; identical to SEQ ID NO: 46816
  misc_feature (1)..(1117): Ceres Seq. ID no. 12601085
  misc_feature: MA Experiment ID: 20000173 Result: Up-regulated in Transcription
  misc_feature: MA Experiment 20000173 PARAMETER Experiment Name: At_42deg_Heat_P Parameter: Age (day) Value: 14
  misc_feature: MA Experiment 20000173 PARAMETER Experiment Name: At_42deg_Heat_P Parameter: Organism Value: A. thaliana
  misc_feature: MA Experiment 20000173 PARAMETER Experiment Name: At_42deg_Heat_P Parameter: Plant Line Value: WS
  misc_feature: MA Experiment 20000173 PARAMETER Experiment Name: At_42deg_Heat_P Parameter: Temperature (deg C) Value: 42 vs. 22
  misc_feature: MA Experiment 20000173 PARAMETER Experiment Name: At_42deg_Heat_P Parameter: Timepoint (hr) Value: 6
  misc_feature: MA Experiment 20000173 PARAMETER Experiment Name: At_42deg_Heat_P Parameter: Tissue Value: Aerial
  misc_feature: MA Experiment ID: 20000180 Result: Up-regulated in Transcription
  misc_feature: MA Experiment 20000180 PARAMETER Experiment Name: At_Germinating_Seeds_P Parameter: Age (hr) Value: 24 vs. 0
  misc_feature: MA Experiment 20000180 PARAMETER Experiment Name: At_Germinating_Seeds_P Parameter: Tissue Value: Germinating Seeds
  misc_feature: MA Experiment ID: 20000184 Result: Up-regulated in Transcription
  misc_feature: MA Experiment 20000184 PARAMETER Experiment Name: At_Shoots__P Parameter: Age (day) Value: 7
  misc_feature: MA Experiment 20000184 PARAMETER Experiment Name: At_Shoots__P Parameter: Tissue Value: Shoots vs. Whole Plant
  misc_feature: MA Experiment ID: 20000185 Result: Down-regulated in Transcription
  misc_feature: MA Experiment 20000185 PARAMETER Experiment Name: At_Roots__P Parameter: Age (day) Value: 7 vs. 21
  misc_feature: MA Experiment 20000185 PARAMETER Experiment Name: At_Roots__P Parameter: Organism Value: A. thaliana
  misc_feature: MA Experiment 20000185 PARAMETER Experiment Name: At_Roots__P Parameter: Tissue Value: Roots vs. Whole Plant
  misc_feature: MA Experiment ID: 20000264 Result: Down-regulated in Transcription
  misc_feature: MA Experiment 20000264 PARAMETER Experiment Name: At_Open_Flower_P Parameter: Age (day) Value: 21
  misc_feature: MA Experiment 20000264 PARAMETER Experiment Name: At_Open_Flower_P Parameter: Plant Line Value: WS
  misc_feature: MA Experiment 20000264 PARAMETER Experiment Name: At_Open_Flower_P Parameter: Tissue Value: Open Flower vs. Whole Plant
  misc_feature: MA Experiment ID: 20000265 Result: Down-regulated in Transcription
  misc_feature: MA Experiment 20000265 PARAMETER Experiment Name: At_Open_Flower_P Parameter: Age (day) Value: 21
  misc_feature: MA Experiment 20000265 PARAMETER Experiment Name: At_Open_Flower_P Parameter: Plant Line Value: WS
  misc_feature: MA Experiment 20000265 PARAMETER Experiment Name: At_Open_Flower_P Parameter: Tissue Value: Closed Flower vs. Whole Plant
  misc_feature: MA Experiment ID: 20000286 Result: Down-regulated in Transcription
  misc_feature: MA Experiment 20000286 PARAMETER Experiment Name: At_Open_Flower_P Parameter: Age (day) Value: 21
  misc_feature: MA Experiment 20000286 PARAMETER Experiment Name: At_Open_Flower_P Parameter: Plant Line Value: WS
  misc_feature: MA Experiment 20000286 PARAMETER Experiment Name: At_Open_Flower_P Parameter: Tissue Value: Half Open vs. Whole Plant
  misc_feature: MA Experiment ID: 20000436 Result: Down-regulated in Transcription
  misc_feature: MA Experiment 20000436 PARAMETER Experiment Name: At_Drought_P Parameter: Age (day) Value: 7
  misc_feature: MA Experiment 20000436 PARAMETER Experiment Name: At_Drought_P Parameter: Organism Value: A. thaliana
  misc_feature: MA Experiment 20000436 PARAMETER Experiment Name: At_Drought_P Parameter: Plant Line Value: WS
  misc_feature: MA Experiment 20000436 PARAMETER Experiment Name: At_Drought_P Parameter: Timepoint (hr) Value: 12
  misc_feature: MA Experiment 20000436 PARAMETER Experiment Name: At_Drought_P Parameter: Tissue Value: Whole Plant
  misc_feature: MA Experiment 20000436 PARAMETER Experiment Name: At_Drought_P Parameter: Treatment Value: Drought vs. No Drought
  misc_feature: MA Experiment ID: 20000437 Result: Down-regulated in Transcription
  misc_feature: MA Experiment 20000437 PARAMETER Experiment Name: At_Drought_P Parameter: Age (day) Value: 8
  misc_feature: MA Experiment 20000437 PARAMETER Experiment Name: At_Drought_P Parameter: Organism Value: A. thaliana
  misc_feature: MA Experiment 20000437 PARAMETER Experiment Name: At_Drought_P Parameter: Plant Line Value: WS
  misc_feature: MA Experiment 20000437 PARAMETER Experiment Name: At_Drought_P Parameter: Timepoint (hr) Value: 24
  misc_feature: MA Experiment 20000437 PARAMETER Experiment Name: At_Drought_P Parameter: Tissue Value: Whole Plant
  misc_feature: MA Experiment 20000437 PARAMETER Experiment Name: At_Drought_P Parameter: Treatment Value: Drought vs. No Drought
  misc_feature: MA Experiment ID: 20000438 Result: Up-regulated in Transcription
  misc_feature: MA Experiment 20000438 PARAMETER Experiment Name: At_Shoots__P Parameter: Age (day) Value: 14
  misc_feature: MA Experiment 20000438 PARAMETER Experiment Name: At_Shoots__P Parameter: Tissue Value: Shoots vs. Whole Plant
  misc_feature: MA Experiment ID: 20000439 Result: Down-regulated in Transcription
  misc_feature: MA Experiment 20000439 PARAMETER Experiment Name: At_Roots__P Parameter: Age (day) Value: 14 vs. 21
  misc_feature: MA Experiment 20000439 PARAMETER Experiment Name: At_Roots__P Parameter: Organism Value: A. thaliana
  misc_feature: MA Experiment 20000439 PARAMETER Experiment Name: At_Roots__P Parameter: Tissue Value: Roots vs. Whole Plant
  misc_feature: MA Experiment ID: 20000527 Result: Up-regulated in Transcription
  misc_feature: MA Experiment 20000527 PARAMETER Experiment Name: At_10percent_PEG_P Parameter: Age (day) Value: 20
  misc_feature: MA Experiment 20000527 PARAMETER Experiment Name: At_10percent_PEG_P Parameter: Organism Value: A. thaliana
  misc_feature: MA Experiment 20000527 PARAMETER Experiment Name: At_10percent_PEG_P Parameter: Plant Line Value: WS
  misc_feature: MA Experiment 20000527 PARAMETER Experiment Name: At_10percent_PEG_P Parameter: Timepoint (day) Value: 20
  misc_feature: MA Experiment 20000527 PARAMETER Experiment Name: At_10percent_PEG_P Parameter: Tissue Value: Whole Plant
  misc_feature: MA Experiment 20000527 PARAMETER Experiment Name: At_10percent_PEG_P Parameter: Treatment Value: 10percent PEG vs. No Treatment
  misc_feature: MA Experiment ID: 20000709 Result: Up-regulated in Transcription
  misc_feature: MA Experiment 20000709 PARAMETER Experiment Name: At_15mM_NH4NO3_L-to-H_P Parameter: Age (hr) Value: 14
  misc_feature: MA Experiment 20000709 PARAMETER Experiment Name: At_15mM_NH4NO3_L-to-H_P Parameter: Organism Value: A. thaliana
  misc_feature: MA Experiment 20000709 PARAMETER Experiment Name: At_15mM_NH4NO3_L-to-H_P Parameter: Plant Line Value: WS
  misc_feature: MA Experiment 20000709 PARAMETER Experiment Name: At_15mM_NH4NO3_L-to-H_P Parameter: Timepoint (hr) Value: 4
  misc_feature: MA Experiment 20000709 PARAMETER Experiment Name: At_15mM_NH4NO3_L-to-H_P Parameter: Tissue Value: Aerial
  misc_feature: MA Experiment 20000709 PARAMETER Experiment Name: At_15mM_NH4NO3_L-to-H_P Parameter: Treatment Value: 15mM NH4NO3 vs. 30mM Mannitol
  misc_feature: MA Experiment ID: 20000794 Result: Down-regulated in Transcription
  misc_feature: MA Experiment 20000794 PARAMETER Experiment Name: At_Petals_P Parameter: Age (day) Value: 23-25 days
  misc_feature: MA Experiment 20000794 PARAMETER Experiment Name: At_Petals_P Parameter: Plant Line Value: WS
  misc_feature: MA Experiment 20000794 PARAMETER Experiment Name: At_Petals_P Parameter: Tissue Value: Petals vs. Whole plant
  misc_feature: MA Experiment ID: 20001557 Result: Down-regulated in Transcription
  misc_feature: MA Experiment 20001557 PARAMETER Experiment Name: At_Drought_Soil_Dry_P Parameter: Age (day) Value: 27
  misc_feature: MA Experiment 20001557 PARAMETER Experiment Name: At_Drought_Soil_Dry_P Parameter: Organism Value: A. thaliana
  misc_feature: MA Experiment 20001557 PARAMETER Experiment Name: At_Drought_Soil_Dry_P Parameter: Plant Line Value: WS
  misc_feature: MA Experiment 20001557 PARAMETER Experiment Name: At_Drought_Soil_Dry_P Parameter: Post Timepoint (hr) Value: 3
  misc_feature: MA Experiment 20001557 PARAMETER Experiment Name: At_Drought_Soil_Dry_P Parameter: Post-Treatment Value: Re-Water vs. No Drought
  misc_feature: MA Experiment 20001557 PARAMETER Experiment Name: At_Drought_Soil_Dry_P Parameter: Timepoint (day) Value: 13
  misc_feature: MA Experiment 20001557 PARAMETER Experiment Name: At_Drought_Soil_Dry_P Parameter: Treatment Value: Drought vs. No Drought
  misc_feature: MA Experiment ID: 20001559 Result: Down-regulated in Transcription
  misc_feature: MA Experiment 20001559 PARAMETER Experiment Name: At_Drought_Soil_Dry_P Parameter: Age (day) Value: 28
  misc_feature: MA Experiment 20001559 PARAMETER Experiment Name: At_Drought_Soil_Dry_P Parameter: Organism Value: A. thaliana
  misc_feature: MA Experiment 20001559 PARAMETER Experiment Name: At_Drought_Soil_Dry_P Parameter: Plant Line Value: WS
  misc_feature: MA Experiment 20001559 PARAMETER Experiment Name: At_Drought_Soil_Dry_P Parameter: Post Timepoint (hr) Value: 29
  misc_feature: MA Experiment 20001559 PARAMETER Experiment Name: At_Drought_Soil_Dry_P Parameter: Post-Treatment Value: Re-Water vs. No Drought
  misc_feature: MA Experiment 20001559 PARAMETER Experiment Name: At_Drought_Soil_Dry_P Parameter: Timepoint (day) Value: 14
  misc_feature: MA Experiment 20001559 PARAMETER Experiment Name: At_Drought_Soil_Dry_P Parameter: Treatment Value: Drought vs. No Drought
  misc_feature: MA Experiment ID: 20001757 Result: Up-regulated in Transcription
  misc_feature: MA Experiment 20001757 PARAMETER Experiment Name: At_50mM_NH4NO3_L-to-H_P Parameter: Timepoint (hr) Value: 6
  misc_feature: MA Experiment 20001757 PARAMETER Experiment Name: At_50mM_NH4NO3_L-to-H_P Parameter: Tissue Value: Leaf
  misc_feature: MA Experiment 20001757 PARAMETER Experiment Name: At_50mM_NH4NO3_L-to-H_P Parameter: Treatment Value: 50mM NH4NO3 vs 100mM Mannitol
  misc_feature: MA Experiment ID: 20001904 Result: Down-regulated in Transcription
  misc_feature: MA Experiment 20001904 PARAMETER Experiment Name: At_Drought_Reproduction_P Parameter: Age (day) Value: 37
  misc_feature: MA Experiment 20001904 PARAMETER Experiment Name: At_Drought_Reproduction_P Parameter: Organism Value: A. thaliana
  misc_feature: MA Experiment 20001904 PARAMETER Experiment Name: At_Drought_Reproduction_P Parameter: Plant Line Value: WS
  misc_feature: MA Experiment 20001904 PARAMETER Experiment Name: At_Drought_Reproduction_P Parameter: Timepoint (day) Value: 7
  misc_feature: MA Experiment 20001904 PARAMETER Experiment Name: At_Drought_Reproduction_P Parameter: Tissue Value: Rosettes
  misc_feature: MA Experiment 20001904 PARAMETER Experiment Name: At_Drought_Reproduction_P Parameter: Treatment Value: Drought vs. No Drought
  misc_feature: MA Experiment ID: 20001905 Result: Down-regulated in Transcription
  misc_feature: MA Experiment 20001905 PARAMETER Experiment Name: At_Drought_Reproduction_P Parameter: Age (day) Value: 40
  misc_feature: MA Experiment 20001905 PARAMETER Experiment Name: At_Drought_Reproduction_P Parameter: Organism Value: A. thaliana
  misc_feature: MA Experiment 20001905 PARAMETER Experiment Name: At_Drought_Reproduction_P Parameter: Plant Line Value: WS
  misc_feature: MA Experiment 20001905 PARAMETER Experiment Name: At_Drought_Reproduction_P Parameter: Timepoint (day) Value: 10
  misc_feature: MA Experiment 20001905 PARAMETER Experiment Name: At_Drought_Reproduction_P Parameter: Tissue Value: Rosettes
  misc_feature: MA Experiment 20001905 PARAMETER Experiment Name: At_Drought_Reproduction_P Parameter: Treatment Value: Drought vs. No Drought
  misc_feature: MA Experiment ID: 20001906 Result: Down-regulated in Transcription
  misc_feature: MA Experiment 20001906 PARAMETER Experiment Name: At_Drought_Reproduction_P Parameter: Age (day) Value: 35
  misc_feature: MA Experiment 20001906 PARAMETER Experiment Name: At_Drought_Reproduction_P Parameter: Organism Value: A. thaliana
  misc_feature: MA Experiment 20001906 PARAMETER Experiment Name: At_Drought_Reproduction_P Parameter: Plant Line Value: WS
  misc_feature: MA Experiment 20001906 PARAMETER Experiment Name: At_Drought_Reproduction_P Parameter: Timepoint (day) Value: 5
  misc_feature: MA Experiment 20001906 PARAMETER Experiment Name: At_Drought_Reproduction_P Parameter: Tissue Value: Siliques
  misc_feature: MA Experiment 20001906 PARAMETER Experiment Name: At_Drought_Reproduction_P Parameter: Treatment Value: Drought vs. No Drought
  misc_feature: MA Experiment ID: 20001908 Result: Down-regulated in Transcription
  misc_feature: MA Experiment 20001908 PARAMETER Experiment Name: At_Drought_Reproduction_P Parameter: Age (day) Value: 40
  misc_feature: MA Experiment 20001908 PARAMETER Experiment Name: At_Drought_Reproduction_P Parameter: Organism Value: A. thaliana
  misc_feature: MA Experiment 20001908 PARAMETER Experiment Name: At_Drought_Reproduction_P Parameter: Plant Line Value: WS
  misc_feature: MA Experiment 20001908 PARAMETER Experiment Name: At_Drought_Reproduction_P Parameter: Timepoint (day) Value: 10
  misc_feature: MA Experiment 20001908 PARAMETER Experiment Name: At_Drought_Reproduction_P Parameter: Tissue Value: Siliques
  misc_feature: MA Experiment 20001908 PARAMETER Experiment Name: At_Drought_Reproduction_P Parameter: Treatment Value: Drought vs. No Drought

SEQ ID NO: 47858 - protein, 259 aa, Arabidopsis thaliana; identical to SEQ ID NO: 46817
  peptide (1)..(259): Ceres Seq. ID no. 12601086
  misc_feature (1)..(259): Homolog of NCBI NO: 4754915 NR Description: carbonic anhydrase isoform 2 [Gossypium hirsutum]
  misc_feature (1)..(259): Homolog of NCBI NO: 4754913 NR Description: carbonic anhydrase isoform 1 [Gossypium hirsutum]
  misc_feature (1)..(259): Homolog of NCBI NO: 7436819 NR Description: carbonate dehydratase (EC 4.2.1.1) 1a - Populus
  misc_feature (1)..(259): Homolog of NCBI NO: 7436820 NR Description: carbonate dehydratase (EC 4.2.1.1) 1b - Populus
  misc_feature (1)..(259): Homolog of NCBI NO: 30678353 NR Description: carbonic anhydrase, chloroplast precursor
  misc_feature (1)..(259): Homolog of NCBI NO: 30678350 NR Description: carbonic anhydrase, chloroplast precursor
  misc_feature (1)..(259): Homolog of NCBI NO: 30678347 NR Description: carbonic anhydrase, chloroplast precursor
  misc_feature (1)..(259): Homolog of NCBI NO: 438449 NR Description: carbonic anhydrase
  misc_feature (1)..(259): Homolog of NCBI NO: 21903379 NR Description: Carbonic anhydrase 2 (Carbonate dehydratase 2)
  misc_feature (1)..(259): Homolog of NCBI NO: 30685030 NR Description: CARBONIC ANHYDRASE 2 [Arabidopsis thaliana]
  misc_feature (1)..(259): Homolog of NCBI NO: 4754915 NR Description: carbonic anhydrase isoform 2 [Gossypium hirsutum]
  misc_feature (1)..(259): Homolog of NCBI NO: 4754913 NR Description: carbonic anhydrase isoform 1 [Gossypium hirsutum]
  misc_feature (1)..(259): Homolog of NCBI NO: 7436819 NR Description: carbonate dehydratase (EC 4.2.1.1) 1a - Populus
  misc_feature (1)..(259): Homolog of NCBI NO: 7436820 NR Description: carbonate dehydratase (EC 4.2.1.1) 1b - Populus
  misc_feature (1)..(259): Homolog of NCBI NO: 30678353 NR Description: carbonic anhydrase, chloroplast precursor
  misc_feature (1)..(259): Homolog of NCBI NO: 30678350 NR Description: carbonic anhydrase, chloroplast precursor
  misc_feature (1)..(259): Homolog of NCBI NO: 30678347 NR Description: carbonic anhydrase, chloroplast precursor
  misc_feature (1)..(259): Homolog of NCBI NO: 438449 NR Description: carbonic anhydrase
  misc_feature (1)..(259): Homolog of NCBI NO: 21903379 NR Description: Carbonic anhydrase 2 (Carbonate dehydratase 2)
  misc_feature (1)..(259): Homolog of NCBI NO: 30685030 NR Description: CARBONIC ANHYDRASE 2 [Arabidopsis thaliana]

SEQ ID NO: 47859 - protein, 174 aa, Arabidopsis thaliana; identical to SEQ ID NO: 46818
  peptide (1)..(174): Ceres Seq. ID no. 12601087
  misc_feature (1)..(174): Homolog of NCBI NO: 20502881 NR Description: carbonic anhydrase [Gossypium hirsutum]
  misc_feature (1)..(174): Homolog of NCBI NO: 4754913 NR Description: carbonic anhydrase isoform 1 [Gossypium hirsutum]
  misc_feature (1)..(174): Homolog of NCBI NO: 7436819 NR Description: carbonate dehydratase (EC 4.2.1.1) 1a - Populus
  misc_feature (1)..(174): Homolog of NCBI NO: 7436820 NR Description: carbonate dehydratase (EC 4.2.1.1) 1b - Populus
  misc_feature (1)..(174): Homolog of NCBI NO: 30678350 NR Description: carbonic anhydrase, chloroplast precursor
  misc_feature (1)..(174): Homolog of NCBI NO: 30678353 NR Description: carbonic anhydrase, chloroplast precursor
  misc_feature (1)..(174): Homolog of NCBI NO: 30678347 NR Description: carbonic anhydrase, chloroplast precursor
  misc_feature (1)..(174): Homolog of NCBI NO: 438449 NR Description: carbonic anhydrase
  misc_feature (1)..(174): Homolog of NCBI NO: 21903379 NR Description: Carbonic anhydrase 2 (Carbonate dehydratase 2)
  misc_feature (1)..(174): Homolog of NCBI NO: 30685030 NR Description: CARBONIC ANHYDRASE 2 [Arabidopsis thaliana]
  misc_feature (1)..(174): Homolog of NCBI NO: 20502881 NR Description: carbonic anhydrase [Gossypium hirsutum]
  misc_feature (1)..(174): Homolog of NCBI NO: 4754913 NR Description: carbonic anhydrase isoform 1 [Gossypium hirsutum]
  misc_feature (1)..(174): Homolog of NCBI NO: 7436819 NR Description: carbonate dehydratase (EC 4.2.1.1) 1a - Populus
  misc_feature (1)..(174): Homolog of NCBI NO: 7436820 NR Description: carbonate dehydratase (EC 4.2.1.1) 1b - Populus
  misc_feature (1)..(174): Homolog of NCBI NO: 30678350 NR Description: carbonic anhydrase, chloroplast precursor
  misc_feature (1)..(174): Homolog of NCBI NO: 30678353 NR Description: carbonic anhydrase, chloroplast precursor
  misc_feature (1)..(174): Homolog of NCBI NO: 30678347 NR Description: carbonic anhydrase, chloroplast precursor
  misc_feature (1)..(174): Homolog of NCBI NO: 438449 NR Description: carbonic anhydrase
  misc_feature (1)..(174): Homolog of NCBI NO: 21903379 NR Description: Carbonic anhydrase 2 (Carbonate dehydratase 2)
  misc_feature (1)..(174): Homolog of NCBI NO: 30685030 NR Description: CARBONIC ANHYDRASE 2 [Arabidopsis thaliana]

SEQ ID NO: 47860 - protein, 143 aa, Arabidopsis thaliana; identical to SEQ ID NO: 46819
  peptide (1)..(143): Ceres Seq. ID no. 12601088
  misc_feature (1)..(143): Homolog of NCBI NO: 20502881 NR Description: carbonic anhydrase [Gossypium hirsutum]
  misc_feature (1)..(143): Homolog of NCBI NO: 4754913 NR Description: carbonic anhydrase isoform 1 [Gossypium hirsutum]
  misc_feature (1)..(143): Homolog of NCBI NO: 7436819 NR Description: carbonate dehydratase (EC 4.2.1.1) 1a - Populus
  misc_feature (1)..(143): Homolog of NCBI NO: 7436820 NR Description: carbonate dehydratase (EC 4.2.1.1) 1b - Populus
  misc_feature (1)..(143): Homolog of NCBI NO: 30678350 NR Description: carbonic anhydrase, chloroplast precursor
  misc_feature (1)..(143): Homolog of NCBI NO: 30678353 NR Description: carbonic anhydrase, chloroplast precursor
  misc_feature (1)..(143): Homolog of NCBI NO: 30678347 NR Description: carbonic anhydrase, chloroplast precursor
  misc_feature (1)..(143): Homolog of NCBI NO: 438449 NR Description: carbonic anhydrase
  misc_feature (1)..(143): Homolog of NCBI NO: 21903379 NR Description: Carbonic anhydrase 2 (Carbonate dehydratase 2)
  misc_feature (1)..(143): Homolog of NCBI NO: 30685030 NR Description: CARBONIC ANHYDRASE 2 [Arabidopsis thaliana]
  misc_feature (1)..(143): Homolog of NCBI NO: 20502881 NR Description: carbonic anhydrase [Gossypium hirsutum]
  misc_feature (1)..(143): Homolog of NCBI NO: 4754913 NR Description: carbonic anhydrase isoform 1 [Gossypium hirsutum]
  misc_feature (1)..(143): Homolog of NCBI NO: 7436819 NR Description: carbonate dehydratase (EC 4.2.1.1) 1a - Populus
  misc_feature (1)..(143): Homolog of NCBI NO: 7436820 NR Description: carbonate dehydratase (EC 4.2.1.1) 1b - Populus
  misc_feature (1)..(143): Homolog of NCBI NO: 30678350 NR Description: carbonic anhydrase, chloroplast precursor
  misc_feature (1)..(143): Homolog of NCBI NO: 30678353 NR Description: carbonic anhydrase, chloroplast precursor
  misc_feature (1)..(143): Homolog of NCBI NO: 30678347 NR Description: carbonic anhydrase, chloroplast precursor
  misc_feature (1)..(143): Homolog of NCBI NO: 438449 NR Description: carbonic anhydrase
  misc_feature (1)..(143): Homolog of NCBI NO: 21903379 NR Description: Carbonic anhydrase 2 (Carbonate dehydratase 2)
  misc_feature (1)..(143): Homolog of NCBI NO: 30685030 NR Description: CARBONIC ANHYDRASE 2 [Arabidopsis thaliana]

SEQ ID NO: 47861 - DNA, 1027 bp, Arabidopsis thaliana
  misc_feature (1)..(1027): Ceres Seq. ID no. 13648227
  misc_feature: MA Experiment ID: 20000179 Result: Up-regulated in Transcription
  misc_feature: MA Experiment 20000179 PARAMETER Experiment Name: At_Germinating_Seeds_P Parameter: Age (hr) Value: 6 vs. 0
  misc_feature: MA Experiment 20000179 PARAMETER Experiment Name: At_Germinating_Seeds_P Parameter: Tissue Value: Germinating Seeds
  misc_feature: MA Experiment ID: 20000180 Result: Up-regulated in Transcription
  misc_feature: MA Experiment 20000180 PARAMETER Experiment Name: At_Germinating_Seeds_P Parameter: Age (hr) Value: 24 vs. 0
  misc_feature: MA Experiment 20000180 PARAMETER Experiment Name: At_Germinating_Seeds_P Parameter: Tissue Value: Germinating Seeds
  misc_feature: MA Experiment ID: 20000184 Result: Down-regulated in Transcription
  misc_feature: MA Experiment 20000184 PARAMETER Experiment Name: At_Shoots__P Parameter: Age (day) Value: 7
  misc_feature: MA Experiment 20000184 PARAMETER Experiment Name: At_Shoots__P Parameter: Tissue Value: Shoots vs. Whole Plant
  misc_feature: MA Experiment ID: 20000227 Result: Up-regulated in Transcription
  misc_feature: MA Experiment 20000227 PARAMETER Experiment Name: At_Root-Tips-vs-Tops_P Parameter: Tissue Value: Root Tips vs. Root Tops
  misc_feature: MA Experiment ID: 20000234 Result: Down-regulated in Transcription
  misc_feature: MA Experiment 20000234 PARAMETER Experiment Name: At_Siliques_P Parameter: Age (day) Value: 21
  misc_feature: MA Experiment 20000234 PARAMETER Experiment Name: At_Siliques_P Parameter: Organism Value: A. thaliana
  misc_feature: MA Experiment 20000234 PARAMETER Experiment Name: At_Siliques_P Parameter: Plant Line Value: WS
  misc_feature: MA Experiment 20000234 PARAMETER Experiment Name: At_Siliques_P Parameter: Tissue Value: Less Than 5mm Siliques vs. Whole Plant
  misc_feature: MA Experiment ID: 20000235 Result: Down-regulated in Transcription
  misc_feature: MA Experiment 20000235 PARAMETER Experiment Name: At_Siliques_P Parameter: Age (day) Value: 21
  misc_feature: MA Experiment 20000235 PARAMETER Experiment Name: At_Siliques_P Parameter: Organism Value: A. thaliana
  misc_feature: MA Experiment 20000235 PARAMETER Experiment Name: At_Siliques_P Parameter: Plant Line Value: WS
  misc_feature: MA Experiment 20000235 PARAMETER Experiment Name: At_Siliques_P Parameter: Tissue Value: 5-10mm Siliques vs. Whole Plant
  misc_feature: MA Experiment ID: 20000264 Result: Down-regulated in Transcription
  misc_feature: MA Experiment 20000264 PARAMETER Experiment Name: At_Open_Flower_P Parameter: Age (day) Value: 21
  misc_feature: MA Experiment 20000264 PARAMETER Experiment Name: At_Open_Flower_P Parameter: Plant Line Value: WS
  misc_feature: MA Experiment 20000264 PARAMETER Experiment Name: At_Open_Flower_P Parameter: Tissue Value: Open Flower vs. Whole Plant
  misc_feature: MA Experiment ID: 20000438 Result: Down-regulated in Transcription
  misc_feature: MA Experiment 20000438 PARAMETER Experiment Name: At_Shoots__P Parameter: Age (day) Value: 14
  misc_feature: MA Experiment 20000438 PARAMETER Experiment Name: At_Shoots__P Parameter: Tissue Value: Shoots vs. Whole Plant
  misc_feature: MA Experiment ID: 20000573 Result: Up-regulated in Transcription
  misc_feature: MA Experiment 20000573 PARAMETER Experiment Name: At_100uM_ABA_Mutants__P Parameter: Organism Value: A. thaliana
  misc_feature: MA Experiment 20000573 PARAMETER Experiment Name: At_100uM_ABA_Mutants__P Parameter: Plant Line Value: CS22 vs. Ler wt
  misc_feature: MA Experiment 20000573 PARAMETER Experiment Name: At_100uM_ABA_Mutants__P Parameter: Timepoint (hr) Value: N/A
  misc_feature: MA Experiment 20000573 PARAMETER Experiment Name: At_100uM_ABA_Mutants__P Parameter: Tissue Value: Whole Plant
  misc_feature: MA Experiment 20000573 PARAMETER Experiment Name: At_100uM_ABA_Mutants__P Parameter: Treatment Value: None
  misc_feature: MA Experiment ID: 20000575 Result: Down-regulated in Transcription
  misc_feature: MA Experiment 20000575 PARAMETER Experiment Name: At_100uM_ABA_Mutants__P Parameter: Organism Value: A. thaliana
  misc_feature: MA Experiment 20000575 PARAMETER Experiment Name: At_100uM_ABA_Mutants__P Parameter: Plant Line Value: CS22
  misc_feature: MA Experiment 20000575 PARAMETER Experiment Name: At_100uM_ABA_Mutants__P Parameter: Timepoint (hr) Value: 6
  misc_feature: MA Experiment 20000575 PARAMETER Experiment Name: At_100uM_ABA_Mutants__P Parameter: Tissue Value: Whole Plant
  misc_feature: MA Experiment 20000575 PARAMETER Experiment Name: At_100uM_ABA_Mutants__P Parameter: Treatment Value: 1uM ABA vs. No Treatment
  misc_feature: MA Experiment ID: 20001247 Result: Up-regulated in Transcription
  misc_feature: MA Experiment 20001247 PARAMETER Experiment Name: At_Far-red-induction_P Parameter: Age (day) Value: 7
  misc_feature: MA Experiment 20001247 PARAMETER Experiment Name: At_Far-red-induction_P Parameter: Light Value: Far-red vs. White
  misc_feature: MA Experiment 20001247 PARAMETER Experiment Name: At_Far-red-induction_P Parameter: Organism Value: A. thaliana
  misc_feature: MA Experiment 20001247 PARAMETER Experiment Name: At_Far-red-induction_P Parameter: Plant Line Value: Columbia
  misc_feature: MA Experiment 20001247 PARAMETER Experiment Name: At_Far-red-induction_P Parameter: Timepoint (hr) Value: 1
  misc_feature: MA Experiment 20001247 PARAMETER Experiment Name: At_Far-red-induction_P Parameter: Tissue Value: Whole Plant
  misc_feature: MA Experiment ID: 20001248 Result: Up-regulated in Transcription
  misc_feature: MA Experiment 20001248 PARAMETER Experiment Name: At_Far-red-induction_P Parameter: Age (day) Value: 7
  misc_feature: MA Experiment 20001248 PARAMETER Experiment Name: At_Far-red-induction_P Parameter: Light Value: Far-red vs. White
  misc_feature: MA Experiment 20001248 PARAMETER Experiment Name: At_Far-red-induction_P Parameter: Organism Value: A. thaliana
  misc_feature: MA Experiment 20001248 PARAMETER Experiment Name: At_Far-red-induction_P Parameter: Plant Line Value: Columbia
  misc_feature: MA Experiment 20001248 PARAMETER Experiment Name: At_Far-red-induction_P Parameter: Timepoint (hr) Value: 4
  misc_feature: MA Experiment 20001248 PARAMETER Experiment Name: At_Far-red-induction_P Parameter: Tissue Value: Whole Plant
  misc_feature: MA Experiment ID: 20001450 Result: Up-regulated in Transcription
  misc_feature: MA Experiment 20001450 PARAMETER Experiment Name: At_Far-red-induction_P Parameter: Age (day) Value: 7
  misc_feature: MA Experiment 20001450 PARAMETER Experiment Name: At_Far-red-induction_P Parameter: Light Value: Far-red vs. White
  misc_feature: MA Experiment 20001450 PARAMETER Experiment Name: At_Far-red-induction_P Parameter: Organism Value: A. thaliana
  misc_feature: MA Experiment 20001450 PARAMETER Experiment Name: At_Far-red-induction_P Parameter: Plant Line Value: Columbia
  misc_feature: MA Experiment 20001450 PARAMETER Experiment Name: At_Far-red-induction_P Parameter: Timepoint (hr) Value: 8
  misc_feature: MA Experiment 20001450 PARAMETER Experiment Name: At_Far-red-induction_P Parameter: Tissue Value: Whole Plant
  misc_feature: MA Experiment ID: 20001451 Result: Up-regulated in Transcription
  misc_feature: MA Experiment 20001451 PARAMETER Experiment Name: At_Far-red-induction_P Parameter: Age (day) Value: 7
  misc_feature: MA Experiment 20001451 PARAMETER Experiment Name: At_Far-red-induction_P Parameter: Light Value: Far-red vs. White
  misc_feature: MA Experiment 20001451 PARAMETER Experiment Name: At_Far-red-induction_P Parameter: Organism Value: A. thaliana
  misc_feature: MA Experiment 20001451 PARAMETER Experiment Name: At_Far-red-induction_P Parameter: Plant Line Value: Columbia
  misc_feature: MA Experiment 20001451 PARAMETER Experiment Name: At_Far-red-induction_P Parameter: Timepoint (hr) Value: 24
  misc_feature: MA Experiment 20001451 PARAMETER Experiment Name: At_Far-red-induction_P Parameter: Tissue Value: Whole Plant
  misc_feature: MA Experiment ID: 20001557 Result: Up-regulated in Transcription
  misc_feature: MA Experiment 20001557 PARAMETER Experiment Name: At_Drought_Soil_Dry_P Parameter: Age (day) Value: 27
  misc_feature: MA Experiment 20001557 PARAMETER Experiment Name: At_Drought_Soil_Dry_P Parameter: Organism Value: A. thaliana
  misc_feature: MA Experiment 20001557 PARAMETER Experiment Name: At_Drought_Soil_Dry_P Parameter: Plant Line Value: WS
  misc_feature: MA Experiment 20001557 PARAMETER Experiment Name: At_Drought_Soil_Dry_P Parameter: Post Timepoint (hr) Value: 3
  misc_feature: MA Experiment 20001557 PARAMETER Experiment Name: At_Drought_Soil_Dry_P Parameter: Post-Treatment Value: Re-Water vs. No Drought
  misc_feature: MA Experiment 20001557 PARAMETER Experiment Name: At_Drought_Soil_Dry_P Parameter: Timepoint (day) Value: 13
  misc_feature: MA Experiment 20001557 PARAMETER Experiment Name: At_Drought_Soil_Dry_P Parameter: Treatment Value: Drought vs. No Drought
  misc_feature: MA Experiment ID: 20001558 Result: Up-regulated in Transcription
  misc_feature: MA Experiment 20001558 PARAMETER Experiment Name: At_Drought_Soil_Dry_P Parameter: Age (day) Value: 27
  misc_feature: MA Experiment 20001558 PARAMETER Experiment Name: At_Drought_Soil_Dry_P Parameter: Organism Value: A. thaliana
  misc_feature: MA Experiment 20001558 PARAMETER Experiment Name: At_Drought_Soil_Dry_P Parameter: Plant Line Value: WS
  misc_feature: MA Experiment 20001558 PARAMETER Experiment Name: At_Drought_Soil_Dry_P Parameter: Post Timepoint (hr) Value: 6
  misc_feature: MA Experiment 20001558 PARAMETER Experiment Name: At_Drought_Soil_Dry_P Parameter: Post-Treatment Value: Re-Water vs. No Drought
  misc_feature: MA Experiment 20001558 PARAMETER Experiment Name: At_Drought_Soil_Dry_P Parameter: Timepoint (day) Value: 13
  misc_feature: MA Experiment 20001558 PARAMETER Experiment Name: At_Drought_Soil_Dry_P Parameter: Treatment Value: Drought vs. No Drought
  misc_feature: MA Experiment ID: 20001904 Result: Down-regulated in Transcription
  misc_feature: MA Experiment 20001904 PARAMETER Experiment Name: At_Drought_Reproduction_P Parameter: Age (day) Value: 37
  misc_feature: MA Experiment 20001904 PARAMETER Experiment Name: At_Drought_Reproduction_P Parameter: Organism Value: A. thaliana
  misc_feature: MA Experiment 20001904 PARAMETER Experiment Name: At_Drought_Reproduction_P Parameter: Plant Line Value: WS
  misc_feature: MA Experiment 20001904 PARAMETER Experiment Name: At_Drought_Reproduction_P Parameter: Timepoint (day) Value: 7
  misc_feature: MA Experiment 20001904 PARAMETER Experiment Name: At_Drought_Reproduction_P Parameter: Tissue Value: Rosettes
  misc_feature: MA Experiment 20001904 PARAMETER Experiment Name: At_Drought_Reproduction_P Parameter: Treatment Value: Drought vs. No Drought
ggagagagtgagaagaagcaattttgttatattcaagaaacaataaaaaataaagttatttttgtaatacagagaggaaagaaaatagaaagatgaagatttggtgtgctgtttgtgataaagaagaagcttcggtgttttgttgtgcggatgaagcagctctttgtaatggttgcgatcgccatgttcatttcgccaataaactagccgggaaacatctccggttctctctcacttctcctactttcaaagatgctcctctttgtgatatttgcggggagaggcgtgcattattattttgccaagaagacagagcaatactatgcagagaatgtgacattccaatacatcaagctaatgagcacactaagaaacacaatagattcctccttaccggcgttaagatctctgcctccccgtcagcctacccaagagcctccaattccaactctgctgctgcatttggtcgagccaaaacccgaccaaaatcagtatcgagcgaggtcccgagctcggcctccaatgaggtatttacgagctcttcttcgacgaccacgagcaattgctattatgggatagaagaaaactaccatcacgtgagcgattcggggtcgggatcgggttgtacaggtagtatatccgagtatttgatggagacattaccgggttggagagtggaggatttgcttgaacacccttcttgtgtctcctatgaggataacattattactaataacaataacagtgagtcttatagggtttatgatggttcttcacaattccatcatcaagggttttgggatcacaaacccttctcttgaacttatttctgtcgaattatagtcttttttttataagttggggtttgtaatcatgaatccaaaccaacttgttgttttcgttttttagtattgttgtttctatatttatctcacattatgattttaaatttattttgtcaaccaatcctcttttaatcttagtttctttttctttgaatttaatttcaggtatttgttgtattgat

SEQ ID NO: 47862 - protein, 242 aa, Arabidopsis thaliana
  peptide (1)..(242): Ceres Seq. ID no. 13648228
  misc_feature (1)..(47): Pfam Name: B-box zinc finger Pfam Description: B-box zinc finger
  misc_feature (1)..(105): Homolog of NCBI NO: 18412037 NR Description: CONSTANS B-box zinc finger family protein
  misc_feature (1)..(105): Homolog of NCBI NO: 17433085 NR Description: Zinc finger protein constans-like 7
  misc_feature (1)..(171): Homolog of NCBI NO: 30679541 NR Description: salt-tolerance protein [Arabidopsis thaliana]
  misc_feature (1)..(171): Homolog of NCBI NO: 15221367 NR Description: salt-tolerance protein [Arabidopsis thaliana]
  misc_feature (1)..(199): Homolog of NCBI NO: 3618312 NR Description: zinc finger protein [Oryza sativa (japonica
  misc_feature (1)..(155): Homolog of NCBI NO: 38344979 NR Description: OSJNBa0011L07.9 [Oryza sativa (japonica
  misc_feature (1)..(200): Homolog of NCBI NO: 15222289 NR Description: CONSTANS B-box zinc finger family protein
  misc_feature (1)..(242): Homolog of NCBI NO: 7485796 NR Description: hypothetical protein F19H22.170 - Arabidopsis
  misc_feature (1)..(242): Homolog of NCBI NO: 26452767 NR Description: putative zinc finger protein [Arabidopsis
  misc_feature (1)..(242): Homolog of NCBI NO: 22329252 NR Description: CONSTANS B-box zinc finger family protein
MKIWCAVCDKEEASVFCCADEAALCNGCDRHVHFANKLAGKHLRFSLTSPTFKDAPLCDICGERRALLFCQEDRAILCRECDIPIHQANEHTKKHNRFLLTGVKISASPSAYPRASNSNSAAAFGRAKTRPKSVSSEVPSSASNEVFTSSSSTTTSNCYYGIEENYHHVSDSGSGSGCTGSISEYLMETLPGWRVEDLLEHPSCVSYEDNIITNNNNSESYRVYDGSSQFHHQGFWDHKPFS

SEQ ID NO: 47863 - DNA, 1445 bp, Arabidopsis thaliana; identical to SEQ ID NO: 45315
  misc_feature (1)..(1445): Ceres Seq. ID no. 13593120
  misc_feature: MA Experiment ID: 20000315 Result: Up-regulated in Transcription
  misc_feature: MA Experiment 20000315 PARAMETER Experiment Name: At_14day_Shoots-Roots_Sub_P Parameter: Age (day) Value: 14
  misc_feature: MA Experiment 20000315 PARAMETER Experiment Name: At_14day_Shoots-Roots_Sub_P Parameter: Organism Value: A. thaliana
  misc_feature: MA Experiment 20000315 PARAMETER Experiment Name: At_14day_Shoots-Roots_Sub_P Parameter: Plant Line Value: WS
  misc_feature: MA Experiment 20000315 PARAMETER Experiment Name: At_14day_Shoots-Roots_Sub_P Parameter: Tissue Value: Shoots vs. Whole Plant
  misc_feature: MA Experiment ID: 20000328 Result: Up-regulated in Transcription
  misc_feature: MA Experiment 20000328 PARAMETER Experiment Name: At_42deg_Heat_Sub_P Parameter: Age (day) Value: 14
  misc_feature: MA Experiment 20000328 PARAMETER Experiment Name: At_42deg_Heat_Sub_P Parameter: Organism Value: A. thaliana
  misc_feature: MA Experiment 20000328 PARAMETER Experiment Name: At_42deg_Heat_Sub_P Parameter: Plant Line Value: WS
  misc_feature: MA Experiment 20000328 PARAMETER Experiment Name: At_42deg_Heat_Sub_P Parameter: Temperature (deg C) Value: 42 vs. 22
  misc_feature: MA Experiment 20000328 PARAMETER Experiment Name: At_42deg_Heat_Sub_P Parameter: Timepoint (hr) Value: 6
  misc_feature: MA Experiment 20000328 PARAMETER Experiment Name: At_42deg_Heat_Sub_P Parameter: Tissue Value: Aerial

SEQ ID NO: 47864 - protein, 470 aa, Arabidopsis thaliana; identical to SEQ ID NO: 40875
  peptide (1)..(470): Ceres Seq. ID no. 15221202
  misc_feature (26)..(248): Pfam Name: Elongation factor Tu GTP binding domain Pfam Description: Elongation factor Tu GTP binding domain
  misc_feature (26)..(248): Pfam Name: Elongation factor Tu GTP binding domain Pfam Description: Elongation factor Tu GTP binding domain
  misc_feature (22)..(470): Homolog of NCBI NO: 15081765 NR Description: At1g07930/T6D22_3 [Arabidopsis thaliana]
  misc_feature (22)..(470): Homolog of NCBI NO: 17064954 NR Description: putative elongation factor 1-a [Arabidopsis
  misc_feature (22)..(468): Homolog of NCBI NO: 25407012 NR Description: protein T6D22.2 [imported] - Arabidopsis thaliana
  misc_feature (22)..(470): Homolog of NCBI NO: 18086389 NR Description: At1g07930/T6D22_3 [Arabidopsis thaliana]
  misc_feature (22)..(470): Homolog of NCBI NO: 23397097 NR Description: putative translation elongation factor eEF-1
  misc_feature (22)..(470): Homolog of NCBI NO: 15081765 NR Description: At1g07930/T6D22_3 [Arabidopsis thaliana]
  misc_feature (22)..(468): Homolog of NCBI NO: 25407012 NR Description: protein T6D22.2 [imported] - Arabidopsis thaliana
  misc_feature (22)..(470): Homolog of NCBI NO: 23397097 NR Description: putative translation elongation factor eEF-1
  misc_feature (17)..(470): Homolog of NCBI NO: 25407012 NR Description: protein T6D22.2 [imported] - Arabidopsis thaliana
  misc_feature (22)..(470): Homolog of NCBI NO: 15239308 NR Description: elongation factor 1-alpha (EF-1-alpha)
  misc_feature (22)..(470): Homolog of NCBI NO: 99688 NR Description: translation elongation factor eEF-1 alpha chain
  misc_feature (22)..(470): Homolog of NCBI NO: 13605682 NR Description: At1g07930/T6D22_3 [Arabidopsis thaliana]
  misc_feature (22)..(470): Homolog of NCBI NO: 13430510 NR Description: putative translation elongation factor eEF-1
  misc_feature (22)..(470): Homolog of NCBI NO: 18086389 NR Description: At1g07930/T6D22_3 [Arabidopsis thaliana]
  misc_feature (22)..(470): Homolog of NCBI NO: 17064954 NR Description: putative elongation factor 1-a [Arabidopsis
  misc_feature (22)..(470): Homolog of NCBI NO: 13430510 NR Description: putative translation elongation factor eEF-1
  misc_feature (22)..(470): Homolog of NCBI NO: 13605682 NR Description: At1g07930/T6D22_3 [Arabidopsis thaliana]
  misc_feature (22)..(470): Homolog of NCBI NO: 99688 NR Description: translation elongation factor eEF-1 alpha chain
  misc_feature (22)..(470): Homolog of NCBI NO: 15239308 NR Description: elongation factor 1-alpha (EF-1-alpha)
  misc_feature (17)..(470): Homolog of NCBI NO: 25407012 NR Description: protein T6D22.2 [imported] - Arabidopsis thaliana

SEQ ID NO: 47865 - protein, 449 aa, Arabidopsis thaliana; identical to SEQ ID NO: 27284
  peptide (1)..(449): Ceres Seq. ID no. 15221203
  misc_feature (5)..(227): Pfam Name: Elongation factor Tu GTP binding domain Pfam Description: Elongation factor Tu GTP binding domain
  misc_feature (5)..(227): Pfam Name: Elongation factor Tu GTP binding domain Pfam Description: Elongation factor Tu GTP binding domain
  misc_feature (1)..(449): Homolog of NCBI NO: 15081765 NR Description: At1g07930/T6D22_3 [Arabidopsis thaliana]
  misc_feature (1)..(449): Homolog of NCBI NO: 17064954 NR Description: putative elongation factor 1-a [Arabidopsis
  misc_feature (1)..(447): Homolog of NCBI NO: 25407012 NR Description: protein T6D22.2 [imported] - Arabidopsis thaliana
  misc_feature (1)..(449): Homolog of NCBI NO: 18086389 NR Description: At1g07930/T6D22_3 [Arabidopsis thaliana]
  misc_feature (1)..(449): Homolog of NCBI NO: 23397097 NR Description: putative translation elongation factor eEF-1
  misc_feature (1)..(449): Homolog of NCBI NO: 15081765 NR Description: At1g07930/T6D22_3 [Arabidopsis thaliana]
  misc_feature (1)..(447): Homolog of NCBI NO: 25407012 NR Description: protein T6D22.2 [imported] - Arabidopsis thaliana
  misc_feature (1)..(449): Homolog of NCBI NO: 23397097 NR Description: putative translation elongation factor eEF-1
  misc_feature (1)..(449): Homolog of NCBI NO: 25407012 NR Description: protein T6D22.2 [imported] - Arabidopsis thaliana
  misc_feature (1)..(449): Homolog of NCBI NO: 15239308 NR Description: elongation factor 1-alpha (EF-1-alpha)
  misc_feature (1)..(449): Homolog of NCBI NO: 99688 NR Description: translation elongation factor eEF-1 alpha chain
  misc_feature (1)..(449): Homolog of NCBI NO: 13605682 NR Description: At1g07930/T6D22_3 [Arabidopsis thaliana]
  misc_feature (1)..(449): Homolog of NCBI NO: 13430510 NR Description: putative translation elongation factor eEF-1
  misc_feature (1)..(449): Homolog of NCBI NO: 18086389 NR Description: At1g07930/T6D22_3 [Arabidopsis thaliana]
  misc_feature (1)..(449): Homolog of NCBI NO: 17064954 NR Description: putative elongation factor 1-a [Arabidopsis
  misc_feature (1)..(449): Homolog of NCBI NO: 13430510 NR Description: putative translation elongation factor eEF-1
  misc_feature (1)..(449): Homolog of NCBI NO: 13605682 NR Description: At1g07930/T6D22_3 [Arabidopsis thaliana]
  misc_feature (1)..(449): Homolog of NCBI NO: 99688 NR Description: translation elongation factor eEF-1 alpha chain
  misc_feature (1)..(449): Homolog of NCBI NO: 15239308 NR Description: elongation factor 1-alpha (EF-1-alpha)
  misc_feature (1)..(449): Homolog of NCBI NO: 25407012 NR Description: protein T6D22.2 [imported] - Arabidopsis thaliana

SEQ ID NO: 47866 - protein, 401 aa, Arabidopsis thaliana; identical to SEQ ID NO: 21437
  peptide (1)..(401): Ceres Seq. ID no. 15221204
  misc_feature (1)..(179): Pfam Name: Elongation factor Tu GTP binding domain Pfam Description: Elongation factor Tu GTP binding domain
  misc_feature (1)..(179): Pfam Name: Elongation factor Tu GTP binding domain Pfam Description: Elongation factor Tu GTP binding domain
  misc_feature (1)..(401): Homolog of NCBI NO: 15081765 NR Description: At1g07930/T6D22_3 [Arabidopsis thaliana]
  misc_feature (1)..(401): Homolog of NCBI NO: 17064954 NR Description: putative elongation factor 1-a [Arabidopsis
  misc_feature (1)..(399): Homolog of NCBI NO: 25407012 NR Description: protein T6D22.2 [imported] - Arabidopsis thaliana
  misc_feature (1)..(401): Homolog of NCBI NO: 18086389 NR Description: At1g07930/T6D22_3 [Arabidopsis thaliana]
  misc_feature (1)..(401): Homolog of NCBI NO: 23397097 NR Description: putative translation elongation factor eEF-1
  misc_feature (1)..(401): Homolog of NCBI NO: 15081765 NR Description: At1g07930/T6D22_3 [Arabidopsis thaliana]
  misc_feature (1)..(399): Homolog of NCBI NO: 25407012 NR Description: protein T6D22.2 [imported] - Arabidopsis thaliana
  misc_feature (1)..(401): Homolog of NCBI NO: 23397097 NR Description: putative translation elongation factor eEF-1
  misc_feature (1)..(401): Homolog of NCBI NO: 25407012 NR Description: protein T6D22.2 [imported] - Arabidopsis thaliana
  misc_feature (1)..(401): Homolog of NCBI NO: 15239308 NR Description: elongation factor 1-alpha (EF-1-alpha)
  misc_feature (1)..(401): Homolog of NCBI NO: 99688 NR Description: translation elongation factor eEF-1 alpha chain
  misc_feature (1)..(401): Homolog of NCBI NO: 13605682 NR Description: At1g07930/T6D22_3 [Arabidopsis thaliana]
  misc_feature (1)..(401): Homolog of NCBI NO: 13430510 NR Description: putative translation elongation factor eEF-1
  misc_feature (1)..(401): Homolog of NCBI NO: 18086389 NR Description: At1g07930/T6D22_3 [Arabidopsis thaliana]
  misc_feature (1)..(401): Homolog of NCBI NO: 17064954 NR Description: putative elongation factor 1-a [Arabidopsis
  misc_feature (1)..(401): Homolog of NCBI NO: 13430510 NR Description: putative translation elongation factor eEF-1
  misc_feature (1)..(401): Homolog of NCBI NO: 13605682 NR Description: At1g07930/T6D22_3 [Arabidopsis thaliana]
  misc_feature (1)..(401): Homolog of NCBI NO: 99688 NR Description: translation elongation factor eEF-1 alpha chain
  misc_feature (1)..(401): Homolog of NCBI NO: 15239308 NR Description: elongation factor 1-alpha (EF-1-alpha)
  misc_feature (1)..(401): Homolog of NCBI NO: 25407012 NR Description: protein T6D22.2 [imported] - Arabidopsis thaliana

SEQ ID NO: 47867 - DNA, 1657 bp, Arabidopsis thaliana
  misc_feature (1)..(1657): Ceres Seq. ID no. 13649470
  misc_feature: MA Experiment ID: 20000173 Result: Down-regulated in Transcription
  misc_feature: MA Experiment 20000173 PARAMETER Experiment Name: At_42deg_Heat_P Parameter: Age (day) Value: 14
  misc_feature: MA Experiment 20000173 PARAMETER Experiment Name: At_42deg_Heat_P Parameter: Organism Value: A. thaliana
  misc_feature: MA Experiment 20000173 PARAMETER Experiment Name: At_42deg_Heat_P Parameter: Plant Line Value: WS
  misc_feature: MA Experiment 20000173 PARAMETER Experiment Name: At_42deg_Heat_P Parameter: Temperature (deg C) Value: 42 vs. 22
  misc_feature: MA Experiment 20000173 PARAMETER Experiment Name: At_42deg_Heat_P Parameter: Timepoint (hr) Value: 6
  misc_feature: MA Experiment 20000173 PARAMETER Experiment Name: At_42deg_Heat_P Parameter: Tissue Value: Aerial
  misc_feature: MA Experiment ID: 20000184 Result: Down-regulated in Transcription
  misc_feature: MA Experiment 20000184 PARAMETER Experiment Name: At_Shoots__P Parameter: Age (day) Value: 7
  misc_feature: MA Experiment 20000184 PARAMETER Experiment Name: At_Shoots__P Parameter: Tissue Value: Shoots vs. Whole Plant
gattgtaattacggatcgtgtctctgctgcttcttcttctttcaatccgatttcggacaaccttttactcagacaggagatttcagtttttttcagtccatgttagtacttgaaccgttgtcttgcagtgtgacttaagctggtttccgtgagccaataacttgatacttcttttcctccctctagtgtgaaactctgcaccagaggtgaaaggttatcattgcaaaagggagcacaagtggatagtgtttgctcaagtattagtacagaaactagtatggctgataccagttcaaggactgatgtctcaactgatggtgacacagatcatagagatctggggtctgatagagggcatatgcatgctgctgcctctgattccagtgatcgatcaaaggataagttggatcaaaagacccttcgtaggcttgctcaaaatcgtgaggcagcaagaaaaagcagattgaggaagaaggcgtatgttcagcagctggagaatagtcgattaaagctgactcaacttgagcaggagctgcaaagagcaagacagcagggagttttcatctcaagttcaggagaccaagctcattctactggtggcaatggggctttggcatttgatgcagaacactcacgatggcttgaagaaaagaacaggcaaatgaacgagctgagatctgccctgaatgctcatgcaggtgatactgagctccggataattgtggatggagtgatggctcactatgaggagcttttcaggattaagagcaatgcagctaagaatgatgtcttccacttgttatctggaatgtggaaaacaccagctgagcgatgtttcttgtggcttggcgggttccgctcatccgaacttctcaagcttcttgcgaatcagctagagcccatgacagaacgacaggtaatgggcatcaatagcttgcagcagacgtcgcagcaggcagaagatgctttatctcaagggatggagagtttacagcaatccctagctgatactttatccagtggaactcttggttccagttcatcggataatgtcgcgagctacatgggtcagatggccatggcaatggggcagttaggcaccctcgaaggattcatacgccaggctgataacttgaggctgcaaacactacaacagatgcttcgagtattaacaacacgtcagtcagctcgtgctcttcttgctatacacgattattcatctcgattacgtgctcttagttccttgtggcttgcccggccaagagagtgaaacagaagaatagtgctctactcagcagtcagccctatacataatcttatgactcagatcggcagggatactccttccaagagatcgatcacaaagcaaggcattctcagattcttaccaaaagcaatattttgggaaagaagactgcaggttttgaaattggtttcctgaggtccgcaagactcgagtgttgtgtgtgttgtaatttttagccatcaggttgcatagttttatagagtgaatgtttataggtctttgaatattcaaagcggataggtgatcagtgtaaggtcgcaattaccaacatgacagaagatgggatcctttcaggaacttggattgtatgatcataaactccagcagaccaaatcaatttatattgagagt

SEQ ID NO: 47868 - protein, 330 aa, Arabidopsis thaliana
  peptide (1)..(330): Ceres Seq. ID no. 13649471
  misc_feature (42)..(105): Pfam Name: bZIP transcription factor Pfam Description: bZIP transcription factor
  misc_feature (1)..(330): Homolog of NCBI NO: 34921538 NR Description: Transcription factor HBP-1b(c1)
  misc_feature (1)..(330): Homolog of NCBI NO: 17025924 NR Description: bZIP transcription factor [Oryza sativa]
  misc_feature (1)..(330): Homolog of NCBI NO: 34909110 NR Description: putative transcription factor HBP-1b
  misc_feature (1)..(330): Homolog of NCBI NO: 15148924 NR Description: TGA-type basic leucine zipper protein TGA2.1
  misc_feature (7)..(330): Homolog of NCBI NO: 1076423 NR Description: transcription factor OBF5 - Arabidopsis thaliana
  misc_feature (1)..(330): Homolog of NCBI NO: 15240217 NR Description: bZIP transcription factor, OBF5 [Arabidopsis
  misc_feature (15)..(330): Homolog of NCBI NO: 903688 NR Description: leucine zipper
  misc_feature (15)..(330): Homolog of NCBI NO: 15795146 NR Description: leucine zipper transcription factor HBP-1b
  misc_feature (1)..(330): Homolog of NCBI NO: 15240216 NR Description: bZIP transcription factor, HBP-1b homolog
  misc_feature (1)..(330): Homolog of NCBI NO: 30682117 NR Description: bZIP transcription factor, TGA6 [Arabidopsis
MADTSSRTDVSTDGDTDHRDLGSDRGHMHAAASDSSDRSKDKLDQKTLRRLAQNREAARKSRLRKKAYVQQLENSRLKLTQLEQELQRARQQGVFISSSGDQAHSTGGNGALAFDAEHSRWLEEKNRQMNELRSALNAHAGDTELRIIVDGVMAHYEELFRIKSNAAKNDVFHLLSGMWKTPAERCFLWLGGFRSSELLKLLANQLEPMTERQVMGINSLQQTSQQAEDALSQGMESLQQSLADTLSSGTLGSSSSDNVASYMGQMAMAMGQLGTLEGFIRQADNLRLQTLQQMLRVLTTRQSARALLAIHDYSSRLRALSSLWLARPRE

SEQ ID NO: 47869 - protein, 303 aa, Arabidopsis thaliana
  peptide (1)..(303): Ceres Seq. ID no. 13649472
  misc_feature (15)..(78): Pfam Name: bZIP transcription factor Pfam Description: bZIP transcription factor
  misc_feature (1)..(303): Homolog of NCBI NO: 34921538 NR Description: Transcription factor HBP-1b(c1)
  misc_feature (1)..(303): Homolog of NCBI NO: 17025924 NR Description: bZIP transcription factor [Oryza sativa]
  misc_feature (1)..(303): Homolog of NCBI NO: 34909110 NR Description: putative transcription factor HBP-1b
  misc_feature (1)..(303): Homolog of NCBI NO: 15148924 NR Description: TGA-type basic leucine zipper protein TGA2.1
  misc_feature (1)..(303): Homolog of NCBI NO: 1076423 NR Description: transcription factor OBF5 - Arabidopsis thaliana
  misc_feature (1)..(303): Homolog of NCBI NO: 15240217 NR Description: bZIP transcription factor, OBF5 [Arabidopsis
  misc_feature (1)..(303): Homolog of NCBI NO: 903688 NR Description: leucine zipper
  misc_feature (1)..(303): Homolog of NCBI NO: 15795146 NR Description: leucine zipper transcription factor HBP-1b
  misc_feature (1)..(303): Homolog of NCBI NO: 15240216 NR Description: bZIP transcription factor, HBP-1b homolog
  misc_feature (1)..(303): Homolog of NCBI NO: 30682117 NR Description: bZIP transcription factor, TGA6 [Arabidopsis
MHAAASDSSDRSKDKLDQKTLRRLAQNREAARKSRLRKKAYVQQLENSRLKLTQLEQELQRARQQGVFISSSGDQAHSTGGNGALAFDAEHSRWLEEKNRQMNELRSALNAHAGDTELRIIVDGVMAHYEELFRIKSNAAKNDVFHLLSGMWKTPAERCFLWLGGFRSSELLKLLANQLEPMTERQVMGINSLQQTSQQAEDALSQGMESLQQSLADTLSSGTLGSSSSDNVASYMGQMAMAMGQLGTLEGFIRQADNLRLQTLQQMLRVLTTRQSARALLAIHDYSSRLRALSSLWLARPRE

SEQ ID NO: 47870 - protein, 202 aa, Arabidopsis thaliana
  peptide (1)..(202): Ceres Seq. ID no. 13649473
  misc_feature (1)..(202): Homolog of NCBI NO: 34921538 NR Description: Transcription factor HBP-1b(c1)
  misc_feature (1)..(202): Homolog of NCBI NO: 17025924 NR Description: bZIP transcription factor [Oryza sativa]
  misc_feature (1)..(202): Homolog of NCBI NO: 34909110 NR Description: putative transcription factor HBP-1b
  misc_feature (1)..(202): Homolog of NCBI NO: 15148924 NR Description: TGA-type basic leucine zipper protein TGA2.1
  misc_feature (1)..(202): Homolog of NCBI NO: 1076423 NR Description: transcription factor OBF5 - Arabidopsis thaliana
  misc_feature (1)..(202): Homolog of NCBI NO: 15240217 NR Description: bZIP transcription factor, OBF5 [Arabidopsis
  misc_feature (1)..(202): Homolog of NCBI NO: 903688 NR Description: leucine zipper
  misc_feature (1)..(202): Homolog of NCBI NO: 15795146 NR Description: leucine zipper transcription factor HBP-1b
  misc_feature (1)..(202): Homolog of NCBI NO: 15240216 NR Description: bZIP transcription factor, HBP-1b homolog
  misc_feature (1)..(202): Homolog of NCBI NO: 30682117 NR Description: bZIP transcription factor, TGA6 [Arabidopsis
MNELRSALNAHAGDTELRIIVDGVMAHYEELFRIKSNAAKNDVFHLLSGMWKTPAERCFLWLGGFRSSELLKLLANQLEPMTERQVMGINSLQQTSQQAEDALSQGMESLQQSLADTLSSGTLGSSSSDNVASYMGQMAMAMGQLGTLEGFIRQADNLRLQTLQQMLRVLTTRQSARALLAIHDYSSRLRALSSLWLARPRE

SEQ ID NO: 47871 - DNA, 1729 bp, Arabidopsis thaliana
  misc_feature (1)..(1729): Ceres Seq. ID no. 13648749
  misc_feature: MA Experiment ID: 20000171 Result: Down-regulated in Transcription
  misc_feature: MA Experiment 20000171 PARAMETER Experiment Name: At_42deg_Heat_P Parameter: Age (day) Value: 14
  misc_feature: MA Experiment 20000171 PARAMETER Experiment Name: At_42deg_Heat_P Parameter: Organism Value: A. thaliana
  misc_feature: MA Experiment 20000171 PARAMETER Experiment Name: At_42deg_Heat_P Parameter: Plant Line Value: WS
  misc_feature: MA Experiment 20000171 PARAMETER Experiment Name: At_42deg_Heat_P Parameter: Temperature (deg C) Value: 42 vs. 22
  misc_feature: MA Experiment 20000171 PARAMETER Experiment Name: At_42deg_Heat_P Parameter: Timepoint (hr) Value: 1
  misc_feature: MA Experiment 20000171 PARAMETER Experiment Name: At_42deg_Heat_P Parameter: Tissue Value: Aerial
  misc_feature: MA Experiment ID: 20000173 Result: Down-regulated in Transcription
  misc_feature: MA Experiment 20000173 PARAMETER Experiment Name: At_42deg_Heat_P Parameter: Age (day) Value: 14
  misc_feature: MA Experiment 20000173 PARAMETER Experiment Name: At_42deg_Heat_P Parameter: Organism Value: A. thaliana
  misc_feature: MA Experiment 20000173 PARAMETER Experiment Name: At_42deg_Heat_P Parameter: Plant Line Value: WS
  misc_feature: MA Experiment 20000173 PARAMETER Experiment Name: At_42deg_Heat_P Parameter: Temperature (deg C) Value: 42 vs. 22
  misc_feature: MA Experiment 20000173 PARAMETER Experiment Name: At_42deg_Heat_P Parameter: Timepoint (hr) Value: 6
  misc_feature: MA Experiment 20000173 PARAMETER Experiment Name: At_42deg_Heat_P Parameter: Tissue Value: Aerial
  misc_feature: MA Experiment ID: 20000179 Result: Down-regulated in Transcription
  misc_feature: MA Experiment 20000179 PARAMETER Experiment Name: At_Germinating_Seeds_P Parameter: Age (hr) Value: 6 vs. 0
  misc_feature: MA Experiment 20000179 PARAMETER Experiment Name: At_Germinating_Seeds_P Parameter: Tissue Value: Germinating Seeds
  misc_feature: MA Experiment ID: 20000227 Result: Down-regulated in Transcription
  misc_feature: MA Experiment 20000227 PARAMETER Experiment Name: At_Root-Tips-vs-Tops_P Parameter: Tissue Value: Root Tips vs. Root Tops
  misc_feature: MA Experiment ID: 20000437 Result: Up-regulated in Transcription
  misc_feature: MA Experiment 20000437 PARAMETER Experiment Name: At_Drought_P Parameter: Age (day) Value: 8
  misc_feature: MA Experiment 20000437 PARAMETER Experiment Name: At_Drought_P Parameter: Organism Value: A. thaliana
  misc_feature: MA Experiment 20000437 PARAMETER Experiment Name: At_Drought_P Parameter: Plant Line Value: WS
  misc_feature: MA Experiment 20000437 PARAMETER Experiment Name: At_Drought_P Parameter: Timepoint (hr) Value: 24
  misc_feature: MA Experiment 20000437 PARAMETER Experiment Name: At_Drought_P Parameter: Tissue Value: Whole Plant
  misc_feature: MA Experiment 20000437 PARAMETER Experiment Name: At_Drought_P Parameter: Treatment Value: Drought vs. No Drought
gggaaaatcctctcatttttgacttgctcaattttgcttccttaagacccaaaaatccaaacctaaccctaatcgacattttctccgatttctaaatcctcctccggtgaaaatgtctcaccttgatgatcttccttctactcccggaaagtacaaaaccgataaagttccaccgtacgggattctccaccaccaccgttacctccgtctctcaaaactcaccctttgggcttctctcttcctcgctctcttcctcttctacctcgttttatctcctcctccgtcaccatctcgccggaatctcaacgattcttcctccatttccgccgcgaaatacggcggctctcactgggagaaacaagtccgtaaatccgctcgtcctaggtctcacggcggtttaacggtattagtcaccggagcttccggattcgtcggtactcacgtctcgatcgcgttacgaagacgcggcgatggtgttctaggtctcgacaatttcaatcgatactacgatccaaagcttaaacgagcaagacaaggccttttagaaagatcaggtgttttcgtagtcgaaggcgatataaacgacgccgttttactcagaaagctctttgatgttgtcctcttcacacatgttatgcatctcgctgctcaagctggtgtgcgttacgcaatgcaaaaccctggctcatatgttaacagtaacattgctgggtttgtgaatctattagaagtatcgaaatcagcgaatccgcaacctgctatagtctgggcttcctctagctctgtttatggtctgaattcgaaagtacccttttcggagaaagaccgtaccgatcaaccagcgagtttgtacgcagctacgaagaaagcaggtgaaggaattgcgcatacttacaatcacatctacggattatcgttaacgggtttgcggtttttcactgtctatggaccttggggtagaccagatatggcgtatttcttctttactaaagatattcttaaagggaagacgattactgtgtttgaatctcctgataaaggtagtgttgctagggacttcacttacattgatgatattgtaaaaggttgtttaggtgcgttagatactgctgagaagagtactggtagtggtggtaagaagaaaggtcctgctatgtttaggatttataatttggggaatacttctcctgttcctgttactaagcttgtgactatattagagaagcttttgaagatgaaagctaagaaaaagatcatgcctctaccgaggaatggggatgttgagtttactcatgccaatatcacgttagcgcaagcagagctcggttataaacctgcggttgatcttgagacgggtttgaaaaagtttgtgaaatggtatatgggtttttacactggctcgaagaagaagagttcttggtgagctctgtctctctgcttaagtcatggtctctgtttccccttgttgagcttggagttcgctctaggttaagcttttgaaaccgagcacttgcattgccaggaaaaatcacttacgtatctgcattgtttctgtgttgctagattttgcttcatttatttgttagtagattttgagcaatgtacagcttcatcacttagatgtttcaattgtcgaaactcaattgtcttttccatcatgtcggaggaataaagtagcttggattttgatgcatatactctgtagtaattcaatctattgtcacttgtt

SEQ ID NO: 47872 - protein, 436 aa, Arabidopsis thaliana
  peptide (1)..(436): Ceres Seq. ID no. 13648750
  misc_feature (98)..(427): Pfam Name: NAD dependent epimerase/dehydratase family Pfam Description: NAD dependent epimerase/dehydratase family
  misc_feature (60)..(427): Homolog of NCBI NO: 29647497 NR Description: OJ1191_A10.21 [Oryza sativa (japonica
  misc_feature (25)..(427): Homolog of NCBI NO: 24417280 NR Description: unknown [Arabidopsis thaliana]
  misc_feature (25)..(427): Homolog of NCBI NO: 15229524 NR Description: NAD-dependent epimerase/dehydratase family
  misc_feature (5)..(427): Homolog of NCBI NO: 15234745 NR Description: nucleotide sugar epimerase family [Arabidopsis
  misc_feature (17)..(432): Homolog of NCBI NO: 21536982 NR Description: nucleotide sugar epimerase, putative [Arabidopsis
  misc_feature (1)..(435): Homolog of NCBI NO: 15225451 NR Description: nucleotide sugar epimerase family [Arabidopsis
  misc_feature (1)..(432): Homolog of NCBI NO: 15217591 NR Description: nucleotide sugar epimerase family [Arabidopsis
  misc_feature (1)..(435): Homolog of NCBI NO: 15236712 NR Description: nucleotide sugar epimerase family [Arabidopsis
  misc_feature (1)..(436): Homolog of NCBI NO: 15293119 NR Description: putative nucleotide sugar epimerase [Arabidopsis
  misc_feature (1)..(436): Homolog of NCBI NO: 15234486 NR Description: nucleotide sugar epimerase family [Arabidopsis
MSHLDDLPSTPGKYKTDKVPPYGILHHHRYLRLSKLTLWASLFLALFLFYLVLSPPPSPSRRNLNDSSSISAAKYGGSHWEKQVRKSARPRSHGGLTVLVTGASGFVGTHVSIALRRRGDGVLGLDNFNRYYDPKLKRARQGLLERSGVFVVEGDINDAVLLRKLFDVVLFTHVMHLAAQAGVRYAMQNPGSYVNSNIAGFVNLLEVSKSANPQPAIVWASSSSVYGLNSKVPFSEKDRTDQPASLYAATKKAGEGIAHTYNHIYGLSLTGLRFFTVYGPWGRPDMAYFFFTKDILKGKTITVFESPDKGSVARDFTYIDDIVKGCLGALDTAEKSTGSGGKKKGPAMFRIYNLGNTSPVPVTKLVTILEKLLKMKAKKKIMPLPRNGDVEFTHANITLAQAELGYKPAVDLETGLKKFVKWYMGFYTGSKKKSSW

SEQ ID NO: 47873 - protein, 262 aa, Arabidopsis thaliana
  peptide (1)..(262): Ceres Seq. ID no. 13648751
  misc_feature (1)..(253): Pfam Name: NAD dependent epimerase/dehydratase family Pfam Description: NAD dependent epimerase/dehydratase family
  misc_feature (1)..(253): Homolog of NCBI NO: 29647497 NR Description: OJ1191_A10.21 [Oryza sativa (japonica
  misc_feature (1)..(253): Homolog of NCBI NO: 24417280 NR Description: unknown [Arabidopsis thaliana]
  misc_feature (1)..(253): Homolog of NCBI NO: 15229524 NR Description: NAD-dependent epimerase/dehydratase family
  misc_feature (1)..(253): Homolog of NCBI NO: 15234745 NR Description: nucleotide sugar epimerase family [Arabidopsis
  misc_feature (1)..(258): Homolog of NCBI NO: 21536982 NR Description: nucleotide sugar epimerase, putative [Arabidopsis
  misc_feature (1)..(261): Homolog of NCBI NO: 15225451 NR Description: nucleotide sugar epimerase family [Arabidopsis
  misc_feature (1)..(258): Homolog of NCBI NO: 15217591 NR Description: nucleotide sugar epimerase family [Arabidopsis
  misc_feature (1)..(261): Homolog of NCBI NO: 15236712 NR Description: nucleotide sugar epimerase family [Arabidopsis
  misc_feature (1)..(262): Homolog of NCBI NO: 15293119 NR Description: putative nucleotide sugar epimerase [Arabidopsis
  misc_feature (1)..(262): Homolog of NCBI NO: 15234486 NR Description: nucleotide sugar epimerase family [Arabidopsis
MHLAAQAGVRYAMQNPGSYVNSNIAGFVNLLEVSKSANPQPAIVWASSSSVYGLNSKVPFSEKDRTDQPASLYAATKKAGEGIAHTYNHIYGLSLTGLRFFTVYGPWGRPDMAYFFFTKDILKGKTITVFESPDKGSVARDFTYIDDIVKGCLGALDTAEKSTGSGGKKKGPAMFRIYNLGNTSPVPVTKLVTILEKLLKMKAKKKIMPLPRNGDVEFTHANITLAQAELGYKPAVDLETGLKKFVKWYMGFYTGSKKKSSW

SEQ ID NO: 47874 - protein, 250 aa, Arabidopsis thaliana
  peptide (1)..(250): Ceres Seq. ID no. 13648752
  misc_feature (1)..(241): Pfam Name: NAD dependent epimerase/dehydratase family Pfam Description: NAD dependent epimerase/dehydratase family
  misc_feature (1)..(241): Homolog of NCBI NO: 29647497 NR Description: OJ1191_A10.21 [Oryza sativa (japonica
  misc_feature (1)..(241): Homolog of NCBI NO: 24417280 NR Description: unknown [Arabidopsis thaliana]
  misc_feature (1)..(241): Homolog of NCBI NO: 15229524 NR Description: NAD-dependent epimerase/dehydratase family
  misc_feature (1)..(241): Homolog of NCBI NO: 15234745 NR Description: nucleotide sugar epimerase family [Arabidopsis
  misc_feature (1)..(246): Homolog of NCBI NO: 21536982 NR Description: nucleotide sugar epimerase, putative [Arabidopsis
  misc_feature (1)..(249): Homolog of NCBI NO: 15225451 NR Description: nucleotide sugar epimerase family [Arabidopsis
  misc_feature (1)..(246): Homolog of NCBI NO: 15217591 NR Description: nucleotide sugar epimerase family [Arabidopsis
  misc_feature (1)..(249): Homolog of NCBI NO: 15236712 NR Description: nucleotide sugar epimerase family [Arabidopsis
  misc_feature (1)..(250): Homolog of NCBI NO: 15293119 NR Description: putative nucleotide sugar epimerase [Arabidopsis
  misc_feature (1)..(250): Homolog of NCBI NO: 15234486 NR Description: nucleotide sugar epimerase family [Arabidopsis
MQNPGSYVNSNIAGFVNLLEVSKSANPQPAIVWASSSSVYGLNSKVPFSEKDRTDQPASLYAATKKAGEGIAHTYNHIYGLSLTGLRFFTVYGPWGRPDMAYFFFTKDILKGKTITVFESPDKGSVARDFTYIDDIVKGCLGALDTAEKSTGSGGKKKGPAMFRIYNLGNTSPVPVTKLVTILEKLLKMKAKKKIMPLPRNGDVEFTHANITLAQAELGYKPAVDLETGLKKFVKWYMGFYTGSKKKSSW

SEQ ID NO: 47875 - DNA, 2794 bp, Arabidopsis thaliana; identical to SEQ ID NO: 45068
  misc_feature (1)..(2794): Ceres Seq. ID no. 12600170
  misc_feature: MA Experiment ID: 20000185 Result: Up-regulated in Transcription
  misc_feature: MA Experiment 20000185 PARAMETER Experiment Name: At_Roots__P Parameter: Age (day) Value: 7 vs. 21
  misc_feature: MA Experiment 20000185 PARAMETER Experiment Name: At_Roots__P Parameter: Organism Value: A. thaliana
  misc_feature: MA Experiment 20000185 PARAMETER Experiment Name: At_Roots__P Parameter: Tissue Value: Roots vs. Whole Plant
  misc_feature: MA Experiment ID: 20000438 Result: Down-regulated in Transcription
  misc_feature: MA Experiment 20000438 PARAMETER Experiment Name: At_Shoots__P Parameter: Age (day) Value: 14
  misc_feature: MA Experiment 20000438 PARAMETER Experiment Name: At_Shoots__P Parameter: Tissue Value: Shoots vs. Whole Plant
  misc_feature: MA Experiment ID: 20000439 Result: Up-regulated in Transcription
  misc_feature: MA Experiment 20000439 PARAMETER Experiment Name: At_Roots__P Parameter: Age (day) Value: 14 vs. 21
  misc_feature: MA Experiment 20000439 PARAMETER Experiment Name: At_Roots__P Parameter: Organism Value: A. thaliana
  misc_feature: MA Experiment 20000439 PARAMETER Experiment Name: At_Roots__P Parameter: Tissue Value: Roots vs. Whole Plant
  misc_feature: MA Experiment ID: 20000495 Result: Up-regulated in Transcription
  misc_feature: MA Experiment 20000495 PARAMETER Experiment Name: At_Guard_Cells_P Parameter: Harvest Date Value: 8/2/2002
  misc_feature: MA Experiment 20000495 PARAMETER Experiment Name: At_Guard_Cells_P Parameter: Organism Value: A. thaliana
  misc_feature: MA Experiment 20000495 PARAMETER Experiment Name: At_Guard_Cells_P Parameter: Tissue Value: Guard Cells vs. Leaves
  misc_feature: MA Experiment ID: 20000794 Result: Down-regulated in Transcription
  misc_feature: MA Experiment 20000794 PARAMETER Experiment Name: At_Petals_P Parameter: Age (day) Value: 23-25 days
  misc_feature: MA Experiment 20000794 PARAMETER Experiment Name: At_Petals_P Parameter: Plant Line Value: WS
  misc_feature: MA Experiment 20000794 PARAMETER Experiment Name: At_Petals_P Parameter: Tissue Value: Petals vs. Whole plant
  misc_feature: MA Experiment ID: 20001556 Result: Down-regulated in Transcription
  misc_feature: MA Experiment 20001556 PARAMETER Experiment Name: At_Drought_Soil_Dry_P Parameter: Age (day) Value: 26
  misc_feature: MA Experiment 20001556 PARAMETER Experiment Name: At_Drought_Soil_Dry_P Parameter: Organism Value: A. thaliana
  misc_feature: MA Experiment 20001556 PARAMETER Experiment Name: At_Drought_Soil_Dry_P Parameter: Plant Line Value: WS
  misc_feature: MA Experiment 20001556 PARAMETER Experiment Name: At_Drought_Soil_Dry_P Parameter: Post Timepoint (hr) Value: None
  misc_feature: MA Experiment 20001556 PARAMETER Experiment Name: At_Drought_Soil_Dry_P Parameter: Post-Treatment Value: None
  misc_feature: MA Experiment 20001556 PARAMETER Experiment Name: At_Drought_Soil_Dry_P Parameter: Timepoint (day) Value: 12
  misc_feature: MA Experiment 20001556 PARAMETER Experiment Name: At_Drought_Soil_Dry_P Parameter: Treatment Value: Drought vs. No Drought
  misc_feature: MA Experiment ID: 20001906 Result: Up-regulated in Transcription
  misc_feature: MA Experiment 20001906 PARAMETER Experiment Name: At_Drought_Reproduction_P Parameter: Age (day) Value: 35
  misc_feature: MA Experiment 20001906 PARAMETER Experiment Name: At_Drought_Reproduction_P Parameter: Organism Value: A. thaliana
  misc_feature: MA Experiment 20001906 PARAMETER Experiment Name: At_Drought_Reproduction_P Parameter: Plant Line Value: WS
  misc_feature: MA Experiment 20001906 PARAMETER Experiment Name: At_Drought_Reproduction_P Parameter: Timepoint (day) Value: 5
  misc_feature: MA Experiment 20001906 PARAMETER Experiment Name: At_Drought_Reproduction_P Parameter: Tissue Value: Siliques
  misc_feature: MA Experiment 20001906 PARAMETER Experiment Name: At_Drought_Reproduction_P Parameter: Treatment Value: Drought vs. No Drought

SEQ ID NO: 47876 - protein, 886 aa, Arabidopsis thaliana; identical to SEQ ID NO: 45069
  peptide (1)..(886): Ceres Seq. ID no. 12600171
  misc_feature (68)..(178): Pfam Name: PLAT/LH2 domain Pfam Description: PLAT/LH2 domain
  misc_feature (68)..(178): Pfam Name: PLAT/LH2 domain Pfam Description: PLAT/LH2 domain
  misc_feature (22)..(886): Homolog of NCBI NO: 28411860 NR Description: putative lipoxygenase [Oryza sativa (japonica
  misc_feature (109)..(886): Homolog of NCBI NO: 7433169 NR Description: probable lipoxygenase (EC 1.13.11.12) (clone H1)
  misc_feature (102)..(886): Homolog of NCBI NO: 7433160 NR Description: probable lipoxygenase (EC 1.13.11.12) CPRD46,
  misc_feature (1)..(886): Homolog of NCBI NO: 6002055 NR Description: lipoxygenase [Arabidopsis thaliana]
  misc_feature (28)..(886): Homolog of NCBI NO: 7433165 NR Description: lipoxygenase (EC 1.13.11.12) loxD - tomato
  misc_feature (22)..(886): Homolog of NCBI NO: 28411860 NR Description: putative lipoxygenase [Oryza sativa (japonica
  misc_feature (102)..(886): Homolog of NCBI NO: 7433160 NR Description: probable lipoxygenase (EC 1.13.11.12) CPRD46,
  misc_feature (28)..(886): Homolog of NCBI NO: 7433165 NR Description: lipoxygenase (EC 1.13.11.12) loxD - tomato
  misc_feature (34)..(886): Homolog of NCBI NO: 8649004 NR Description: lipoxygenase [Prunus dulcis]
  misc_feature (34)..(886): Homolog of NCBI NO: 7433144 NR Description: lipoxygenase (EC 1.13.11.12) - potato
  misc_feature (34)..(886): Homolog of NCBI NO: 1407703 NR Description: lipoxygenase [Solanum tuberosum]
  misc_feature (28)..(886): Homolog of NCBI NO: 7433167 NR Description: probable lipoxygenase (EC 1.13.11.12) (clone H3)
  misc_feature (1)..(886): Homolog of NCBI NO: 15218506 NR Description: putative lipoxygenase
  misc_feature (1)..(886): Homolog of NCBI NO: 6002055 NR Description: lipoxygenase [Arabidopsis thaliana]
  misc_feature (109)..(886): Homolog of NCBI NO: 7433169 NR Description: probable lipoxygenase (EC 1.13.11.12) (clone H1)
  misc_feature (1)..(886): Homolog of NCBI NO: 15218506 NR Description: putative lipoxygenase
  misc_feature (28)..(886): Homolog of NCBI NO: 7433167 NR Description: probable lipoxygenase (EC 1.13.11.12) (clone H3)
  misc_feature (34)..(886): Homolog of NCBI NO: 1407703 NR Description: lipoxygenase [Solanum tuberosum]
  misc_feature (34)..(886): Homolog of NCBI NO: 7433144 NR Description: lipoxygenase (EC 1.13.11.12) - potato
  misc_feature (34)..(886): Homolog of NCBI NO: 8649004 NR Description: lipoxygenase [Prunus dulcis]

SEQ ID NO: 47877 - protein, 864 aa, Arabidopsis thaliana; identical to SEQ ID NO: 45070
  peptide (1)..(864): Ceres Seq. ID no. 12600172
  misc_feature (46)..(156): Pfam Name: PLAT/LH2 domain Pfam Description: PLAT/LH2 domain
  misc_feature (46)..(156): Pfam Name: PLAT/LH2 domain Pfam Description: PLAT/LH2 domain
  misc_feature (1)..(864): Homolog of NCBI NO: 28411860 NR Description: putative lipoxygenase [Oryza sativa (japonica
  misc_feature (87)..(864): Homolog of NCBI NO: 7433169 NR Description: probable lipoxygenase (EC 1.13.11.12) (clone H1)
  misc_feature (80)..(864): Homolog of NCBI NO: 7433160 NR Description: probable lipoxygenase (EC 1.13.11.12) CPRD46,
  misc_feature (1)..(864): Homolog of NCBI NO: 6002055 NR Description: lipoxygenase [Arabidopsis thaliana]
  misc_feature (6)..(864): Homolog of NCBI NO: 7433165 NR Description: lipoxygenase (EC 1.13.11.12) loxD - tomato
  misc_feature (1)..(864): Homolog of NCBI NO: 28411860 NR Description: putative lipoxygenase [Oryza sativa (japonica
  misc_feature (80)..(864): Homolog of NCBI NO: 7433160 NR Description: probable lipoxygenase (EC 1.13.11.12) CPRD46,
  misc_feature (6)..(864): Homolog of NCBI NO: 7433165 NR Description: lipoxygenase (EC 1.13.11.12) loxD - tomato
  misc_feature (12)..(864): Homolog of NCBI NO: 8649004 NR Description: lipoxygenase [Prunus dulcis]
  misc_feature (12)..(864): Homolog of NCBI NO: 7433144 NR Description: lipoxygenase (EC 1.13.11.12) - potato
  misc_feature (12)..(864): Homolog of NCBI NO: 1407703 NR Description: lipoxygenase [Solanum tuberosum]
  misc_feature (6)..(864): Homolog of NCBI NO: 7433167 NR Description: probable lipoxygenase (EC 1.13.11.12) (clone H3)
  misc_feature (1)..(864): Homolog of NCBI NO: 15218506 NR Description: putative lipoxygenase
  misc_feature (1)..(864): Homolog of NCBI NO: 6002055 NR Description: lipoxygenase [Arabidopsis thaliana]
  misc_feature (87)..(864): Homolog of NCBI NO: 7433169 NR Description: probable lipoxygenase (EC 1.13.11.12) (clone H1)
  misc_feature (1)..(864): Homolog of NCBI NO: 15218506 NR Description: putative lipoxygenase
  misc_feature (6)..(864): Homolog of NCBI NO: 7433167 NR Description: probable lipoxygenase (EC 1.13.11.12) (clone H3)
  misc_feature (12)..(864): Homolog of NCBI NO: 1407703 NR Description: lipoxygenase [Solanum tuberosum]
  misc_feature (12)..(864): Homolog of NCBI NO: 7433144 NR Description: lipoxygenase (EC 1.13.11.12) - potato
  misc_feature (12)..(864): Homolog of NCBI NO: 8649004 NR Description: lipoxygenase [Prunus dulcis]

SEQ ID NO: 47878 - protein, 854 aa, Arabidopsis thaliana; identical to SEQ ID NO: 45071
  peptide (1)..(854): Ceres Seq. ID no. 12600173
  misc_feature (36)..(146): Pfam Name: PLAT/LH2 domain Pfam Description: PLAT/LH2 domain
  misc_feature (36)..(146): Pfam Name: PLAT/LH2 domain Pfam Description: PLAT/LH2 domain
  misc_feature (1)..(854): Homolog of NCBI NO: 28411860 NR Description: putative lipoxygenase [Oryza sativa (japonica
  misc_feature (77)..(854): Homolog of NCBI NO: 7433169 NR Description: probable lipoxygenase (EC 1.13.11.12) (clone H1)
  misc_feature (70)..(854): Homolog of NCBI NO: 7433160 NR Description: probable lipoxygenase (EC 1.13.11.12) CPRD46,
  misc_feature (1)..(854): Homolog of NCBI NO: 6002055 NR Description: lipoxygenase [Arabidopsis thaliana]
  misc_feature (1)..(854): Homolog of NCBI NO: 7433165 NR Description: lipoxygenase (EC 1.13.11.12) loxD - tomato
  misc_feature (1)..(854): Homolog of NCBI NO: 28411860 NR Description: putative lipoxygenase [Oryza sativa (japonica
  misc_feature (70)..(854): Homolog of NCBI NO: 7433160 NR Description: probable lipoxygenase (EC 1.13.11.12) CPRD46,
  misc_feature (1)..(854): Homolog of NCBI NO: 7433165 NR Description: lipoxygenase (EC 1.13.11.12) loxD - tomato
  misc_feature (2)..(854): Homolog of NCBI NO: 8649004 NR Description: lipoxygenase [Prunus dulcis]
  misc_feature (2)..(854): Homolog of NCBI NO: 7433144 NR Description: lipoxygenase (EC 1.13.11.12) - potato
  misc_feature (2)..(854): Homolog of NCBI NO: 1407703 NR Description: lipoxygenase [Solanum tuberosum]
  misc_feature (1)..(854): Homolog of NCBI NO: 7433167 NR Description: probable lipoxygenase (EC 1.13.11.12) (clone H3)
  misc_feature (1)..(854): Homolog of NCBI NO: 15218506 NR Description: putative lipoxygenase
  misc_feature (1)..(854): Homolog of NCBI NO: 6002055 NR Description: lipoxygenase [Arabidopsis thaliana]
  misc_feature (77)..(854): Homolog of NCBI NO: 7433169 NR Description: probable lipoxygenase (EC 1.13.11.12) (clone H1)
  misc_feature (1)..(854): Homolog of NCBI NO: 15218506 NR Description: putative lipoxygenase
  misc_feature (1)..(854): Homolog of NCBI NO: 7433167 NR Description: probable lipoxygenase (EC 1.13.11.12) (clone H3)
  misc_feature (2)..(854): Homolog of NCBI NO: 1407703 NR Description: lipoxygenase [Solanum tuberosum]
  misc_feature (2)..(854): Homolog of NCBI NO: 7433144 NR Description: lipoxygenase (EC 1.13.11.12) - potato
  misc_feature (2)..(854): Homolog of NCBI NO: 8649004 NR Description: lipoxygenase [Prunus dulcis]

SEQ ID NO: 47879 - DNA, 1907 bp, Arabidopsis thaliana
  misc_feature (1)..(1907): Ceres Seq. ID no. 13649492
  misc_feature: MA Experiment ID: 108461 Result: Up-regulated in Transcription
  misc_feature: MA Experiment 108461 PARAMETER Experiment Name: At_Germinating_Seeds_cDNA_P Parameter: Age (day) Value: 1 vs. 0
  misc_feature: MA Experiment 108461 PARAMETER Experiment Name: At_Germinating_Seeds_cDNA_P Parameter: Tissue Value: Germinating Seeds
  misc_feature: MA Experiment ID: 108462 Result: Up-regulated in Transcription
  misc_feature: MA Experiment 108462 PARAMETER Experiment Name: At_Germinating_Seeds_cDNA_P Parameter: Age (day) Value: 2 vs. 0
  misc_feature: MA Experiment 108462 PARAMETER Experiment Name: At_Germinating_Seeds_cDNA_P Parameter: Tissue Value: Germinating Seeds
  misc_feature: MA Experiment ID: 108463 Result: Up-regulated in Transcription
  misc_feature: MA Experiment 108463 PARAMETER Experiment Name: At_Germinating_Seeds_cDNA_P Parameter: Age (day) Value: 3 vs. 0
  misc_feature: MA Experiment 108463 PARAMETER Experiment Name: At_Germinating_Seeds_cDNA_P Parameter: Tissue Value: Germinating Seeds
  misc_feature: MA Experiment ID: 108464 Result: Up-regulated in Transcription
  misc_feature: MA Experiment 108464 PARAMETER Experiment Name: At_Germinating_Seeds_cDNA_P Parameter: Age (day) Value: 4 vs. 0
  misc_feature: MA Experiment 108464 PARAMETER Experiment Name: At_Germinating_Seeds_cDNA_P Parameter: Tissue Value: Germinating Seeds
  misc_feature: MA Experiment ID: 108473 Result: Down-regulated in Transcription
  misc_feature: MA Experiment 108473 PARAMETER Experiment Name: At_Drought_Flowers_cDNA_P Parameter: Timepoint (hr) Value: 7 d
  misc_feature: MA Experiment 108473 PARAMETER Experiment Name: At_Drought_Flowers_cDNA_P Parameter: Tissue Value: Flower
  misc_feature: MA Experiment 108473 PARAMETER Experiment Name: At_Drought_Flowers_cDNA_P Parameter: Treatment Value: Drought vs. No Drought
  misc_feature: MA Experiment ID: 108595 Result: Down-regulated in Transcription
  misc_feature: MA Experiment 108595 PARAMETER Experiment Name: At_Ler-pi_Ovule_cDNA_P Parameter: Plant Line Value: null
  misc_feature: MA Experiment ID: 108668 Result: Down-regulated in Transcription
  misc_feature: MA Experiment 108668 PARAMETER Experiment Name: At_2mM_SA_cDNA_P Parameter: Plant Line Value: WS
  misc_feature: MA Experiment 108668 PARAMETER Experiment Name: At_2mM_SA_cDNA_P Parameter: Timepoint (hr) Value: 6
  misc_feature: MA Experiment 108668 PARAMETER Experiment Name: At_2mM_SA_cDNA_P Parameter: Treatment Value: 2mM SA vs. No Treatment
  misc_feature: MA Experiment ID: 20000069 Result: Down-regulated in Transcription
  misc_feature: MA Experiment 20000069 PARAMETER Experiment Name: At_100uM_ABA_Mutants_cDNA_P Parameter: Plant Line Value: CS23
  misc_feature: MA Experiment 20000069 PARAMETER Experiment Name: At_100uM_ABA_Mutants_cDNA_P Parameter: Timepoint (hr) Value: 6
  misc_feature: MA Experiment 20000069 PARAMETER Experiment Name: At_100uM_ABA_Mutants_cDNA_P Parameter: Tissue Value: Aerial
  misc_feature: MA Experiment 20000069 PARAMETER Experiment Name: At_100uM_ABA_Mutants_cDNA_P Parameter: Treatment Value: 100uM ABA vs. No Treatment
  misc_feature: MA Experiment ID: 20000070 Result: Down-regulated in Transcription
  misc_feature: MA Experiment 20000070 PARAMETER Experiment Name: At_100uM_ABA_Mutants_cDNA_P Parameter: Plant Line Value: CS24
  misc_feature: MA Experiment 20000070 PARAMETER Experiment Name: At_100uM_ABA_Mutants_cDNA_P Parameter: Timepoint (hr) Value: 6
  misc_feature: MA Experiment 20000070 PARAMETER Experiment Name: At_100uM_ABA_Mutants_cDNA_P Parameter: Tissue Value: Aerial
  misc_feature: MA Experiment 20000070 PARAMETER Experiment Name: At_100uM_ABA_Mutants_cDNA_P Parameter: Treatment Value: 100uM ABA vs. No Treatment
  misc_feature: MA Experiment ID: 20000071 Result: Down-regulated in Transcription
  misc_feature: MA Experiment 20000071 PARAMETER Experiment Name: At_100uM_ABA_Mutants_cDNA_P Parameter: Plant Line Value: CS8104
  misc_feature: MA Experiment 20000071 PARAMETER Experiment Name: At_100uM_ABA_Mutants_cDNA_P Parameter: Timepoint (hr) Value: 6
  misc_feature: MA Experiment 20000071 PARAMETER Experiment Name: At_100uM_ABA_Mutants_cDNA_P Parameter: Tissue Value: Aerial
  misc_feature: MA Experiment 20000071 PARAMETER Experiment Name: At_100uM_ABA_Mutants_cDNA_P Parameter: Treatment Value: 100uM ABA vs. No Treatment
  misc_feature: MA Experiment ID: 20000072 Result: Down-regulated in Transcription
  misc_feature: MA Experiment 20000072 PARAMETER Experiment Name: At_100uM_ABA_Mutants_cDNA_P Parameter: Plant Line Value: CS8105
  misc_feature: MA Experiment 20000072 PARAMETER Experiment Name: At_100uM_ABA_Mutants_cDNA_P Parameter: Timepoint (hr) Value: 6
  misc_feature: MA Experiment 20000072 PARAMETER Experiment Name: At_100uM_ABA_Mutants_cDNA_P Parameter: Tissue Value: Aerial
  misc_feature: MA Experiment 20000072 PARAMETER Experiment Name: At_100uM_ABA_Mutants_cDNA_P Parameter: Treatment Value: 100uM ABA vs. No Treatment
  misc_feature: MA Experiment ID: 20000087 Result: Down-regulated in Transcription
  misc_feature: MA Experiment 20000087 PARAMETER Experiment Name: At_100uM_ABA_Mutants_cDNA_P Parameter: Plant Line Value: WS
  misc_feature: MA Experiment 20000087 PARAMETER Experiment Name: At_100uM_ABA_Mutants_cDNA_P Parameter: Timepoint (hr) Value: 6
  misc_feature: MA Experiment 20000087 PARAMETER Experiment Name: At_100uM_ABA_Mutants_cDNA_P Parameter: Tissue Value: Aerial
  misc_feature: MA Experiment 20000087 PARAMETER Experiment Name: At_100uM_ABA_Mutants_cDNA_P Parameter: Treatment Value: 100uM ABA vs. No Treatment
  misc_feature: MA Experiment ID: 20000113 Result: Down-regulated in Transcription
  misc_feature: MA Experiment 20000113 PARAMETER Experiment Name: At_42deg_Heat_cDNA_P Parameter: Temperature (deg C) Value: 42 vs. 22
  misc_feature: MA Experiment 20000113 PARAMETER Experiment Name: At_42deg_Heat_cDNA_P Parameter: Timepoint (hr) Value: 8
  misc_feature: MA Experiment 20000113 PARAMETER Experiment Name: At_42deg_Heat_cDNA_P Parameter: Tissue Value: Aerial
  misc_feature: MA Experiment ID: 20000117 Result: Down-regulated in Transcription
  misc_feature: MA Experiment 20000117 PARAMETER Experiment Name: At_100uM_ABA_Mutants_cDNA_P Parameter: Plant Line Value: Columbia
  misc_feature: MA Experiment 20000117 PARAMETER Experiment Name: At_100uM_ABA_Mutants_cDNA_P Parameter: Timepoint (hr) Value: 6
  misc_feature: MA Experiment 20000117 PARAMETER Experiment Name: At_100uM_ABA_Mutants_cDNA_P Parameter: Tissue Value: Aerial
  misc_feature: MA Experiment 20000117 PARAMETER Experiment Name: At_100uM_ABA_Mutants_cDNA_P Parameter: Treatment Value: 100uM ABA vs. No Treatment
  misc_feature: MA Experiment ID: 20000171 Result: Down-regulated in Transcription
  misc_feature: MA Experiment 20000171 PARAMETER Experiment Name: At_42deg_Heat_P Parameter: Age (day) Value: 14
  misc_feature: MA Experiment 20000171 PARAMETER Experiment Name: At_42deg_Heat_P Parameter: Organism Value: A. thaliana
  misc_feature: MA Experiment 20000171 PARAMETER Experiment Name: At_42deg_Heat_P Parameter: Plant Line Value: WS
  misc_feature: MA Experiment 20000171 PARAMETER Experiment Name: At_42deg_Heat_P Parameter: Temperature (deg C) Value: 42 vs. 22
  misc_feature: MA Experiment 20000171 PARAMETER Experiment Name: At_42deg_Heat_P Parameter: Timepoint (hr) Value: 1
  misc_feature: MA Experiment 20000171 PARAMETER Experiment Name: At_42deg_Heat_P Parameter: Tissue Value: Aerial
  misc_feature: MA Experiment ID: 20000173 Result: Down-regulated in Transcription
  misc_feature: MA Experiment 20000173 PARAMETER Experiment Name: At_42deg_Heat_P Parameter: Age (day) Value: 14
  misc_feature: MA Experiment 20000173 PARAMETER Experiment Name: At_42deg_Heat_P Parameter: Organism Value: A. thaliana
  misc_feature: MA Experiment 20000173 PARAMETER Experiment Name: At_42deg_Heat_P Parameter: Plant Line Value: WS
  misc_feature: MA Experiment 20000173 PARAMETER Experiment Name: At_42deg_Heat_P Parameter: Temperature (deg C) Value: 42 vs. 22
  misc_feature: MA Experiment 20000173 PARAMETER Experiment Name: At_42deg_Heat_P Parameter: Timepoint (hr) Value: 6
  misc_feature: MA Experiment 20000173 PARAMETER Experiment Name: At_42deg_Heat_P Parameter: Tissue Value: Aerial
  misc_feature: MA Experiment ID: 20000180 Result: Up-regulated in Transcription
  misc_feature: MA Experiment 20000180 PARAMETER Experiment Name: At_Germinating_Seeds_P Parameter: Age (hr) Value: 24 vs. 0
  misc_feature: MA Experiment 20000180 PARAMETER Experiment Name: At_Germinating_Seeds_P Parameter: Tissue Value: Germinating Seeds
  misc_feature: MA Experiment ID: 20000182 Result: Down-regulated in Transcription
  misc_feature: MA Experiment 20000182 PARAMETER Experiment Name: At_2mM_SA_P Parameter: Age (day) Value: 14
  misc_feature: MA Experiment 20000182 PARAMETER Experiment Name: At_2mM_SA_P Parameter: Organism Value: A. thaliana
  misc_feature: MA Experiment 20000182 PARAMETER Experiment Name: At_2mM_SA_P Parameter: Plant Line Value: WS
  misc_feature: MA Experiment 20000182 PARAMETER Experiment Name: At_2mM_SA_P Parameter: Timepoint (hr) Value: 6
  misc_feature: MA Experiment 20000182 PARAMETER Experiment Name: At_2mM_SA_P Parameter: Tissue Value: Aerial
  misc_feature: MA Experiment 20000182 PARAMETER Experiment Name: At_2mM_SA_P Parameter: Treatment Value: 2mM SA vs. No Treatment
  misc_feature: MA Experiment ID: 20000184 Result: Up-regulated in Transcription
  misc_feature: MA Experiment 20000184 PARAMETER Experiment Name: At_Shoots__P Parameter: Age (day) Value: 7
  misc_feature: MA Experiment 20000184 PARAMETER Experiment Name: At_Shoots__P Parameter: Tissue Value: Shoots vs. Whole Plant
  misc_feature: MA Experiment ID: 20000265 Result: Up-regulated in Transcription
  misc_feature: MA Experiment 20000265 PARAMETER Experiment Name: At_Open_Flower_P Parameter: Age (day) Value: 21
  misc_feature: MA Experiment 20000265 PARAMETER Experiment Name: At_Open_Flower_P Parameter: Plant Line Value: WS
  misc_feature: MA Experiment 20000265 PARAMETER Experiment Name: At_Open_Flower_P Parameter: Tissue Value: Closed Flower vs. Whole Plant
  misc_feature: MA Experiment ID: 20000437 Result: Down-regulated in Transcription
  misc_feature: MA Experiment 20000437 PARAMETER Experiment Name: At_Drought_P Parameter: Age (day) Value: 8
  misc_feature: MA Experiment 20000437 PARAMETER Experiment Name: At_Drought_P Parameter: Organism Value: A. thaliana
  misc_feature: MA Experiment 20000437 PARAMETER Experiment Name: At_Drought_P Parameter: Plant Line Value: WS
  misc_feature: MA Experiment 20000437 PARAMETER Experiment Name: At_Drought_P Parameter: Timepoint (hr) Value: 24
  misc_feature: MA Experiment 20000437 PARAMETER Experiment Name: At_Drought_P Parameter: Tissue Value: Whole Plant
  misc_feature: MA Experiment 20000437 PARAMETER Experiment Name: At_Drought_P Parameter: Treatment Value: Drought vs. No Drought
  misc_feature: MA Experiment ID: 20000438 Result: Up-regulated in Transcription
  misc_feature: MA Experiment 20000438 PARAMETER Experiment Name: At_Shoots__P Parameter: Age (day) Value: 14
  misc_feature: MA Experiment 20000438 PARAMETER Experiment Name: At_Shoots__P Parameter: Tissue Value: Shoots vs. Whole Plant
  misc_feature: MA Experiment ID: 20000573 Result: Down-regulated in Transcription
  misc_feature: MA Experiment 20000573 PARAMETER Experiment Name: At_100uM_ABA_Mutants__P Parameter: Organism Value: A. thaliana
  misc_feature: MA Experiment 20000573 PARAMETER Experiment Name: At_100uM_ABA_Mutants__P Parameter: Plant Line Value: CS22 vs. Ler wt
  misc_feature: MA Experiment 20000573 PARAMETER Experiment Name: At_100uM_ABA_Mutants__P Parameter: Timepoint (hr) Value: N/A
  misc_feature: MA Experiment 20000573 PARAMETER Experiment Name: At_100uM_ABA_Mutants__P Parameter: Tissue Value: Whole Plant
  misc_feature: MA Experiment 20000573 PARAMETER Experiment Name: At_100uM_ABA_Mutants__P Parameter: Treatment Value: None
  misc_feature: MA Experiment ID: 20000574 Result: Down-regulated in Transcription
  misc_feature: MA Experiment 20000574 PARAMETER Experiment Name: At_100uM_ABA_Mutants__P Parameter: Organism Value: A. thaliana
  misc_feature: MA Experiment 20000574 PARAMETER Experiment Name: At_100uM_ABA_Mutants__P Parameter: Plant Line Value: CS23 vs. Ler wt
  misc_feature: MA Experiment 20000574 PARAMETER Experiment Name: At_100uM_ABA_Mutants__P Parameter: Timepoint (hr) Value: N/A
  misc_feature: MA Experiment 20000574 PARAMETER Experiment Name: At_100uM_ABA_Mutants__P Parameter: Tissue Value: Whole Plant
  misc_feature: MA Experiment 20000574 PARAMETER Experiment Name: At_100uM_ABA_Mutants__P Parameter: Treatment Value: None
  misc_feature: MA Experiment ID: 20001248 Result: Down-regulated in Transcription
  misc_feature: MA Experiment 20001248 PARAMETER Experiment Name: At_Far-red-induction_P Parameter: Age (day) Value: 7
  misc_feature: MA Experiment 20001248 PARAMETER Experiment Name: At_Far-red-induction_P Parameter: Light Value: Far-red vs. White
  misc_feature: MA Experiment 20001248 PARAMETER Experiment Name: At_Far-red-induction_P Parameter: Organism Value: A. thaliana
  misc_feature: MA Experiment 20001248 PARAMETER Experiment Name: At_Far-red-induction_P Parameter: Plant Line Value: Columbia
  misc_feature: MA Experiment 20001248 PARAMETER Experiment Name: At_Far-red-induction_P Parameter: Timepoint (hr) Value: 4
  misc_feature: MA Experiment 20001248 PARAMETER Experiment Name: At_Far-red-induction_P Parameter: Tissue Value: Whole Plant
  misc_feature: MA Experiment ID: 20001904 Result: Down-regulated in Transcription
  misc_feature: MA Experiment 20001904 PARAMETER Experiment Name: At_Drought_Reproduction_P Parameter: Age (day) Value: 37
  misc_feature: MA Experiment 20001904 PARAMETER Experiment Name: At_Drought_Reproduction_P Parameter: Organism Value: A. thaliana
  misc_feature: MA Experiment 20001904 PARAMETER Experiment Name: At_Drought_Reproduction_P Parameter: Plant Line Value: WS
  misc_feature: MA Experiment 20001904 PARAMETER Experiment Name: At_Drought_Reproduction_P Parameter: Timepoint (day) Value: 7
  misc_feature: MA Experiment 20001904 PARAMETER Experiment Name: At_Drought_Reproduction_P Parameter: Tissue Value: Rosettes
  misc_feature: MA Experiment 20001904 PARAMETER Experiment Name: At_Drought_Reproduction_P Parameter: Treatment Value: Drought vs. No Drought
  misc_feature: MA Experiment ID: 20001910 Result: Down-regulated in Transcription
  misc_feature: MA Experiment 20001910 PARAMETER Experiment Name: At_Drought_Reproduction_P Parameter: Age (day) Value: 37
  misc_feature: MA Experiment 20001910 PARAMETER Experiment Name: At_Drought_Reproduction_P Parameter: Organism Value: A. thaliana
  misc_feature: MA Experiment 20001910 PARAMETER Experiment Name: At_Drought_Reproduction_P Parameter: Plant Line Value: WS
  misc_feature: MA Experiment 20001910 PARAMETER Experiment Name: At_Drought_Reproduction_P Parameter: Timepoint (day) Value: 7
  misc_feature: MA Experiment 20001910 PARAMETER Experiment Name: At_Drought_Reproduction_P Parameter: Tissue Value: Flowers
  misc_feature: MA Experiment 20001910 PARAMETER Experiment Name: At_Drought_Reproduction_P Parameter: Treatment Value: Drought vs. No Drought
gtaaactttttaagatcctttacattttctttaagtctttatcaaatacttgtcatattgtagattcttatataggtgtctatatacatgcacataaagctgtgtaatatgtaatcataagttagagaaacagatttggcttttcctctcttgttctctgttgagtattcttcttggcatctcctctatattaaactcgaaagagaaacaaaacagagaaacctctaaagctttcttttttgttctcatgacattttcttgtcacaaaccaaactcgagaagaaaagttcttgtatacaaatcaaccaacattcattgtttttaaaagggtcccatgacccattgtggagatagctttgttttcatcttccaacattaacacccaccccaaaatcttgattacttttgatagaaacatatgcaacaagtggaataattccaatacagataagatccacacaacacttttttctccttctattctcttgtatcttctcattatagtctcgatgaagatgctgagacttagaaagaagcaacatttggtgtttctactatgcgtgtggtgtttggtggtggattggagcaaagcagaaacagaggaaagtgatggaagtcccatggagaaaacagagcaagctgctctatactctaccattcaaggctttgttggtgaatcttggaatggctcttatctttatcctgacccttgtggctggactcctatccagggtgtgacttgtgatatctatgatgagctttggtatgtaactgctctaagctttgggactatgaaagacaactctcttgcttgttctgaaagtccagtgatcagaccacaactctttgagctcaagcacctcaagtctctctctcttttcaactgcttcacaacgcctaaccgatatctagcttcaatctccgatgaaaagtggttggatctctctaaaagcttggagagacttgagatcagatcaaacccgggactgataggtgaactcccttctgtcatcactaacctcaccaaccttcaatctctggtggtgctagaaaacaagttaacaggtccattgccagtgaatttggccaagttaaccagattgagacgtttagtactgtctggaaaccggttcacagggagaatacctgaggtctacgggttaaccggattgttgatattggatgtgagcaggaatttcttatctggggcgttgcctttaagcgttggaggattgtattctctgctgaaacttgatcttagtaacaattacttggaaggaaagttacctagagagctagagtccttgaagaatctcactctattggacttgagaaacaacagattatcaggtgggttgagtaaagagatccaagagatgacttctttggtagaactggttctgtccaataatcgcctagccggggacttgacaggaataaagtggagaaatctgaagaatttagtggttcttgatctctccaacacaggcttaaaaggggagattcctggttcaatcttggagctcaagaaactgaggtttttgggtttgagcaacaacaatctcggaggcaaactcattccacaaatggaaaccgaaatgcctagtctcagcgcgctttacgtgaatggaaataacatcagcggagagttggaattctctaggtacttttatgagagaatgggaaggagacttggtgtttgggggaaccctaatctgtgttacaacggagatgagaccaagaaccttagcgatcatgttcctttcggagtgaaccaatgtaagagaattaaggcagataaatattagaaccctcgttctgaatcaaagggtttgtgataacaaaaacttggaatgatacaaagctgtggtcttttcaattttgttattgcatcttatttctatagc

SEQ ID NO: 47880 - protein, 432 aa, Arabidopsis thaliana
  peptide (1)..(432): Ceres Seq. ID no. 13649493
  misc_feature (341)..(365): Pfam Name: Leucine Rich Repeat Pfam Description: Leucine Rich Repeat
  misc_feature (31)..(424): Homolog of NCBI NO: 15228004 NR Description: leucine rich repeat protein family [Arabidopsis
  misc_feature (13)..(417): Homolog of NCBI NO: 15236148 NR Description: leucine rich repeat protein family (fragment)
  misc_feature (13)..(417): Homolog of NCBI NO: 7487680 NR Description: hypothetical protein T5F17.10 - Arabidopsis
  misc_feature (30)..(408): Homolog of NCBI NO: 26452151 NR Description: GPI-anchored protein [Arabidopsis thaliana]
  misc_feature (30)..(408): Homolog of NCBI NO: 15220050 NR Description: leucine rich repeat protein family [Arabidopsis
  misc_feature (1)..(425): Homolog of NCBI NO: 34894182 NR Description: P0439B06.12 [Oryza sativa (japonica
  misc_feature (38)..(424): Homolog of NCBI NO: 15222215 NR Description: leucine rich repeat protein family [Arabidopsis
  misc_feature (38)..(430): Homolog of NCBI NO: 11994758 NR Description: contains similarity to elicitor-inducible
  misc_feature (11)..(430): Homolog of NCBI NO: 15230865 NR Description: leucine rich repeat protein family [Arabidopsis
  misc_feature (1)..(432): Homolog of NCBI NO: 18409119 NR Description: leucine rich repeat protein family [Arabidopsis
MKMLRLRKKQHLVFLLCVWCLVVDWSKAETEESDGSPMEKTEQAALYSTIQGFVGESWNGSYLYPDPCGWTPIQGVTCDIYDELWYVTALSFGTMKDNSLACSESPVIRPQLFELKHLKSLSLFNCFTTPNRYLASISDEKWLDLSKSLERLEIRSNPGLIGELPSVITNLTNLQSLVVLENKLTGPLPVNLAKLTRLRRLVLSGNRFTGRIPEVYGLTGLLILDVSRNFLSGALPLSVGGLYSLLKLDLSNNYLEGKLPRELESLKNLTLLDLRNNRLSGGLSKEIQEMTSLVELVLSNNRLAGDLTGIKWRNLKNLVVLDLSNTGLKGEIPGSILELKKLRFLGLSNNNLGGKLIPQMETEMPSLSALYVNGNNISGELEFSRYFYERMGRRLGVWGNPNLCYNGDETKNLSDHVPFGVNQCKRIKADKY

SEQ ID NO: 47881 - protein, 430 aa, Arabidopsis thaliana
  peptide (1)..(430): Ceres Seq. ID no. 13649494
  misc_feature (339)..(363): Pfam Name: Leucine Rich Repeat Pfam Description: Leucine Rich Repeat
  misc_feature (29)..(422): Homolog of NCBI NO: 15228004 NR Description: leucine rich repeat protein family [Arabidopsis
  misc_feature (11)..(415): Homolog of NCBI NO: 15236148 NR Description: leucine rich repeat protein family (fragment)
  misc_feature (11)..(415): Homolog of NCBI NO: 7487680 NR Description: hypothetical protein T5F17.10 - Arabidopsis
  misc_feature (28)..(406): Homolog of NCBI NO: 26452151 NR Description: GPI-anchored protein [Arabidopsis thaliana]
  misc_feature (28)..(406): Homolog of NCBI NO: 15220050 NR Description: leucine rich repeat protein family [Arabidopsis
  misc_feature (1)..(423): Homolog of NCBI NO: 34894182 NR Description: P0439B06.12 [Oryza sativa (japonica
  misc_feature (36)..(422): Homolog of NCBI NO: 15222215 NR Description: leucine rich repeat protein family [Arabidopsis
  misc_feature (36)..(428): Homolog of NCBI NO: 11994758 NR Description: contains similarity to elicitor-inducible
  misc_feature (9)..(428): Homolog of NCBI NO: 15230865 NR Description: leucine rich repeat protein family [Arabidopsis
  misc_feature (1)..(430): Homolog of NCBI NO: 18409119 NR Description: leucine rich repeat protein family [Arabidopsis
MLRLRKKQHLVFLLCVWCLVVDWSKAETEESDGSPMEKTEQAALYSTIQGFVGESWNGSYLYPDPCGWTPIQGVTCDIYDELWYVTALSFGTMKDNSLACSESPVIRPQLFELKHLKSLSLFNCFTTPNRYLASISDEKWLDLSKSLERLEIRSNPGLIGELPSVITNLTNLQSLVVLENKLTGPLPVNLAKLTRLRRLVLSGNRFTGRIPEVYGLTGLLILDVSRNFLSGALPLSVGGLYSLLKLDLSNNYLEGKLPRELESLKNLTLLDLRNNRLSGGLSKEIQEMTSLVELVLSNNRLAGDLTGIKWRNLKNLVVLDLSNTGLKGEIPGSILELKKLRFLGLSNNNLGGKLIPQMETEMPSLSALYVNGNNISGELEFSRYFYERMGRRLGVWGNPNLCYNGDETKNLSDHVPFGVNQCKRIKADKY

SEQ ID NO: 47882 - protein, 395 aa, Arabidopsis thaliana
  peptide (1)..(395): Ceres Seq. ID no. 13649495
  misc_feature (304)..(328): Pfam Name: Leucine Rich Repeat Pfam Description: Leucine Rich Repeat
  misc_feature (1)..(387): Homolog of NCBI NO: 15228004 NR Description: leucine rich repeat protein family [Arabidopsis
  misc_feature (1)..(380): Homolog of NCBI NO: 15236148 NR Description: leucine rich repeat protein family (fragment)
  misc_feature (1)..(380): Homolog of NCBI NO: 7487680 NR Description: hypothetical protein T5F17.10 - Arabidopsis
  misc_feature (1)..(371): Homolog of NCBI NO: 26452151 NR Description: GPI-anchored protein [Arabidopsis thaliana]
  misc_feature (1)..(371): Homolog of NCBI NO: 15220050 NR Description: leucine rich repeat protein family [Arabidopsis
  misc_feature (1)..(388): Homolog of NCBI NO: 34894182 NR Description: P0439B06.12 [Oryza sativa (japonica
  misc_feature (1)..(387): Homolog of NCBI NO: 15222215 NR Description: leucine rich repeat protein family [Arabidopsis
  misc_feature (1)..(393): Homolog of NCBI NO: 11994758 NR Description: contains similarity to elicitor-inducible
  misc_feature (1)..(393): Homolog of NCBI NO: 15230865 NR Description: leucine rich repeat protein family [Arabidopsis
  misc_feature (1)..(395): Homolog of NCBI NO: 18409119 NR Description: leucine rich repeat protein family [Arabidopsis
MEKTEQAALYSTIQGFVGESWNGSYLYPDPCGWTPIQGVTCDIYDELWYVTALSFGTMKDNSLACSESPVIRPQLFELKHLKSLSLFNCFTTPNRYLASISDEKWLDLSKSLERLEIRSNPGLIGELPSVITNLTNLQSLVVLENKLTGPLPVNLAKLTRLRRLVLSGNRFTGRIPEVYGLTGLLILDVSRNFLSGALPLSVGGLYSLLKLDLSNNYLEGKLPRELESLKNLTLLDLRNNRLSGGLSKEIQEMTSLVELVLSNNRLAGDLTGIKWRNLKNLVVLDLSNTGLKGEIPGSILELKKLRFLGLSNNNLGGKLIPQMETEMPSLSALYVNGNNISGELEFSRYFYERMGRRLGVWGNPNLCYNGDETKNLSDHVPFGVNQCKRIKADKY

SEQ ID NO: 47883 - DNA, 2810 bp, Arabidopsis thaliana; identical to SEQ ID NO: 44848
  misc_feature (1)..(2810): Ceres Seq. ID no. 12650352
  misc_feature: MA Experiment ID: 20000180 Result: Up-regulated in Transcription
  misc_feature: MA Experiment 20000180 PARAMETER Experiment Name: At_Germinating_Seeds_P Parameter: Age (hr) Value: 24 vs. 0
  misc_feature: MA Experiment 20000180 PARAMETER Experiment Name: At_Germinating_Seeds_P Parameter: Tissue Value: Germinating Seeds
  misc_feature: MA Experiment ID: 20000438 Result: Up-regulated in Transcription
  misc_feature: MA Experiment 20000438 PARAMETER Experiment Name: At_Shoots__P Parameter: Age (day) Value: 14
  misc_feature: MA Experiment 20000438 PARAMETER Experiment Name: At_Shoots__P Parameter: Tissue Value: Shoots vs. Whole Plant
  misc_feature: MA Experiment ID: 20000495 Result: Down-regulated in Transcription
  misc_feature: MA Experiment 20000495 PARAMETER Experiment Name: At_Guard_Cells_P Parameter: Harvest Date Value: 8/2/2002
  misc_feature: MA Experiment 20000495 PARAMETER Experiment Name: At_Guard_Cells_P Parameter: Organism Value: A. thaliana
  misc_feature: MA Experiment 20000495 PARAMETER Experiment Name: At_Guard_Cells_P Parameter: Tissue Value: Guard Cells vs. Leaves
  misc_feature: MA Experiment ID: 20000496 Result: Down-regulated in Transcription
  misc_feature: MA Experiment 20000496 PARAMETER Experiment Name: At_Guard_Cells_P Parameter: Harvest Date Value: 7/19/2002
  misc_feature: MA Experiment 20000496 PARAMETER Experiment Name: At_Guard_Cells_P Parameter: Organism Value: Canola
  misc_feature: MA Experiment 20000496 PARAMETER Experiment Name: At_Guard_Cells_P Parameter: Tissue Value: Guard Cells vs. Leaves
  misc_feature: MA Experiment ID: 20000573 Result: Down-regulated in Transcription
  misc_feature: MA Experiment 20000573 PARAMETER Experiment Name: At_100uM_ABA_Mutants__P Parameter: Organism Value: A. thaliana
  misc_feature: MA Experiment 20000573 PARAMETER Experiment Name: At_100uM_ABA_Mutants__P Parameter: Plant Line Value: CS22 vs. Ler wt
  misc_feature: MA Experiment 20000573 PARAMETER Experiment Name: At_100uM_ABA_Mutants__P Parameter: Timepoint (hr) Value: N/A
  misc_feature: MA Experiment 20000573 PARAMETER Experiment Name: At_100uM_ABA_Mutants__P Parameter: Tissue Value: Whole Plant
  misc_feature: MA Experiment 20000573 PARAMETER Experiment Name: At_100uM_ABA_Mutants__P Parameter: Treatment Value: None
  misc_feature: MA Experiment ID: 20001247 Result: Up-regulated in Transcription
  misc_feature: MA Experiment 20001247 PARAMETER Experiment Name: At_Far-red-induction_P Parameter: Age (day) Value: 7
  misc_feature: MA Experiment 20001247 PARAMETER Experiment Name: At_Far-red-induction_P Parameter: Light Value: Far-red vs. White
  misc_feature: MA Experiment 20001247 PARAMETER Experiment Name: At_Far-red-induction_P Parameter: Organism Value: A. thaliana
  misc_feature: MA Experiment 20001247 PARAMETER Experiment Name: At_Far-red-induction_P Parameter: Plant Line Value: Columbia
  misc_feature: MA Experiment 20001247 PARAMETER Experiment Name: At_Far-red-induction_P Parameter: Timepoint (hr) Value: 1
  misc_feature: MA Experiment 20001247 PARAMETER Experiment Name: At_Far-red-induction_P Parameter: Tissue Value: Whole Plant
  misc_feature: MA Experiment ID: 20001248 Result: Down-regulated in Transcription
  misc_feature: MA Experiment 20001248 PARAMETER Experiment Name: At_Far-red-induction_P Parameter: Age (day) Value: 7
  misc_feature: MA Experiment 20001248 PARAMETER Experiment Name: At_Far-red-induction_P Parameter: Light Value: Far-red vs. White
  misc_feature: MA Experiment 20001248 PARAMETER Experiment Name: At_Far-red-induction_P Parameter: Organism Value: A. thaliana
  misc_feature: MA Experiment 20001248 PARAMETER Experiment Name: At_Far-red-induction_P Parameter: Plant Line Value: Columbia
  misc_feature: MA Experiment 20001248 PARAMETER Experiment Name: At_Far-red-induction_P Parameter: Timepoint (hr) Value: 4
  misc_feature: MA Experiment 20001248 PARAMETER Experiment Name: At_Far-red-induction_P Parameter: Tissue Value: Whole Plant
  misc_feature: MA Experiment ID: 20001450 Result: Down-regulated in Transcription
  misc_feature: MA Experiment 20001450 PARAMETER Experiment Name: At_Far-red-induction_P Parameter: Age (day) Value: 7
  misc_feature: MA Experiment 20001450 PARAMETER Experiment Name: At_Far-red-induction_P Parameter: Light Value: Far-red vs. White
  misc_feature: MA Experiment 20001450 PARAMETER Experiment Name: At_Far-red-induction_P Parameter: Organism Value: A. thaliana
  misc_feature: MA Experiment 20001450 PARAMETER Experiment Name: At_Far-red-induction_P Parameter: Plant Line Value: Columbia
  misc_feature: MA Experiment 20001450 PARAMETER Experiment Name: At_Far-red-induction_P Parameter: Timepoint (hr) Value: 8
  misc_feature: MA Experiment 20001450 PARAMETER Experiment Name: At_Far-red-induction_P Parameter: Tissue Value: Whole Plant
  misc_feature: MA Experiment ID: 20001451 Result: Up-regulated in Transcription
  misc_feature: MA Experiment 20001451 PARAMETER Experiment Name: At_Far-red-induction_P Parameter: Age (day) Value: 7
  misc_feature: MA Experiment 20001451 PARAMETER Experiment Name: At_Far-red-induction_P Parameter: Light Value: Far-red vs. White
  misc_feature: MA Experiment 20001451 PARAMETER Experiment Name: At_Far-red-induction_P Parameter: Organism Value: A. thaliana
  misc_feature: MA Experiment 20001451 PARAMETER Experiment Name: At_Far-red-induction_P Parameter: Plant Line Value: Columbia
  misc_feature: MA Experiment 20001451 PARAMETER Experiment Name: At_Far-red-induction_P Parameter: Timepoint (hr) Value: 24
  misc_feature: MA Experiment 20001451 PARAMETER Experiment Name: At_Far-red-induction_P Parameter: Tissue Value: Whole Plant
  misc_feature: MA Experiment ID: 20001557 Result: Down-regulated in Transcription
  misc_feature: MA Experiment 20001557 PARAMETER Experiment Name: At_Drought_Soil_Dry_P Parameter: Age (day) Value: 27
  misc_feature: MA Experiment 20001557 PARAMETER Experiment Name: At_Drought_Soil_Dry_P Parameter: Organism Value: A. thaliana
  misc_feature: MA Experiment 20001557 PARAMETER Experiment Name: At_Drought_Soil_Dry_P Parameter: Plant Line Value: WS
  misc_feature: MA Experiment 20001557 PARAMETER Experiment Name: At_Drought_Soil_Dry_P Parameter: Post Timepoint (hr) Value: 3
  misc_feature: MA Experiment 20001557 PARAMETER Experiment Name: At_Drought_Soil_Dry_P Parameter: Post-Treatment Value: Re-Water vs. No Drought
  misc_feature: MA Experiment 20001557 PARAMETER Experiment Name: At_Drought_Soil_Dry_P Parameter: Timepoint (day) Value: 13
  misc_feature: MA Experiment 20001557 PARAMETER Experiment Name: At_Drought_Soil_Dry_P Parameter: Treatment Value: Drought vs. No Drought

SEQ ID NO: 47884 - protein, 761 aa, Arabidopsis thaliana; identical to SEQ ID NO: 44849
  peptide (1)..(761): Ceres Seq. ID no. 12650353
  misc_feature (276)..(396): Pfam Name: ABC1 family Pfam Description: ABC1 family
  misc_feature (276)..(396): Pfam Name: ABC1 family Pfam Description: ABC1 family
  misc_feature (276)..(396): Pfam Name: ABC1 family Pfam Description: ABC1 family
  misc_feature (103)..(549): Homolog of NCBI NO: 6648182 NR Description: unknown protein [Arabidopsis thaliana]
  misc_feature (567)..(757): Homolog of NCBI NO: 19424003 NR Description: unknown protein [Arabidopsis thaliana]
  misc_feature (171)..(549): Homolog of NCBI NO: 19424003 NR Description: unknown protein [Arabidopsis thaliana]
  misc_feature (567)..(757): Homolog of NCBI NO: 15983801 NR Description: At3g07700/F17A17.4 [Arabidopsis thaliana]
  misc_feature (103)..(549): Homolog of NCBI NO: 15983801 NR Description: At3g07700/F17A17.4 [Arabidopsis thaliana]
  misc_feature (103)..(549): Homolog of NCBI NO: 6648182 NR Description: unknown protein [Arabidopsis thaliana]
  misc_feature (171)..(549): Homolog of NCBI NO: 19424003 NR Description: unknown protein [Arabidopsis thaliana]
  misc_feature (103)..(549): Homolog of NCBI NO: 15983801 NR Description: At3g07700/F17A17.4 [Arabidopsis thaliana]
  misc_feature (567)..(757): Homolog of NCBI NO: 15983801 NR Description: At3g07700/F17A17.4 [Arabidopsis thaliana]
  misc_feature (171)..(549): Homolog of NCBI NO: 19424003 NR Description: unknown protein [Arabidopsis thaliana]
  misc_feature (567)..(757): Homolog of NCBI NO: 19424003 NR Description: unknown protein [Arabidopsis thaliana]
  misc_feature (103)..(549): Homolog of NCBI NO: 6648182 NR Description: unknown protein [Arabidopsis thaliana]
  misc_feature (1)..(563): Homolog of NCBI NO: 13605698 NR Description: AT5g64940/MXK3_17 [Arabidopsis thaliana]
  misc_feature (103)..(549): Homolog of NCBI NO: 18398032 NR Description: expressed protein
  misc_feature (103)..(549): Homolog of NCBI NO: 21618050 NR Description: unknown [Arabidopsis thaliana]
  misc_feature (567)..(757): Homolog of NCBI NO: 18398032 NR Description: expressed protein
  misc_feature (567)..(757): Homolog of NCBI NO: 21618050 NR Description: unknown [Arabidopsis thaliana]
  misc_feature (1)..(563): Homolog of NCBI NO: 13605698 NR Description: AT5g64940/MXK3_17 [Arabidopsis thaliana]
  misc_feature (103)..(549): Homolog of NCBI NO: 18398032 NR Description: expressed protein
  misc_feature (103)..(549): Homolog of NCBI NO: 21618050 NR Description: unknown [Arabidopsis thaliana]
  misc_feature (567)..(757): Homolog of NCBI NO: 18398032 NR Description: expressed protein
  misc_feature (567)..(757): Homolog of NCBI NO: 21618050 NR Description: unknown [Arabidopsis thaliana]
  misc_feature (103)..(549): Homolog of NCBI NO: 15983801 NR Description: At3g07700/F17A17.4 [Arabidopsis thaliana]
  misc_feature (567)..(757): Homolog of NCBI NO: 15983801 NR Description: At3g07700/F17A17.4 [Arabidopsis thaliana]
  misc_feature (567)..(757): Homolog of NCBI NO: 19424003 NR Description: unknown protein [Arabidopsis thaliana]
  misc_feature (567)..(757): Homolog of NCBI NO: 21618050 NR Description: unknown [Arabidopsis thaliana]
  misc_feature (567)..(757): Homolog of NCBI NO: 18398032 NR Description: expressed protein
  misc_feature (103)..(549): Homolog of NCBI NO: 21618050 NR Description: unknown [Arabidopsis thaliana]
  misc_feature (103)..(549): Homolog of NCBI NO: 18398032 NR Description: expressed protein
  misc_feature (1)..(563): Homolog of NCBI NO: 13605698 NR Description: AT5g64940/MXK3_17 [Arabidopsis thaliana]

SEQ ID NO: 47885 - protein, 556 aa, Arabidopsis thaliana; identical to SEQ ID NO: 44850
  peptide (1)..(556): Ceres Seq. ID no. 12650354
  misc_feature (71)..(191): Pfam Name: ABC1 family Pfam Description: ABC1 family
  misc_feature (71)..(191): Pfam Name: ABC1 family Pfam Description: ABC1 family
  misc_feature (71)..(191): Pfam Name: ABC1 family Pfam Description: ABC1 family
  misc_feature (1)..(344): Homolog of NCBI NO: 6648182 NR Description: unknown protein [Arabidopsis thaliana]
  misc_feature (362)..(552): Homolog of NCBI NO: 19424003 NR Description: unknown protein [Arabidopsis thaliana]
  misc_feature (1)..(344): Homolog of NCBI NO: 19424003 NR Description: unknown protein [Arabidopsis thaliana]
  misc_feature (362)..(552): Homolog of NCBI NO: 15983801 NR Description: At3g07700/F17A17.4 [Arabidopsis thaliana]
  misc_feature (1)..(344): Homolog of NCBI NO: 15983801 NR Description: At3g07700/F17A17.4 [Arabidopsis thaliana]
  misc_feature (1)..(344): Homolog of NCBI NO: 6648182 NR Description: unknown protein [Arabidopsis thaliana]
  misc_feature (1)..(344): Homolog of NCBI NO: 19424003 NR Description: unknown protein [Arabidopsis thaliana]
  misc_feature (1)..(344): Homolog of NCBI NO: 15983801 NR Description: At3g07700/F17A17.4 [Arabidopsis thaliana]
  misc_feature (362)..(552): Homolog of NCBI NO: 15983801 NR Description: At3g07700/F17A17.4 [Arabidopsis thaliana]
  misc_feature (1)..(344): Homolog of NCBI NO: 19424003 NR Description: unknown protein [Arabidopsis thaliana]
  misc_feature (362)..(552): Homolog of NCBI NO: 19424003 NR Description: unknown protein [Arabidopsis thaliana]
  misc_feature (1)..(344): Homolog of NCBI NO: 6648182 NR Description: unknown protein [Arabidopsis thaliana]
  misc_feature (1)..(358): Homolog of NCBI NO: 13605698 NR Description: AT5g64940/MXK3_17 [Arabidopsis thaliana]
  misc_feature (1)..(344): Homolog of NCBI NO: 18398032 NR Description: expressed protein
  misc_feature (1)..(344): Homolog of NCBI NO: 21618050 NR Description: unknown [Arabidopsis thaliana]
  misc_feature (362)..(552): Homolog of NCBI NO: 18398032 NR Description: expressed protein
  misc_feature (362)..(552): Homolog of NCBI NO: 21618050 NR Description: unknown [Arabidopsis thaliana]
  misc_feature (1)..(358): Homolog of NCBI NO: 13605698 NR Description: AT5g64940/MXK3_17 [Arabidopsis thaliana]
  misc_feature (1)..(344): Homolog of NCBI NO: 18398032 NR Description: expressed protein
  misc_feature (1)..(344): Homolog of NCBI NO: 21618050 NR Description: unknown [Arabidopsis thaliana]
  misc_feature (362)..(552): Homolog of NCBI NO: 18398032 NR Description: expressed protein
  misc_feature (362)..(552): Homolog of NCBI NO: 21618050 NR Description: unknown [Arabidopsis thaliana]
  misc_feature (1)..(344): Homolog of NCBI NO: 15983801 NR Description: At3g07700/F17A17.4 [Arabidopsis thaliana]
  misc_feature (362)..(552): Homolog of NCBI NO: 15983801 NR Description: At3g07700/F17A17.4 [Arabidopsis thaliana]
  misc_feature (362)..(552): Homolog of NCBI NO: 19424003 NR Description: unknown protein [Arabidopsis thaliana]
  misc_feature (362)..(552): Homolog of NCBI NO: 21618050 NR Description: unknown [Arabidopsis thaliana]
  misc_feature (362)..(552): Homolog of NCBI NO: 18398032 NR Description: expressed protein
  misc_feature (1)..(344): Homolog of NCBI NO: 21618050 NR Description: unknown [Arabidopsis thaliana]
  misc_feature (1)..(344): Homolog of NCBI NO: 18398032 NR Description: expressed protein
  misc_feature (1)..(358): Homolog of NCBI NO: 13605698 NR Description: AT5g64940/MXK3_17 [Arabidopsis thaliana]

SEQ ID NO: 47886 - DNA, 1701 bp, Arabidopsis thaliana
  misc_feature (1)..(1701): Ceres Seq. ID no. 13648881
  misc_feature: MA Experiment ID: 20001451 Result: Down-regulated in Transcription
  misc_feature: MA Experiment 20001451 PARAMETER Experiment Name: At_Far-red-induction_P Parameter: Age (day) Value: 7
  misc_feature: MA Experiment 20001451 PARAMETER Experiment Name: At_Far-red-induction_P Parameter: Light Value: Far-red vs. White
  misc_feature: MA Experiment 20001451 PARAMETER Experiment Name: At_Far-red-induction_P Parameter: Organism Value: A. thaliana
  misc_feature: MA Experiment 20001451 PARAMETER Experiment Name: At_Far-red-induction_P Parameter: Plant Line Value: Columbia
  misc_feature: MA Experiment 20001451 PARAMETER Experiment Name: At_Far-red-induction_P Parameter: Timepoint (hr) Value: 24
  misc_feature: MA Experiment 20001451 PARAMETER Experiment Name: At_Far-red-induction_P Parameter: Tissue Value: Whole Plant
ctgcttcgtccaagttagtcgccggagacgacaaagagcacctgaattggtgcgagaaaagattcctacttctgagaccatcttcacaaacgtgtagcaaagacgaagcctttgagttttctctttctgttacttagaaaatagctgattttgaacctggagctgagttccgtgtgtgattacttaattcggttatggctgcaccaaacgttcgtagtagtagcagcttctctcgcaacatatcagttgtgtcatcgcctcaaattcctggtctcaaaagtggtcctaatggcacagcttttatatcgtcagggattcgtgatcttgacaggatactaggtggtgggtatcctttgggaagcttagtaatggtaatggaagatcctgaagcaccgcatcatatggatctgttaagaacttacatgtctcaggggcttgttaacaatcaaccacttctttatgctagtccttcaaaagatccaaaagggtttcttggtactttgccgcatcctgcatcatccaaagaggataagcctactgcgcccgaccctgatcagggagagagcttgaggattgcttggcagtatcggaagtatttggaaaaccagaagaatgctattgatgattactccaatgactttgatatgagaaagcccttggagaggcaatttctgagcggacggcccatagattgtgtcagtctgttagactcttcagatctttccattgctcaggaccactgtgctacgtttttatcaaaatttccaaggttgtgtggcatcctttcttatttgatctcaattactcgctctagtttcgaatcaataaattttgttggtcatacctatgcagcaaattctgctcaagctcaattctttttacatctctcttatacttccaagctcagtttgtttatattgttttagtttgttactgagtcagttattgttcaaattcttctcttatttactggctttgttaagtagattgtcctttttttcttaagaacctgtgtattgtttcccacagaaacagcagtaacattgcatctattggccgcatcgcaatccagtctttttgctctcccctgtgtgagtattctgaaaaggaatcagacatgctctcattcataagattgctgaaaagtatgcttatggtttcaaatgcggtagccattgttactttcccgccttccctgctctccccatcttcctctaaaagactgcagcatatggcagataccttgctctctatcaaagcaatcccagatggtgacaaggaattggagaaactcctcactggctacaaggatataaatggattcctcaacatacacaaggttgctcgtatcaacacacaggtgcctgtaattcttgaggcaaaaaccttctcaatgagcttgaagaagagaagattcttggctctagagtgtctgaatcaagcccctgtagacgggtccagtggaacatcgtatggcacatctggtagctgctcatccaaatccggagcactagatttttgagttgctgagttagtctttcttttcttcttcttagtttttttttttccctctccattgagttctctaagttcactcactaacctgagcagttacattattattatagtctttggtcttaaaaacagttttgacagcaatatgttttgtttttataatgaaatttatttcatttctgtatc

SEQ ID NO: 47887 - protein, 243 aa, Arabidopsis thaliana
  peptide (1)..(243): Ceres Seq. ID no. 15219387
  misc_feature (10)..(208): Pfam Name: PAXNEB protein Pfam Description: PAXNEB protein
  misc_feature (10)..(160): Homolog of NCBI NO: 19920758 NR Description: CG6907-PA [Drosophila melanogaster]
  misc_feature (1)..(208): Homolog of NCBI NO: 31542608 NR Description: elongation protein 4 homolog [Mus musculus]
  misc_feature (1)..(208): Homolog of NCBI NO: 10129788 NR Description: Paxneb protein [Mus musculus]
  misc_feature (1)..(208): Homolog of NCBI NO: 26347749 NR Description: unnamed protein product [Mus musculus]
  misc_feature (1)..(208): Homolog of NCBI NO: 26329633 NR Description: unnamed protein product [Mus musculus]
  misc_feature (1)..(161): Homolog of NCBI NO: 34858115 NR Description: similar to Paxneb protein [Rattus norvegicus]
  misc_feature (1)..(208): Homolog of NCBI NO: 12861422 NR Description: unnamed protein product [Mus musculus]
  misc_feature (1)..(243): Homolog of NCBI NO: 17063185 NR Description: AT3g11220/F11B9_116 [Arabidopsis thaliana]
  misc_feature (1)..(243): Homolog of NCBI NO: 18399153 NR Description: expressed protein [Arabidopsis thaliana]
  misc_feature (1)..(208): Homolog of NCBI NO: 12321866 NR Description: hypothetical protein; 53156-50996 [Arabidopsis
MAAPNVRSSSSFSRNISVVSSPQIPGLKSGPNGTAFISSGIRDLDRILGGGYPLGSLVMVMEDPEAPHHMDLLRTYMSQGLVNNQPLLYASPSKDPKGFLGTLPHPASSKEDKPTAPDPDQGESLRIAWQYRKYLENQKNAIDDYSNDFDMRKPLERQFLSGRPIDCVSLLDSSDLSIAQDHCATFLSKFPRLCGILSYLISITRSSFESINFVGHTYAANSAQAQFFLHLSYTSKLSLFILF

SEQ ID NO: 47888 - protein, 185 aa, Arabidopsis thaliana
  peptide (1)..(185): Ceres Seq. ID no. 15219388
  misc_feature (1)..(150): Pfam Name: PAXNEB protein Pfam Description: PAXNEB protein
  misc_feature (1)..(102): Homolog of NCBI NO: 19920758 NR Description: CG6907-PA [Drosophila melanogaster]
  misc_feature (1)..(150): Homolog of NCBI NO: 31542608 NR Description: elongation protein 4 homolog [Mus musculus]
  misc_feature (1)..(150): Homolog of NCBI NO: 10129788 NR Description: Paxneb protein [Mus musculus]
  misc_feature (1)..(150): Homolog of NCBI NO: 26347749 NR Description: unnamed protein product [Mus musculus]
  misc_feature (1)..(150): Homolog of NCBI NO: 26329633 NR Description: unnamed protein product [Mus musculus]
  misc_feature (1)..(103): Homolog of NCBI NO: 34858115 NR Description: similar to Paxneb protein [Rattus norvegicus]
  misc_feature (1)..(150): Homolog of NCBI NO: 12861422 NR Description: unnamed protein product [Mus musculus]
  misc_feature (1)..(185): Homolog of NCBI NO: 17063185 NR Description: AT3g11220/F11B9_116 [Arabidopsis thaliana]
  misc_feature (1)..(185): Homolog of NCBI NO: 18399153 NR Description: expressed protein [Arabidopsis thaliana]
  misc_feature (1)..(150): Homolog of NCBI NO: 12321866 NR Description: hypothetical protein; 53156-50996 [Arabidopsis
MVMEDPEAPHHMDLLRTYMSQGLVNNQPLLYASPSKDPKGFLGTLPHPASSKEDKPTAPDPDQGESLRIAWQYRKYLENQKNAIDDYSNDFDMRKPLERQFLSGRPIDCVSLLDSSDLSIAQDHCATFLSKFPRLCGILSYLISITRSSFESINFVGHTYAANSAQAQFFLHLSYTSKLSLFILF

SEQ ID NO: 47889 - protein, 183 aa, Arabidopsis thaliana
  peptide (1)..(183): Ceres Seq. ID no. 15219389
  misc_feature (1)..(148): Pfam Name: PAXNEB protein Pfam Description: PAXNEB protein
  misc_feature (1)..(100): Homolog of NCBI NO: 19920758 NR Description: CG6907-PA [Drosophila melanogaster]
  misc_feature (1)..(148): Homolog of NCBI NO: 31542608 NR Description: elongation protein 4 homolog [Mus musculus]
  misc_feature (1)..(148): Homolog of NCBI NO: 10129788 NR Description: Paxneb protein [Mus musculus]
  misc_feature (1)..(148): Homolog of NCBI NO: 26347749 NR Description: unnamed protein product [Mus musculus]
  misc_feature (1)..(148): Homolog of NCBI NO: 26329633 NR Description: unnamed protein product [Mus musculus]
  misc_feature (1)..(101): Homolog of NCBI NO: 34858115 NR Description: similar to Paxneb protein [Rattus norvegicus]
  misc_feature (1)..(148): Homolog of NCBI NO: 12861422 NR Description: unnamed protein product [Mus musculus]
  misc_feature (1)..(183): Homolog of NCBI NO: 17063185 NR Description: AT3g11220/F11B9_116 [Arabidopsis thaliana]
  misc_feature (1)..(183): Homolog of NCBI NO: 18399153 NR Description: expressed protein [Arabidopsis thaliana]
  misc_feature (1)..(148): Homolog of NCBI NO: 12321866 NR Description: hypothetical protein; 53156-50996 [Arabidopsis
MEDPEAPHHMDLLRTYMSQGLVNNQPLLYASPSKDPKGFLGTLPHPASSKEDKPTAPDPDQGESLRIAWQYRKYLENQKNAIDDYSNDFDMRKPLERQFLSGRPIDCVSLLDSSDLSIAQDHCATFLSKFPRLCGILSYLISITRSSFESINFVGHTYAANSAQAQFFLHLSYTSKLSLFILF

SEQ ID NO: 47890 - DNA, 926 bp, Arabidopsis thaliana
  misc_feature (1)..(926): Ceres Seq. ID no. 13648882
  misc_feature: MA Experiment ID: 20000173 Result: Down-regulated in Transcription
  misc_feature: MA Experiment 20000173 PARAMETER Experiment Name: At_42deg_Heat_P Parameter: Age (day) Value: 14
  misc_feature: MA Experiment 20000173 PARAMETER Experiment Name: At_42deg_Heat_P Parameter: Organism Value: A. thaliana
  misc_feature: MA Experiment 20000173 PARAMETER Experiment Name: At_42deg_Heat_P Parameter: Plant Line Value: WS
  misc_feature: MA Experiment 20000173 PARAMETER Experiment Name: At_42deg_Heat_P Parameter: Temperature (deg C) Value: 42 vs. 22
  misc_feature: MA Experiment 20000173 PARAMETER Experiment Name: At_42deg_Heat_P Parameter: Timepoint (hr) Value: 6
  misc_feature: MA Experiment 20000173 PARAMETER Experiment Name: At_42deg_Heat_P Parameter: Tissue Value: Aerial
  misc_feature: MA Experiment ID: 20000182 Result: Down-regulated in Transcription
  misc_feature: MA Experiment 20000182 PARAMETER Experiment Name: At_2mM_SA_P Parameter: Age (day) Value: 14
  misc_feature: MA Experiment 20000182 PARAMETER Experiment Name: At_2mM_SA_P Parameter: Organism Value: A. thaliana
  misc_feature: MA Experiment 20000182 PARAMETER Experiment Name: At_2mM_SA_P Parameter: Plant Line Value: WS
  misc_feature: MA Experiment 20000182 PARAMETER Experiment Name: At_2mM_SA_P Parameter: Timepoint (hr) Value: 6
  misc_feature: MA Experiment 20000182 PARAMETER Experiment Name: At_2mM_SA_P Parameter: Tissue Value: Aerial
  misc_feature: MA Experiment 20000182 PARAMETER Experiment Name: At_2mM_SA_P Parameter: Treatment Value: 2mM SA vs. No Treatment
  misc_feature: MA Experiment ID: 20000184 Result: Down-regulated in Transcription
  misc_feature: MA Experiment 20000184 PARAMETER Experiment Name: At_Shoots__P Parameter: Age (day) Value: 7
  misc_feature: MA Experiment 20000184 PARAMETER Experiment Name: At_Shoots__P Parameter: Tissue Value: Shoots vs. Whole Plant
  misc_feature: MA Experiment ID: 20000264 Result: Down-regulated in Transcription
  misc_feature: MA Experiment 20000264 PARAMETER Experiment Name: At_Open_Flower_P Parameter: Age (day) Value: 21
  misc_feature: MA Experiment 20000264 PARAMETER Experiment Name: At_Open_Flower_P Parameter: Plant Line Value: WS
  misc_feature: MA Experiment 20000264 PARAMETER Experiment Name: At_Open_Flower_P Parameter: Tissue Value: Open Flower vs. Whole Plant
  misc_feature: MA Experiment ID: 20000267 Result: Down-regulated in Transcription
  misc_feature: MA Experiment 20000267 PARAMETER Experiment Name: At_Drought_P Parameter: Age (day) Value: 7
  misc_feature: MA Experiment 20000267 PARAMETER Experiment Name: At_Drought_P Parameter: Organism Value: A. thaliana
  misc_feature: MA Experiment 20000267 PARAMETER Experiment Name: At_Drought_P Parameter: Plant Line Value: WS
  misc_feature: MA Experiment 20000267 PARAMETER Experiment Name: At_Drought_P Parameter: Timepoint (hr) Value: 6
  misc_feature: MA Experiment 20000267 PARAMETER Experiment Name: At_Drought_P Parameter: Tissue Value: Whole Plant
  misc_feature: MA Experiment 20000267 PARAMETER Experiment Name: At_Drought_P Parameter: Treatment Value: Drought vs. No Drought
  misc_feature: MA Experiment ID: 20000268 Result: Down-regulated in Transcription
  misc_feature: MA Experiment 20000268 PARAMETER Experiment Name: At_100mM_NaCl__P Parameter: Age (day) Value: 14
  misc_feature: MA Experiment 20000268 PARAMETER Experiment Name: At_100mM_NaCl__P Parameter: Organism Value: A. thaliana
  misc_feature: MA Experiment 20000268 PARAMETER Experiment Name: At_100mM_NaCl__P Parameter: Plant Line Value: WS
  misc_feature: MA Experiment 20000268 PARAMETER Experiment Name: At_100mM_NaCl__P Parameter: Timepoint (hr) Value: 6
  misc_feature: MA Experiment 20000268 PARAMETER Experiment Name: At_100mM_NaCl__P Parameter: Tissue Value: Whole Plant
  misc_feature: MA Experiment 20000268 PARAMETER Experiment Name: At_100mM_NaCl__P Parameter: Treatment Value: 100mM NaCl vs. No Treatment
  misc_feature: MA Experiment ID: 20000308 Result: Down-regulated in Transcription
  misc_feature: MA Experiment 20000308 PARAMETER Experiment Name: At_100mM_NaCl__P Parameter: Age (day) Value: 17
  misc_feature: MA Experiment 20000308 PARAMETER Experiment Name: At_100mM_NaCl__P Parameter: Organism Value: A. thaliana
  misc_feature: MA Experiment 20000308 PARAMETER Experiment Name: At_100mM_NaCl__P Parameter: Plant Line Value: WS
  misc_feature: MA Experiment 20000308 PARAMETER Experiment Name: At_100mM_NaCl__P Parameter: Timepoint (hr) Value: 72
  misc_feature: MA Experiment 20000308 PARAMETER Experiment Name: At_100mM_NaCl__P Parameter: Tissue Value: Whole Plant
  misc_feature: MA Experiment 20000308 PARAMETER Experiment Name: At_100mM_NaCl__P Parameter: Treatment Value: 100mM NaCl vs. No Treatment
  misc_feature: MA Experiment ID: 20000436 Result: Down-regulated in Transcription
  misc_feature: MA Experiment 20000436 PARAMETER Experiment Name: At_Drought_P Parameter: Age (day) Value: 7
  misc_feature: MA Experiment 20000436 PARAMETER Experiment Name: At_Drought_P Parameter: Organism Value: A. thaliana
  misc_feature: MA Experiment 20000436 PARAMETER Experiment Name: At_Drought_P Parameter: Plant Line Value: WS
  misc_feature: MA Experiment 20000436 PARAMETER Experiment Name: At_Drought_P Parameter: Timepoint (hr) Value: 12
  misc_feature: MA Experiment 20000436 PARAMETER Experiment Name: At_Drought_P Parameter: Tissue Value: Whole Plant
  misc_feature: MA Experiment 20000436 PARAMETER Experiment Name: At_Drought_P Parameter: Treatment Value: Drought vs. No Drought
  misc_feature: MA Experiment ID: 20000437 Result: Down-regulated in Transcription
  misc_feature: MA Experiment 20000437 PARAMETER Experiment Name: At_Drought_P Parameter: Age (day) Value: 8
  misc_feature: MA Experiment 20000437 PARAMETER Experiment Name: At_Drought_P Parameter: Organism Value: A. thaliana
  misc_feature: MA Experiment 20000437 PARAMETER Experiment Name: At_Drought_P Parameter: Plant Line Value: WS
  misc_feature: MA Experiment 20000437 PARAMETER Experiment Name: At_Drought_P Parameter: Timepoint (hr) Value: 24
  misc_feature: MA Experiment 20000437 PARAMETER Experiment Name: At_Drought_P Parameter: Tissue Value: Whole Plant
  misc_feature: MA Experiment 20000437 PARAMETER Experiment Name: At_Drought_P Parameter: Treatment Value: Drought vs. No Drought
  misc_feature: MA Experiment ID: 20000438 Result: Down-regulated in Transcription
  misc_feature: MA Experiment 20000438 PARAMETER Experiment Name: At_Shoots__P Parameter: Age (day) Value: 14
  misc_feature: MA Experiment 20000438 PARAMETER Experiment Name: At_Shoots__P Parameter: Tissue Value: Shoots vs. Whole Plant
  misc_feature: MA Experiment ID: 20000439 Result: Down-regulated in Transcription
  misc_feature: MA Experiment 20000439 PARAMETER Experiment Name: At_Roots__P Parameter: Age (day) Value: 14 vs. 21
  misc_feature: MA Experiment 20000439 PARAMETER Experiment Name: At_Roots__P Parameter: Organism Value: A. thaliana
  misc_feature: MA Experiment 20000439 PARAMETER Experiment Name: At_Roots__P Parameter: Tissue Value: Roots vs. Whole Plant
  misc_feature: MA Experiment ID: 20000527 Result: Up-regulated in Transcription
  misc_feature: MA Experiment 20000527 PARAMETER Experiment Name: At_10percent_PEG_P Parameter: Age (day) Value: 20
  misc_feature: MA Experiment 20000527 PARAMETER Experiment Name: At_10percent_PEG_P Parameter: Organism Value: A. thaliana
  misc_feature: MA Experiment 20000527 PARAMETER Experiment Name: At_10percent_PEG_P Parameter: Plant Line Value: WS
  misc_feature: MA Experiment 20000527 PARAMETER Experiment Name: At_10percent_PEG_P Parameter: Timepoint (day) Value: 20
  misc_feature: MA Experiment 20000527 PARAMETER Experiment Name: At_10percent_PEG_P Parameter: Tissue Value: Whole Plant
  misc_feature: MA Experiment 20000527 PARAMETER Experiment Name: At_10percent_PEG_P Parameter: Treatment Value: 10percent PEG vs. No Treatment
  misc_feature: MA Experiment ID: 20000794 Result: Down-regulated in Transcription
  misc_feature: MA Experiment 20000794 PARAMETER Experiment Name: At_Petals_P Parameter: Age (day) Value: 23-25 days
  misc_feature: MA Experiment 20000794 PARAMETER Experiment Name: At_Petals_P Parameter: Plant Line Value: WS
  misc_feature: MA Experiment 20000794 PARAMETER Experiment Name: At_Petals_P Parameter: Tissue Value: Petals vs. Whole plant
  misc_feature: MA Experiment ID: 20001247 Result: Up-regulated in Transcription
  misc_feature: MA Experiment 20001247 PARAMETER Experiment Name: At_Far-red-induction_P Parameter: Age (day) Value: 7
  misc_feature: MA Experiment 20001247 PARAMETER Experiment Name: At_Far-red-induction_P Parameter: Light Value: Far-red vs. White
  misc_feature: MA Experiment 20001247 PARAMETER Experiment Name: At_Far-red-induction_P Parameter: Organism Value: A. thaliana
  misc_feature: MA Experiment 20001247 PARAMETER Experiment Name: At_Far-red-induction_P Parameter: Plant Line Value: Columbia
  misc_feature: MA Experiment 20001247 PARAMETER Experiment Name: At_Far-red-induction_P Parameter: Timepoint (hr) Value: 1
  misc_feature: MA Experiment 20001247 PARAMETER Experiment Name: At_Far-red-induction_P Parameter: Tissue Value: Whole Plant
  misc_feature: MA Experiment ID: 20001248 Result: Up-regulated in Transcription
  misc_feature: MA Experiment 20001248 PARAMETER Experiment Name: At_Far-red-induction_P Parameter: Age (day) Value: 7
  misc_feature: MA Experiment 20001248 PARAMETER Experiment Name: At_Far-red-induction_P Parameter: Light Value: Far-red vs. White
  misc_feature: MA Experiment 20001248 PARAMETER Experiment Name: At_Far-red-induction_P Parameter: Organism Value: A. thaliana
  misc_feature: MA Experiment 20001248 PARAMETER Experiment Name: At_Far-red-induction_P Parameter: Plant Line Value: Columbia
  misc_feature: MA Experiment 20001248 PARAMETER Experiment Name: At_Far-red-induction_P Parameter: Timepoint (hr) Value: 4
  misc_feature: MA Experiment 20001248 PARAMETER Experiment Name: At_Far-red-induction_P Parameter: Tissue Value: Whole Plant
  misc_feature: MA Experiment ID: 20001451 Result: Up-regulated in Transcription
  misc_feature: MA Experiment 20001451 PARAMETER Experiment Name: At_Far-red-induction_P Parameter: Age (day) Value: 7
  misc_feature: MA Experiment 20001451 PARAMETER Experiment Name: At_Far-red-induction_P Parameter: Light Value: Far-red vs. White
  misc_feature: MA Experiment 20001451 PARAMETER Experiment Name: At_Far-red-induction_P Parameter: Organism Value: A. thaliana
  misc_feature: MA Experiment 20001451 PARAMETER Experiment Name: At_Far-red-induction_P Parameter: Plant Line Value: Columbia
  misc_feature: MA Experiment 20001451 PARAMETER Experiment Name: At_Far-red-induction_P Parameter: Timepoint (hr) Value: 24
  misc_feature: MA Experiment 20001451 PARAMETER Experiment Name: At_Far-red-induction_P Parameter: Tissue Value: Whole Plant
  misc_feature: MA Experiment ID: 20001458 Result: Up-regulated in Transcription
  misc_feature: MA Experiment 20001458 PARAMETER Experiment Name: At_50mM_NH4NO3_L-to-H_P Parameter: Age (day) Value: Undefined
  misc_feature: MA Experiment 20001458 PARAMETER Experiment Name: At_50mM_NH4NO3_L-to-H_P Parameter: Organism Value: Undefined
  misc_feature: MA Experiment 20001458 PARAMETER Experiment Name: At_50mM_NH4NO3_L-to-H_P Parameter: Plant Line Value: Undefined
  misc_feature: MA Experiment 20001458 PARAMETER Experiment Name: At_50mM_NH4NO3_L-to-H_P Parameter: Timepoint (hr) Value: 2
  misc_feature: MA Experiment 20001458 PARAMETER Experiment Name: At_50mM_NH4NO3_L-to-H_P Parameter: Tissue Value: Siliques
  misc_feature: MA Experiment 20001458 PARAMETER Experiment Name: At_50mM_NH4NO3_L-to-H_P Parameter: Treatment Value: 50mM NH4NO3 vs. 100mM Manitol
  misc_feature: MA Experiment ID: 20001554 Result: Down-regulated in Transcription
  misc_feature: MA Experiment 20001554 PARAMETER Experiment Name: At_Drought_Soil_Dry_P Parameter: Age (day) Value: 21
  misc_feature: MA Experiment 20001554 PARAMETER Experiment Name: At_Drought_Soil_Dry_P Parameter: Organism Value: A. thaliana
  misc_feature: MA Experiment 20001554 PARAMETER Experiment Name: At_Drought_Soil_Dry_P Parameter: Plant Line Value: WS
  misc_feature: MA Experiment 20001554 PARAMETER Experiment Name: At_Drought_Soil_Dry_P Parameter: Post Timepoint (hr) Value: None
  misc_feature: MA Experiment 20001554 PARAMETER Experiment Name: At_Drought_Soil_Dry_P Parameter: Post-Treatment Value: None
  misc_feature: MA Experiment 20001554 PARAMETER Experiment Name: At_Drought_Soil_Dry_P Parameter: Timepoint (day) Value: 7
  misc_feature: MA Experiment 20001554 PARAMETER Experiment Name: At_Drought_Soil_Dry_P Parameter: Treatment Value: Drought vs. No Drought
  misc_feature: MA Experiment ID: 20001557 Result: Up-regulated in Transcription
  misc_feature: MA Experiment 20001557 PARAMETER Experiment Name: At_Drought_Soil_Dry_P Parameter: Age (day) Value: 27
  misc_feature: MA Experiment 20001557 PARAMETER Experiment Name: At_Drought_Soil_Dry_P Parameter: Organism Value: A. thaliana
  misc_feature: MA Experiment 20001557 PARAMETER Experiment Name: At_Drought_Soil_Dry_P Parameter: Plant Line Value: WS
  misc_feature: MA Experiment 20001557 PARAMETER Experiment Name: At_Drought_Soil_Dry_P Parameter: Post Timepoint (hr) Value: 3
  misc_feature: MA Experiment 20001557 PARAMETER Experiment Name: At_Drought_Soil_Dry_P Parameter: Post-Treatment Value: Re-Water vs. No Drought
  misc_feature: MA Experiment 20001557 PARAMETER Experiment Name: At_Drought_Soil_Dry_P Parameter: Timepoint (day) Value: 13
  misc_feature: MA Experiment 20001557 PARAMETER Experiment Name: At_Drought_Soil_Dry_P Parameter: Treatment Value: Drought vs. No Drought
  misc_feature: MA Experiment ID: 20001558 Result: Up-regulated in Transcription
  misc_feature: MA Experiment 20001558 PARAMETER Experiment Name: At_Drought_Soil_Dry_P Parameter: Age (day) Value: 27
  misc_feature: MA Experiment 20001558 PARAMETER Experiment Name: At_Drought_Soil_Dry_P Parameter: Organism Value: A. thaliana
  misc_feature: MA Experiment 20001558 PARAMETER Experiment Name: At_Drought_Soil_Dry_P Parameter: Plant Line Value: WS
  misc_feature: MA Experiment 20001558 PARAMETER Experiment Name: At_Drought_Soil_Dry_P Parameter: Post Timepoint (hr) Value: 6
  misc_feature: MA Experiment 20001558 PARAMETER Experiment Name: At_Drought_Soil_Dry_P Parameter: Post-Treatment Value: Re-Water vs. No Drought
  misc_feature: MA Experiment 20001558 PARAMETER Experiment Name: At_Drought_Soil_Dry_P Parameter: Timepoint (day) Value: 13
  misc_feature: MA Experiment 20001558 PARAMETER Experiment Name: At_Drought_Soil_Dry_P Parameter: Treatment Value: Drought vs. No Drought
  misc_feature: MA Experiment ID: 20001560 Result: Up-regulated in Transcription
  misc_feature: MA Experiment 20001560 PARAMETER Experiment Name: At_Drought_Soil_Dry_P Parameter: Age (day) Value: 28
  misc_feature: MA Experiment 20001560 PARAMETER Experiment Name: At_Drought_Soil_Dry_P Parameter: Organism Value: A. thaliana
  misc_feature: MA Experiment 20001560 PARAMETER Experiment Name: At_Drought_Soil_Dry_P Parameter: Plant Line Value: WS
  misc_feature: MA Experiment 20001560 PARAMETER Experiment Name: At_Drought_Soil_Dry_P Parameter: Post Timepoint (hr) Value: None
  misc_feature: MA Experiment 20001560 PARAMETER Experiment Name: At_Drought_Soil_Dry_P Parameter: Post-Treatment Value: None
  misc_feature: MA Experiment 20001560 PARAMETER Experiment Name: At_Drought_Soil_Dry_P Parameter: Timepoint (day) Value: 14
  misc_feature: MA Experiment 20001560 PARAMETER Experiment Name: At_Drought_Soil_Dry_P Parameter: Treatment Value: Drought vs. No Drought
  misc_feature: MA Experiment ID: 20001757 Result: Up-regulated in Transcription
  misc_feature: MA Experiment 20001757 PARAMETER Experiment Name: At_50mM_NH4NO3_L-to-H_P Parameter: Timepoint (hr) Value: 6
  misc_feature: MA Experiment 20001757 PARAMETER Experiment Name: At_50mM_NH4NO3_L-to-H_P Parameter: Tissue Value: Leaf
  misc_feature: MA Experiment 20001757 PARAMETER Experiment Name: At_50mM_NH4NO3_L-to-H_P Parameter: Treatment Value: 50mM NH4NO3 vs 100mM Mannitol
  misc_feature: MA Experiment ID: 20001910 Result: Down-regulated in Transcription
  misc_feature: MA Experiment 20001910 PARAMETER Experiment Name: At_Drought_Reproduction_P Parameter: Age (day) Value: 37
  misc_feature: MA Experiment 20001910 PARAMETER Experiment Name: At_Drought_Reproduction_P Parameter: Organism Value: A. thaliana
  misc_feature: MA Experiment 20001910 PARAMETER Experiment Name: At_Drought_Reproduction_P Parameter: Plant Line Value: WS
  misc_feature: MA Experiment 20001910 PARAMETER Experiment Name: At_Drought_Reproduction_P Parameter: Timepoint (day) Value: 7
  misc_feature: MA Experiment 20001910 PARAMETER Experiment Name: At_Drought_Reproduction_P Parameter: Tissue Value: Flowers
  misc_feature: MA Experiment 20001910 PARAMETER Experiment Name: At_Drought_Reproduction_P Parameter: Treatment Value: Drought vs. No Drought
gacaaagtgttctcttccaatttgatgtcgagaggtcaataaagtgatgagctttttgtgattttttcctcattcaaaatctttgcactttttcactctccttcaatctcaaatttctgagtctttcttggttcactttccttaaacacgatttgacatggatgcaatttcatctcttggaaccaattgtgttctttctggggtttctccattttcacaagagaatcaatcaaaatcgaaactttctccgtttatgagtcttgatttgaaggaacatccaatggcttcagcagatttcaccaaccaaaccttaaccgctttctcttcttcctctgcgtctccttttcaggcaaagacatcatcgattggtatgagtagaggaatgagatggtgggagaagtcaacaaatcacaacatgttagagattcaatctgccaatcatcttgttgactctttgttaaacgctggagatagattggttgttcttgatttctactctcctggttgtggtggctgcaaatctctccacccaaagatatgtcaattggcagaaacaaacccaaatgtgatgtttctgaaagtgaatcaagaagagcttagaacaatgtgtcatggtctaaacgttcatgtgctgcctttctttaagttctatagaggagcagagggtaaagtctgtagcttcagctgcactattgcaactatcaataagttcaagaaagcgttggataagcacggtagtgaaagatgcagcctcggggatgcaaagggattagacgagaaggaactcgcggctttggcatcggttggtgaactgaaaatgaattctttaacaatgcatcaagctagcaacattggttataaaacagaggagcaatatcaaacgatggtgttataaagagatgacttttttcattaaggttcttatt

SEQ ID NO: 47891 - protein, 245 aa, Arabidopsis thaliana
  peptide (1)..(245): Ceres Seq. ID no. 13648883
  misc_feature (77)..(203): Homolog of NCBI NO: 18417441 NR Description: thioredoxin family [Arabidopsis thaliana]
  misc_feature (14)..(192): Homolog of NCBI NO: 21553512 NR Description: putative thioredoxin [Arabidopsis thaliana]
  misc_feature (14)..(192): Homolog of NCBI NO: 15236134 NR Description: thioredoxin family [Arabidopsis thaliana]
  misc_feature (14)..(192): Homolog of NCBI NO: 4973258 NR Description: thioredoxin-like 2 [Arabidopsis thaliana]
  misc_feature (3)..(210): Homolog of NCBI NO: 19071639 NR Description: putative thioredoxin [Oryza sativa (japonica
  misc_feature (69)..(219): Homolog of NCBI NO: 308906 NR Description: thioredoxin
  misc_feature (69)..(214): Homolog of NCBI NO: 34394520 NR Description: putative thioredoxin [Oryza sativa (japonica
  misc_feature (55)..(222): Homolog of NCBI NO: 15225825 NR Description: thioredoxin family [Arabidopsis thaliana]
  misc_feature (32)..(219): Homolog of NCBI NO: 15223262 NR Description: thioredoxin family [Arabidopsis thaliana]
  misc_feature (1)..(245): Homolog of NCBI NO: 15240254 NR Description: thioredoxin family [Arabidopsis thaliana]
MDAISSLGTNCVLSGVSPFSQENQSKSKLSPFMSLDLKEHPMASADFTNQTLTAFSSSSASPFQAKTSSIGMSRGMRWWEKSTNHNMLEIQSANHLVDSLLNAGDRLVVLDFYSPGCGGCKSLHPKICQLAETNPNVMFLKVNQEELRTMCHGLNVHVLPFFKFYRGAEGKVCSFSCTIATINKFKKALDKHGSERCSLGDAKGLDEKELAALASVGELKMNSLTMHQASNIGYKTEEQYQTMVL

SEQ ID NO: 47892 - protein, 213 aa, Arabidopsis thaliana
  peptide (1)..(213): Ceres Seq. ID no. 13648884
  misc_feature (45)..(171): Homolog of NCBI NO: 18417441 NR Description: thioredoxin family [Arabidopsis thaliana]
  misc_feature (1)..(160): Homolog of NCBI NO: 21553512 NR Description: putative thioredoxin [Arabidopsis thaliana]
  misc_feature (1)..(160): Homolog of NCBI NO: 15236134 NR Description: thioredoxin family [Arabidopsis thaliana]
  misc_feature (1)..(160): Homolog of NCBI NO: 4973258 NR Description: thioredoxin-like 2 [Arabidopsis thaliana]
  misc_feature (1)..(178): Homolog of NCBI NO: 19071639 NR Description: putative thioredoxin [Oryza sativa (japonica
  misc_feature (37)..(187): Homolog of NCBI NO: 308906 NR Description: thioredoxin
  misc_feature (37)..(182): Homolog of NCBI NO: 34394520 NR Description: putative thioredoxin [Oryza sativa (japonica
  misc_feature (23)..(190): Homolog of NCBI NO: 15225825 NR Description: thioredoxin family [Arabidopsis thaliana]
  misc_feature (1)..(187): Homolog of NCBI NO: 15223262 NR Description: thioredoxin family [Arabidopsis thaliana]
  misc_feature (1)..(213): Homolog of NCBI NO: 15240254 NR Description: thioredoxin family [Arabidopsis thaliana]
MSLDLKEHPMASADFTNQTLTAFSSSSASPFQAKTSSIGMSRGMRWWEKSTNHNMLEIQSANHLVDSLLNAGDRLVVLDFYSPGCGGCKSLHPKICQLAETNPNVMFLKVNQEELRTMCHGLNVHVLPFFKFYRGAEGKVCSFSCTIATINKFKKALDKHGSERCSLGDAKGLDEKELAALASVGELKMNSLTMHQASNIGYKTEEQYQTMVL

SEQ ID NO: 47893 - protein, 204 aa, Arabidopsis thaliana
  peptide (1)..(204): Ceres Seq. ID no. 13648885
  misc_feature (36)..(162): Homolog of NCBI NO: 18417441 NR Description: thioredoxin family [Arabidopsis thaliana]
  misc_feature (1)..(151): Homolog of NCBI NO: 21553512 NR Description: putative thioredoxin [Arabidopsis thaliana]
  misc_feature (1)..(151): Homolog of NCBI NO: 15236134 NR Description: thioredoxin family [Arabidopsis thaliana]
  misc_feature (1)..(151): Homolog of NCBI NO: 4973258 NR Description: thioredoxin-like 2 [Arabidopsis thaliana]
  misc_feature (1)..(169): Homolog of NCBI NO: 19071639 NR Description: putative thioredoxin [Oryza sativa (japonica
  misc_feature (28)..(178): Homolog of NCBI NO: 308906 NR Description: thioredoxin
  misc_feature (28)..(173): Homolog of NCBI NO: 34394520 NR Description: putative thioredoxin [Oryza sativa (japonica
  misc_feature (14)..(181): Homolog of NCBI NO: 15225825 NR Description: thioredoxin family [Arabidopsis thaliana]
  misc_feature (1)..(178): Homolog of NCBI NO: 15223262 NR Description: thioredoxin family [Arabidopsis thaliana]
  misc_feature (1)..(204): Homolog of NCBI NO: 15240254 NR Description: thioredoxin family [Arabidopsis thaliana]
MASADFTNQTLTAFSSSSASPFQAKTSSIGMSRGMRWWEKSTNHNMLEIQSANHLVDSLLNAGDRLVVLDFYSPGCGGCKSLHPKICQLAETNPNVMFLKVNQEELRTMCHGLNVHVLPFFKFYRGAEGKVCSFSCTIATINKFKKALDKHGSERCSLGDAKGLDEKELAALASVGELKMNSLTMHQASNIGYKTEEQYQTMVL

SEQ ID NO: 47894 - DNA, 1998 bp, Arabidopsis thaliana
  misc_feature (1)..(1998): Ceres Seq. ID no. 12667521
  misc_feature: MA Experiment ID: 20000180 Result: Up-regulated in Transcription
  misc_feature: MA Experiment 20000180 PARAMETER Experiment Name: At_Germinating_Seeds_P Parameter: Age (hr) Value: 24 vs. 0
  misc_feature: MA Experiment 20000180 PARAMETER Experiment Name: At_Germinating_Seeds_P Parameter: Tissue Value: Germinating Seeds
  misc_feature: MA Experiment ID: 20000185 Result: Up-regulated in Transcription
  misc_feature: MA Experiment 20000185 PARAMETER Experiment Name: At_Roots__P Parameter: Age (day) Value: 7 vs. 21
  misc_feature: MA Experiment 20000185 PARAMETER Experiment Name: At_Roots__P Parameter: Organism Value: A. thaliana
  misc_feature: MA Experiment 20000185 PARAMETER Experiment Name: At_Roots__P Parameter: Tissue Value: Roots vs. Whole Plant
  misc_feature: MA Experiment ID: 20000234 Result: Up-regulated in Transcription
  misc_feature: MA Experiment 20000234 PARAMETER Experiment Name: At_Siliques_P Parameter: Age (day) Value: 21
  misc_feature: MA Experiment 20000234 PARAMETER Experiment Name: At_Siliques_P Parameter: Organism Value: A. thaliana
  misc_feature: MA Experiment 20000234 PARAMETER Experiment Name: At_Siliques_P Parameter: Plant Line Value: WS
  misc_feature: MA Experiment 20000234 PARAMETER Experiment Name: At_Siliques_P Parameter: Tissue Value: Less Than 5mm Siliques vs. Whole Plant
  misc_feature: MA Experiment ID: 20000264 Result: Up-regulated in Transcription
  misc_feature: MA Experiment 20000264 PARAMETER Experiment Name: At_Open_Flower_P Parameter: Age (day) Value: 21
  misc_feature: MA Experiment 20000264 PARAMETER Experiment Name: At_Open_Flower_P Parameter: Plant Line Value: WS
  misc_feature: MA Experiment 20000264 PARAMETER Experiment Name: At_Open_Flower_P Parameter: Tissue Value: Open Flower vs. Whole Plant
  misc_feature: MA Experiment ID: 20000495 Result: Up-regulated in Transcription
  misc_feature: MA Experiment 20000495 PARAMETER Experiment Name: At_Guard_Cells_P Parameter: Harvest Date Value: 8/2/2002
  misc_feature: MA Experiment 20000495 PARAMETER Experiment Name: At_Guard_Cells_P Parameter: Organism Value: A. thaliana
  misc_feature: MA Experiment 20000495 PARAMETER Experiment Name: At_Guard_Cells_P Parameter: Tissue Value: Guard Cells vs. Leaves
aaaaaaaaaaaaaaacttttgtctttcccttaatttctctaattttccctcgatttctctggcatcaacagtctcattctcattgatctttcttttttgtagcgagaaagatccatttttttcggttcgttctcttctgggttacgaatcaaagagctacacagacacagacacacactgtttcctgtttctccccggattgcaaacagaactagggtttgttttcacaaattttggatcttttttttgaagaaaagaacaaaatttggatgaaaggaaaccagaaagactcgtcggaaaaaccgatatgggatcggagctcatcaagtacatctatacccggaatgtggtctttaacccgacccggtccaaaacttatggtttggcttatctgtttcattgtcttcacttacattatctacatgcttaagcttgtctctacctcacgctcctgtgacgattccacttctttcaccaccgtctctgctctctccacaaacgtctcttcaaatgtctcgtctttatccacctccttagcttcacggcggcgtaattgggaggaggaagaagaagacacggtggtggataagctgacggatcttaaccacgtggtgtttgggatcgctgcgtcgtctaagctatggaaacagaggaaagagtatatcaagatctggtataaaccaaaacgcatgcgtggctacgtttggttagataaagaggttaaaaagagtcttagtgatgatgatgacgaaaagcttcttcctccggtgaaaatctccggtggaactgcttcgtttccttatactaacaaacaaggacaacgctctgcgttacggatctcgaggattgtttctgaaacgctgcgtttaggtccgaagaatgttaggtggtttgtgatgggtgatgatgatacggtgtttgttattgataatttgattagggtgttgaggaagtatgaccatgagcagatgtattacattgggagcttgtcggaatctcatttacagaacatatttttctcgtatggtatggcttatggtggaggtggatttgctataagctatccattggctaaagctttgagtaagatgcaagatcggtgtatacagaggtatcctgcattgtatggatcagatgatcgcatgcaagcttgtatggctgaacttggtgttccactcactaaagaactcggatttcaccagtacgacgtttacgggaacctctttggccttctcgctgcacacccagtaacaccgttcgtctcgatgcaccacctcgacgtggtggaaccgattttccctaacatgacacgtgtccgcgccctcaagaagattaccgaacctatgaagcttgactcagccgggcttctccagcagtcgatatgctacgacaagcacaagagctggaccatctcggtctcttggggctacgcggttcagatttttcgcggaatattctctccccgagaaatggaaatgccttctagaaccttcttgaattggtacaaacgggcggattacactgcttacgctttcaacactaggccggttagccggaacccgtgtcaaaaaccgtttgtgttttacatgtcgagcacgaaattcgatcagcagctgaacacgacggttagcgaatacacgatacaccgtgtttcacatccttcttgccgatggaagatgacaaacccagctgagattaataccatcgtcgtctacaagaaacccgaccctcatctatgggaaaggtcacctaggaggaattgttgcagagtattacaaacaaagaggaataatacgttatggatcaatgttggtgtatgtagagcaggtgaagtcactgaagttaagtaattttttaatatagtttatttttgtgaaagggaaggaaattagagtttttttaggctgttttaccgctcttaatttcttgccacgttatttaaaatttttattcattgagatcccgccctagttcttctctcagtatatgatcgttcat

SEQ ID NO: 47895 - protein, 526 aa, Arabidopsis thaliana
  peptide (1)..(526): Ceres Seq. ID no. 12667522
  misc_feature (246)..(492): Pfam Name: Protein of unknown function, DUF604 Pfam Description: Protein of unknown function, DUF604
  misc_feature (109)..(524): Homolog of NCBI NO: 15223433 NR Description: hypothetical protein; protein id: At1g01570.1
  misc_feature (36)..(525): Homolog of NCBI NO: 37536418 NR Description: hypothetical protein [Oryza sativa (japonica
  misc_feature (36)..(525): Homolog of NCBI NO: 32488507 NR Description: OSJNBa0011J08.14 [Oryza sativa (japonica
  misc_feature (1)..(104): Homolog of NCBI NO: 7485555 NR Description: hypothetical protein F16G20.190 - Arabidopsis
  misc_feature (109)..(526): Homolog of NCBI NO: 15233347 NR Description: putative protein; protein id: At4g11350.1
  misc_feature (1)..(525): Homolog of NCBI NO: 15238082 NR Description: putative protein; protein id: At5g41460.1
  misc_feature (53)..(222): Homolog of NCBI NO: 7485555 NR Description: hypothetical protein F16G20.190 - Arabidopsis
  misc_feature (230)..(523): Homolog of NCBI NO: 7485555 NR Description: hypothetical protein F16G20.190 - Arabidopsis
  misc_feature (1)..(526): Homolog of NCBI NO: 15529153 NR Description: AT4g23490/F16G20_190 [Arabidopsis thaliana]
  misc_feature (1)..(526): Homolog of NCBI NO: 18416156 NR Description: Expressed protein
MKGNQKDSSEKPIWDRSSSSTSIPGMWSLTRPGPKLMVWLICFIVFTYIIYMLKLVSTSRSCDDSTSFTTVSALSTNVSSNVSSLSTSLASRRRNWEEEEEDTVVDKLTDLNHVVFGIAASSKLWKQRKEYIKIWYKPKRMRGYVWLDKEVKKSLSDDDDEKLLPPVKISGGTASFPYTNKQGQRSALRISRIVSETLRLGPKNVRWFVMGDDDTVFVIDNLIRVLRKYDHEQMYYIGSLSESHLQNIFFSYGMAYGGGGFAISYPLAKALSKMQDRCIQRYPALYGSDDRMQACMAELGVPLTKELGFHQYDVYGNLFGLLAAHPVTPFVSMHHLDVVEPIFPNMTRVRALKKITEPMKLDSAGLLQQSICYDKHKSWTISVSWGYAVQIFRGIFSPREMEMPSRTFLNWYKRADYTAYAFNTRPVSRNPCQKPFVFYMSSTKFDQQLNTTVSEYTIHRVSHPSCRWKMTNPAEINTIVVYKKPDPHLWERSPRRNCCRVLQTKRNNTLWINVGVCRAGEVTEVK

SEQ ID NO: 47896 - protein, 501 aa, Arabidopsis thaliana
  peptide (1)..(501): Ceres Seq. ID no. 12667523
  misc_feature (221)..(467): Pfam Name: Protein of unknown function, DUF604 Pfam Description: Protein of unknown function, DUF604
  misc_feature (84)..(499): Homolog of NCBI NO: 15223433 NR Description: hypothetical protein; protein id: At1g01570.1
  misc_feature (11)..(500): Homolog of NCBI NO: 37536418 NR Description: hypothetical protein [Oryza sativa (japonica
  misc_feature (11)..(500): Homolog of NCBI NO: 32488507 NR Description: OSJNBa0011J08.14 [Oryza sativa (japonica
  misc_feature (1)..(79): Homolog of NCBI NO: 7485555 NR Description: hypothetical protein F16G20.190 - Arabidopsis
  misc_feature (84)..(501): Homolog of NCBI NO: 15233347 NR Description: putative protein; protein id: At4g11350.1
  misc_feature (1)..(500): Homolog of NCBI NO: 15238082 NR Description: putative protein; protein id: At5g41460.1
  misc_feature (28)..(197): Homolog of NCBI NO: 7485555 NR Description: hypothetical protein F16G20.190 - Arabidopsis
  misc_feature (205)..(498): Homolog of NCBI NO: 7485555 NR Description: hypothetical protein F16G20.190 - Arabidopsis
  misc_feature (1)..(501): Homolog of NCBI NO: 15529153 NR Description: AT4g23490/F16G20_190 [Arabidopsis thaliana]
  misc_feature (1)..(501): Homolog of NCBI NO: 18416156 NR Description: Expressed protein
MWSLTRPGPKLMVWLICFIVFTYIIYMLKLVSTSRSCDDSTSFTTVSALSTNVSSNVSSLSTSLASRRRNWEEEEEDTVVDKLTDLNHVVFGIAASSKLWKQRKEYIKIWYKPKRMRGYVWLDKEVKKSLSDDDDEKLLPPVKISGGTASFPYTNKQGQRSALRISRIVSETLRLGPKNVRWFVMGDDDTVFVIDNLIRVLRKYDHEQMYYIGSLSESHLQNIFFSYGMAYGGGGFAISYPLAKALSKMQDRCIQRYPALYGSDDRMQACMAELGVPLTKELGFHQYDVYGNLFGLLAAHPVTPFVSMHHLDVVEPIFPNMTRVRALKKITEPMKLDSAGLLQQSICYDKHKSWTISVSWGYAVQIFRGIFSPREMEMPSRTFLNWYKRADYTAYAFNTRPVSRNPCQKPFVFYMSSTKFDQQLNTTVSEYTIHRVSHPSCRWKMTNPAEINTIVVYKKPDPHLWERSPRRNCCRVLQTKRNNTLWINVGVCRAGEVTEVK

SEQ ID NO: 47897 - protein, 490 aa, Arabidopsis thaliana
  peptide (1)..(490): Ceres Seq. ID no. 12667524
  misc_feature (210)..(456): Pfam Name: Protein of unknown function, DUF604 Pfam Description: Protein of unknown function, DUF604
  misc_feature (73)..(488): Homolog of NCBI NO: 15223433 NR Description: hypothetical protein; protein id: At1g01570.1
  misc_feature (1)..(489): Homolog of NCBI NO: 37536418 NR Description: hypothetical protein [Oryza sativa (japonica
  misc_feature (1)..(489): Homolog of NCBI NO: 32488507 NR Description: OSJNBa0011J08.14 [Oryza sativa (japonica
  misc_feature (1)..(68): Homolog of NCBI NO: 7485555 NR Description: hypothetical protein F16G20.190 - Arabidopsis
  misc_feature (73)..(490): Homolog of NCBI NO: 15233347 NR Description: putative protein; protein id: At4g11350.1
  misc_feature (1)..(489): Homolog of NCBI NO: 15238082 NR Description: putative protein; protein id: At5g41460.1
  misc_feature (17)..(186): Homolog of NCBI NO: 7485555 NR Description: hypothetical protein F16G20.190 - Arabidopsis
  misc_feature (194)..(487): Homolog of NCBI NO: 7485555 NR Description: hypothetical protein F16G20.190 - Arabidopsis
  misc_feature (1)..(490): Homolog of NCBI NO: 15529153 NR Description: AT4g23490/F16G20_190 [Arabidopsis thaliana]
  misc_feature (1)..(490): Homolog of NCBI NO: 18416156 NR Description: Expressed protein
MVWLICFIVFTYIIYMLKLVSTSRSCDDSTSFTTVSALSTNVSSNVSSLSTSLASRRRNWEEEEEDTVVDKLTDLNHVVFGIAASSKLWKQRKEYIKIWYKPKRMRGYVWLDKEVKKSLSDDDDEKLLPPVKISGGTASFPYTNKQGQRSALRISRIVSETLRLGPKNVRWFVMGDDDTVFVIDNLIRVLRKYDHEQMYYIGSLSESHLQNIFFSYGMAYGGGGFAISYPLAKALSKMQDRCIQRYPALYGSDDRMQACMAELGVPLTKELGFHQYDVYGNLFGLLAAHPVTPFVSMHHLDVVEPIFPNMTRVRALKKITEPMKLDSAGLLQQSICYDKHKSWTISVSWGYAVQIFRGIFSPREMEMPSRTFLNWYKRADYTAYAFNTRPVSRNPCQKPFVFYMSSTKFDQQLNTTVSEYTIHRVSHPSCRWKMTNPAEINTIVVYKKPDPHLWERSPRRNCCRVLQTKRNNTLWINVGVCRAGEVTEVK

SEQ ID NO: 47898 - DNA, 1611 bp, Arabidopsis thaliana
  misc_feature (1)..(1611): Ceres Seq. ID no. 13649515
  misc_feature: MA Experiment ID: 20001905 Result: Down-regulated in Transcription
  misc_feature: MA Experiment 20001905 PARAMETER Experiment Name: At_Drought_Reproduction_P Parameter: Age (day) Value: 40
  misc_feature: MA Experiment 20001905 PARAMETER Experiment Name: At_Drought_Reproduction_P Parameter: Organism Value: A. thaliana
  misc_feature: MA Experiment 20001905 PARAMETER Experiment Name: At_Drought_Reproduction_P Parameter: Plant Line Value: WS
  misc_feature: MA Experiment 20001905 PARAMETER Experiment Name: At_Drought_Reproduction_P Parameter: Timepoint (day) Value: 10
  misc_feature: MA Experiment 20001905 PARAMETER Experiment Name: At_Drought_Reproduction_P Parameter: Tissue Value: Rosettes
  misc_feature: MA Experiment 20001905 PARAMETER Experiment Name: At_Drought_Reproduction_P Parameter: Treatment Value: Drought vs. No Drought
  misc_feature: MA Experiment ID: 20001911 Result: Down-regulated in Transcription
  misc_feature: MA Experiment 20001911 PARAMETER Experiment Name: At_Drought_Reproduction_P Parameter: Age (day) Value: 40
  misc_feature: MA Experiment 20001911 PARAMETER Experiment Name: At_Drought_Reproduction_P Parameter: Organism Value: A. thaliana
  misc_feature: MA Experiment 20001911 PARAMETER Experiment Name: At_Drought_Reproduction_P Parameter: Plant Line Value: WS
  misc_feature: MA Experiment 20001911 PARAMETER Experiment Name: At_Drought_Reproduction_P Parameter: Timepoint (day) Value: 10
  misc_feature: MA Experiment 20001911 PARAMETER Experiment Name: At_Drought_Reproduction_P Parameter: Tissue Value: Flowers
  misc_feature: MA Experiment 20001911 PARAMETER Experiment Name: At_Drought_Reproduction_P Parameter: Treatment Value: Drought vs. No Drought
aaatctcgtcgacgacggtgtcgggactgaaagcagagagaaagcaaagtaagctagcttagctaggtccaagatccaagctttggaattttgtaaattgtctccactcttagccgttttaatggaaactgttccaccatctcccattacatggccagatgggggagctctcactaacgactgggtacatgggcttatgtcgtgtttcgaatggtcttcatggaatctacctccttcccagttaccttcactattgcctgtcaacgtctttgattccctcgtcctcaccgctcataaaatcctccacaaagaacgtaactgcgttcatatcgatgatcttgactctgtatccaacgttgttgtggttggtgacattcatggtcagcttcatgaccttcttttcctattgaaagatactggctttccttgtcaaaaccggtgttatgttttcaacggagactatgtggatcgcggtgcttggggacttgaaaccttccttgttctcttgtcctggaaggttttgatgccggacagagtctacctactccgtggtaatcatgagtcaaagtattgtacatctatgtatggtttcgagaaggaagtgcttacaaaatacggagacaagggaaaacatgtgtaccggaaatgtttgggttgctttgaaggtcttcctttggcttccataatttctggacgtgtttatacagcacatggagggcttttccgcagcccagtcttgcctaagcgaacaacaagggggaaaaagaaccgtcgggtagttcttctggaacctgagccgagctcaatgaaactcggtaccttagatgagttgatgcaagctcgaagatcagttcttgatcctccttgggaaggttcaaacttgataccaggagacgttttatggtctgatccttcaatgactccgggcctttcaccaaatgaacagagaggcattggtcttctttggggtcccgattgtacagaggattttttgaagaaatatgaactgaaggtgacaccaaagtagatattgatgcttgtttgcttcccaaatactgatatggatgattggatcaaatgttttacacttattggtgcagttgatcatcagatcacatgaaggtccagatgctagagagaagagaactggtcttggtggaatggacaatggatatacaatagaccacaatgtcgaatccggaaagcttatcactattttcagtgcacctgactatccgcaattccaagcaacagaagagaggtacaaaaacaaaggagcatatattattttgcaggcgcctgatttctcggatcctcaatttcatagtttcgaagctgttaaaccgcgaccaaaggcgcatccatattatgactttgaaaatgtcattgattctgatgatgagatggataagtcagcaatggacaccaataacgaacaaccaaatagctgaccgaagctgaaaaggagtatcttgaattgatgttttttacagttgttgtgattgctcattatttgcaaacataaaatggaatcaaatgtaaagaaaagagatgaagaaaatcatttgtagaattcacatttaagttatgtatggaagatgaagaaataag

SEQ ID NO: 47899 - protein, 301 aa, Arabidopsis thaliana
  peptide (1)..(301): Ceres Seq. ID no. 13649516
  misc_feature (77)..(298): Pfam Name: Calcineurin-like phosphoesterase Pfam Description: Calcineurin-like phosphoesterase
  misc_feature (228)..(297): Homolog of NCBI NO: 1352670 NR Description: SERINE/THREONINE PROTEIN PHOSPHATASE PP2A
  misc_feature (52)..(206): Homolog of NCBI NO: 1352670 NR Description: SERINE/THREONINE PROTEIN PHOSPHATASE PP2A
  misc_feature (228)..(298): Homolog of NCBI NO: 29250851 NR Description: GLP_440_94581_93649 [Giardia lamblia ATCC 50803]
  misc_feature (44)..(207): Homolog of NCBI NO: 29250851 NR Description: GLP_440_94581_93649 [Giardia lamblia ATCC 50803]
  misc_feature (8)..(278): Homolog of NCBI NO: 15238894 NR Description: serine/threonine protein phosphatase [Arabidopsis
  misc_feature (1)..(297): Homolog of NCBI NO: 25405918 NR Description: protein F21D18.16 [imported] - Arabidopsis
  misc_feature (1)..(297): Homolog of NCBI NO: 15221080 NR Description: calcineurin-like phosphoesterase family
  misc_feature (1)..(301): Homolog of NCBI NO: 18424758 NR Description: ser/thr protein phosphatase catalytic subunit
  misc_feature (1)..(298): Homolog of NCBI NO: 11358619 NR Description: phosphoprotein phosphatase (EC 3.1.3.16) PP7
  misc_feature (1)..(298): Homolog of NCBI NO: 30697908 NR Description: ser/thr protein phosphatase catalytic subunit
METVPPSPITWPDGGALTNDWVHGLMSCFEWSSWNLPPSQLPSLLPVNVFDSLVLTAHKILHKERNCVHIDDLDSVSNVVVVGDIHGQLHDLLFLLKDTGFPCQNRCYVFNGDYVDRGAWGLETFLVLLSWKVLMPDRVYLLRGNHESKYCTSMYGFEKEVLTKYGDKGKHVYRKCLGCFEGLPLASIISGRVYTAHGGLFRSPVLPKRTTRGKKNRRVVLLEPEPSSMKLGTLDELMQARRSVLDPPWEGSNLIPGDVLWSDPSMTPGLSPNEQRGIGLLWGPDCTEDFLKKYELKVTPK

SEQ ID NO: 47900 - protein, 276 aa, Arabidopsis thaliana
  peptide (1)..(276): Ceres Seq. ID no. 13649517
  misc_feature (52)..(273): Pfam Name: Calcineurin-like phosphoesterase Pfam Description: Calcineurin-like phosphoesterase
  misc_feature (203)..(272): Homolog of NCBI NO: 1352670 NR Description: SERINE/THREONINE PROTEIN PHOSPHATASE PP2A
  misc_feature (27)..(181): Homolog of NCBI NO: 1352670 NR Description: SERINE/THREONINE PROTEIN PHOSPHATASE PP2A
  misc_feature (203)..(273): Homolog of NCBI NO: 29250851 NR Description: GLP_440_94581_93649 [Giardia lamblia ATCC 50803]
  misc_feature (19)..(182): Homolog of NCBI NO: 29250851 NR Description: GLP_440_94581_93649 [Giardia lamblia ATCC 50803]
  misc_feature (1)..(253): Homolog of NCBI NO: 15238894 NR Description: serine/threonine protein phosphatase [Arabidopsis
  misc_feature (1)..(272): Homolog of NCBI NO: 25405918 NR Description: protein F21D18.16 [imported] - Arabidopsis
  misc_feature (1)..(272): Homolog of NCBI NO: 15221080 NR Description: calcineurin-like phosphoesterase family
  misc_feature (1)..(276): Homolog of NCBI NO: 18424758 NR Description: ser/thr protein phosphatase catalytic subunit
  misc_feature (1)..(273): Homolog of NCBI NO: 11358619 NR Description: phosphoprotein phosphatase (EC 3.1.3.16) PP7
  misc_feature (1)..(273): Homolog of NCBI NO: 30697908 NR Description: ser/thr protein phosphatase catalytic subunit
MSCFEWSSWNLPPSQLPSLLPVNVFDSLVLTAHKILHKERNCVHIDDLDSVSNVVVVGDIHGQLHDLLFLLKDTGFPCQNRCYVFNGDYVDRGAWGLETFLVLLSWKVLMPDRVYLLRGNHESKYCTSMYGFEKEVLTKYGDKGKHVYRKCLGCFEGLPLASIISGRVYTAHGGLFRSPVLPKRTTRGKKNRRVVLLEPEPSSMKLGTLDELMQARRSVLDPPWEGSNLIPGDVLWSDPSMTPGLSPNEQRGIGLLWGPDCTEDFLKKYELKVTPK

SEQ ID NO: 47901 - protein, 167 aa, Arabidopsis thaliana
  peptide (1)..(167): Ceres Seq. ID no. 13649518
  misc_feature (1)..(164): Pfam Name: Calcineurin-like phosphoesterase Pfam Description: Calcineurin-like phosphoesterase
  misc_feature (94)..(163): Homolog of NCBI NO: 1352670 NR Description: SERINE/THREONINE PROTEIN PHOSPHATASE PP2A
  misc_feature (1)..(72): Homolog of NCBI NO: 1352670 NR Description: SERINE/THREONINE PROTEIN PHOSPHATASE PP2A
  misc_feature (94)..(164): Homolog of NCBI NO: 29250851 NR Description: GLP_440_94581_93649 [Giardia lamblia ATCC 50803]
  misc_feature (1)..(73): Homolog of NCBI NO: 29250851 NR Description: GLP_440_94581_93649 [Giardia lamblia ATCC 50803]
  misc_feature (1)..(144): Homolog of NCBI NO: 15238894 NR Description: serine/threonine protein phosphatase [Arabidopsis
  misc_feature (1)..(163): Homolog of NCBI NO: 25405918 NR Description: protein F21D18.16 [imported] - Arabidopsis
  misc_feature (1)..(163): Homolog of NCBI NO: 15221080 NR Description: calcineurin-like phosphoesterase family
  misc_feature (1)..(167): Homolog of NCBI NO: 18424758 NR Description: ser/thr protein phosphatase catalytic subunit
  misc_feature (1)..(164): Homolog of NCBI NO: 11358619 NR Description: phosphoprotein phosphatase (EC 3.1.3.16) PP7
  misc_feature (1)..(164): Homolog of NCBI NO: 30697908 NR Description: ser/thr protein phosphatase catalytic subunit
MPDRVYLLRGNHESKYCTSMYGFEKEVLTKYGDKGKHVYRKCLGCFEGLPLASIISGRVYTAHGGLFRSPVLPKRTTRGKKNRRVVLLEPEPSSMKLGTLDELMQARRSVLDPPWEGSNLIPGDVLWSDPSMTPGLSPNEQRGIGLLWGPDCTEDFLKKYELKVTPK

SEQ ID NO: 47902 - DNA, 1522 bp, Arabidopsis thaliana
  misc_feature (1)..(1522): Ceres Seq. ID no. 13650113
  misc_feature: MA Experiment ID: 20000166 Result: Up-regulated in Transcription
  misc_feature: MA Experiment 20000166 PARAMETER Experiment Name: At_100uM_ABA_P Parameter: Age (day) Value: 14
  misc_feature: MA Experiment 20000166 PARAMETER Experiment Name: At_100uM_ABA_P Parameter: Organism Value: A. thaliana
  misc_feature: MA Experiment 20000166 PARAMETER Experiment Name: At_100uM_ABA_P Parameter: Plant Line Value: WS
  misc_feature: MA Experiment 20000166 PARAMETER Experiment Name: At_100uM_ABA_P Parameter: Timepoint (hr) Value: 1
  misc_feature: MA Experiment 20000166 PARAMETER Experiment Name: At_100uM_ABA_P Parameter: Tissue Value: Aerial
  misc_feature: MA Experiment 20000166 PARAMETER Experiment Name: At_100uM_ABA_P Parameter: Treatment Value: 100uM ABA vs. No Treatment
  misc_feature: MA Experiment ID: 20000171 Result: Down-regulated in Transcription
  misc_feature: MA Experiment 20000171 PARAMETER Experiment Name: At_42deg_Heat_P Parameter: Age (day) Value: 14
  misc_feature: MA Experiment 20000171 PARAMETER Experiment Name: At_42deg_Heat_P Parameter: Organism Value: A. thaliana
  misc_feature: MA Experiment 20000171 PARAMETER Experiment Name: At_42deg_Heat_P Parameter: Plant Line Value: WS
  misc_feature: MA Experiment 20000171 PARAMETER Experiment Name: At_42deg_Heat_P Parameter: Temperature (deg C) Value: 42 vs. 22
  misc_feature: MA Experiment 20000171 PARAMETER Experiment Name: At_42deg_Heat_P Parameter: Timepoint (hr) Value: 1
  misc_feature: MA Experiment 20000171 PARAMETER Experiment Name: At_42deg_Heat_P Parameter: Tissue Value: Aerial
  misc_feature: MA Experiment ID: 20000173 Result: Down-regulated in Transcription
  misc_feature: MA Experiment 20000173 PARAMETER Experiment Name: At_42deg_Heat_P Parameter: Age (day) Value: 14
  misc_feature: MA Experiment 20000173 PARAMETER Experiment Name: At_42deg_Heat_P Parameter: Organism Value: A. thaliana
  misc_feature: MA Experiment 20000173 PARAMETER Experiment Name: At_42deg_Heat_P Parameter: Plant Line Value: WS
  misc_feature: MA Experiment 20000173 PARAMETER Experiment Name: At_42deg_Heat_P Parameter: Temperature (deg C) Value: 42 vs. 22
  misc_feature: MA Experiment 20000173 PARAMETER Experiment Name: At_42deg_Heat_P Parameter: Timepoint (hr) Value: 6
  misc_feature: MA Experiment 20000173 PARAMETER Experiment Name: At_42deg_Heat_P Parameter: Tissue Value: Aerial
  misc_feature: MA Experiment ID: 20000184 Result: Down-regulated in Transcription
  misc_feature: MA Experiment 20000184 PARAMETER Experiment Name: At_Shoots__P Parameter: Age (day) Value: 7
  misc_feature: MA Experiment 20000184 PARAMETER Experiment Name: At_Shoots__P Parameter: Tissue Value: Shoots vs. Whole Plant
  misc_feature: MA Experiment ID: 20000185 Result: Down-regulated in Transcription
  misc_feature: MA Experiment 20000185 PARAMETER Experiment Name: At_Roots__P Parameter: Age (day) Value: 7 vs. 21
  misc_feature: MA Experiment 20000185 PARAMETER Experiment Name: At_Roots__P Parameter: Organism Value: A. thaliana
  misc_feature: MA Experiment 20000185 PARAMETER Experiment Name: At_Roots__P Parameter: Tissue Value: Roots vs. Whole Plant
  misc_feature: MA Experiment ID: 20000227 Result: Down-regulated in Transcription
  misc_feature: MA Experiment 20000227 PARAMETER Experiment Name: At_Root-Tips-vs-Tops_P Parameter: Tissue Value: Root Tips vs. Root Tops
  misc_feature: MA Experiment ID: 20000234 Result: Down-regulated in Transcription
  misc_feature: MA Experiment 20000234 PARAMETER Experiment Name: At_Siliques_P Parameter: Age (day) Value: 21
  misc_feature: MA Experiment 20000234 PARAMETER Experiment Name: At_Siliques_P Parameter: Organism Value: A. thaliana
  misc_feature: MA Experiment 20000234 PARAMETER Experiment Name: At_Siliques_P Parameter: Plant Line Value: WS
  misc_feature: MA Experiment 20000234 PARAMETER Experiment Name: At_Siliques_P Parameter: Tissue Value: Less Than 5mm Siliques vs. Whole Plant
  misc_feature: MA Experiment ID: 20000235 Result: Down-regulated in Transcription
  misc_feature: MA Experiment 20000235 PARAMETER Experiment Name: At_Siliques_P Parameter: Age (day) Value: 21
  misc_feature: MA Experiment 20000235 PARAMETER Experiment Name: At_Siliques_P Parameter: Organism Value: A. thaliana
  misc_feature: MA Experiment 20000235 PARAMETER Experiment Name: At_Siliques_P Parameter: Plant Line Value: WS
  misc_feature: MA Experiment 20000235 PARAMETER Experiment Name: At_Siliques_P Parameter: Tissue Value: 5-10mm Siliques vs. Whole Plant
  misc_feature: MA Experiment ID: 20000264 Result: Down-regulated in Transcription
  misc_feature: MA Experiment 20000264 PARAMETER Experiment Name: At_Open_Flower_P Parameter: Age (day) Value: 21
  misc_feature: MA Experiment 20000264 PARAMETER Experiment Name: At_Open_Flower_P Parameter: Plant Line Value: WS
  misc_feature: MA Experiment 20000264 PARAMETER Experiment Name: At_Open_Flower_P Parameter: Tissue Value: Open Flower vs. Whole Plant
  misc_feature: MA Experiment ID: 20000265 Result: Down-regulated in Transcription
  misc_feature: MA Experiment 20000265 PARAMETER Experiment Name: At_Open_Flower_P Parameter: Age (day) Value: 21
  misc_feature: MA Experiment 20000265 PARAMETER Experiment Name: At_Open_Flower_P Parameter: Plant Line Value: WS
  misc_feature: MA Experiment 20000265 PARAMETER Experiment Name: At_Open_Flower_P Parameter: Tissue Value: Closed Flower vs. Whole Plant
  misc_feature: MA Experiment ID: 20000286 Result: Down-regulated in Transcription
  misc_feature: MA Experiment 20000286 PARAMETER Experiment Name: At_Open_Flower_P Parameter: Age (day) Value: 21
  misc_feature: MA Experiment 20000286 PARAMETER Experiment Name: At_Open_Flower_P Parameter: Plant Line Value: WS
  misc_feature: MA Experiment 20000286 PARAMETER Experiment Name: At_Open_Flower_P Parameter: Tissue Value: Half Open vs. Whole Plant
  misc_feature: MA Experiment ID: 20000495 Result: Down-regulated in Transcription
  misc_feature: MA Experiment 20000495 PARAMETER Experiment Name: At_Guard_Cells_P Parameter: Harvest Date Value: 8/2/2002
  misc_feature: MA Experiment 20000495 PARAMETER Experiment Name: At_Guard_Cells_P Parameter: Organism Value: A. thaliana
  misc_feature: MA Experiment 20000495 PARAMETER Experiment Name: At_Guard_Cells_P Parameter: Tissue Value: Guard Cells vs. Leaves
  misc_feature: MA Experiment ID: 20001558 Result: Down-regulated in Transcription
  misc_feature: MA Experiment 20001558 PARAMETER Experiment Name: At_Drought_Soil_Dry_P Parameter: Age (day) Value: 27
  misc_feature: MA Experiment 20001558 PARAMETER Experiment Name: At_Drought_Soil_Dry_P Parameter: Organism Value: A. thaliana
  misc_feature: MA Experiment 20001558 PARAMETER Experiment Name: At_Drought_Soil_Dry_P Parameter: Plant Line Value: WS
  misc_feature: MA Experiment 20001558 PARAMETER Experiment Name: At_Drought_Soil_Dry_P Parameter: Post Timepoint (hr) Value: 6
  misc_feature: MA Experiment 20001558 PARAMETER Experiment Name: At_Drought_Soil_Dry_P Parameter: Post-Treatment Value: Re-Water vs. No Drought
  misc_feature: MA Experiment 20001558 PARAMETER Experiment Name: At_Drought_Soil_Dry_P Parameter: Timepoint (day) Value: 13
  misc_feature: MA Experiment 20001558 PARAMETER Experiment Name: At_Drought_Soil_Dry_P Parameter: Treatment Value: Drought vs. No Drought
  misc_feature: MA Experiment ID: 20001560 Result: Down-regulated in Transcription
  misc_feature: MA Experiment 20001560 PARAMETER Experiment Name: At_Drought_Soil_Dry_P Parameter: Age (day) Value: 28
  misc_feature: MA Experiment 20001560 PARAMETER Experiment Name: At_Drought_Soil_Dry_P Parameter: Organism Value: A. thaliana
  misc_feature: MA Experiment 20001560 PARAMETER Experiment Name: At_Drought_Soil_Dry_P Parameter: Plant Line Value: WS
  misc_feature: MA Experiment 20001560 PARAMETER Experiment Name: At_Drought_Soil_Dry_P Parameter: Post Timepoint (hr) Value: None
  misc_feature: MA Experiment 20001560 PARAMETER Experiment Name: At_Drought_Soil_Dry_P Parameter: Post-Treatment Value: None
  misc_feature: MA Experiment 20001560 PARAMETER Experiment Name: At_Drought_Soil_Dry_P Parameter: Timepoint (day) Value: 14
  misc_feature: MA Experiment 20001560 PARAMETER Experiment Name: At_Drought_Soil_Dry_P Parameter: Treatment Value: Drought vs. No Drought
  misc_feature: MA Experiment ID: 20001905 Result: Up-regulated in Transcription
  misc_feature: MA Experiment 20001905 PARAMETER Experiment Name: At_Drought_Reproduction_P Parameter: Age (day) Value: 40
  misc_feature: MA Experiment 20001905 PARAMETER Experiment Name: At_Drought_Reproduction_P Parameter: Organism Value: A. thaliana
  misc_feature: MA Experiment 20001905 PARAMETER Experiment Name: At_Drought_Reproduction_P Parameter: Plant Line Value: WS
  misc_feature: MA Experiment 20001905 PARAMETER Experiment Name: At_Drought_Reproduction_P Parameter: Timepoint (day) Value: 10
  misc_feature: MA Experiment 20001905 PARAMETER Experiment Name: At_Drought_Reproduction_P Parameter: Tissue Value: Rosettes
  misc_feature: MA Experiment 20001905 PARAMETER Experiment Name: At_Drought_Reproduction_P Parameter: Treatment Value: Drought vs. No Drought
cgaatcgaatcgatctcatctccaaaaatcttgtattcaaagtttgattttctgggtttcttctgtattatctcgatatttgaaaaaaatggcgaaggaaattgaatcagcgacagatttaggtgatactaacatcaaaggagttcttgttcatggaggaagatattttcaatacaatgtttatggaaacttgtttgaagtttctaataagtatgttcctcctattcgacctattggtagaggagcttcggttttgtctgtgctgcagtagattcggagacacacgaagagattgcgataaagaagataggtaaagcctttgataataaagtagatgcaaagagaacattgagagagattaagctacttcgtcatttagaacacgagaacgttgttgttataaaagatatcattagaccaccaaagaaggaagatttcgttgatgtttatatagtttttgagttaatggatactgatcttcatcagattattcgatcaaaccaatctttgaatgatgatcattgtcagtacttcttgtatcagattctacgaggactcaaatatattcattcagcaaatgttttacatcgtgaccttaagccgagtaatttgcttttgaattcgaattgcgatcttaagattactgactttggtttggcaaggactacatcagaaacagagtatatgacagagtatgttgtaacacgatggtacagagcaccagagctgcttcttaatagttctgagtatacatctgctattgatgtatggtctgttggttgcatatttgctgagattatgacaagggaaccgcttttcccggggaaggattacgttcatcagcttaaacttatcactgagttgataggatcacctgatggagcgagtctagagtttctcagaagcgcgaacgcgagaaaatatgttaaggagctacctaagttcccaagacaaaacttttcagctaggtttcctagtatgaattctacagctatcgatctactagagaaaatgctcgtgtttgatccagtaaaacgtatcacggttgaggaagcactgtgttatccttacttgtcagctcttcacgaccttaacgacgagcctgtttgttccaaccatttcagtttccattttgaggatccgtcttccactgaagaagagataaaggagcttgtgtggctcgaatctgtgaagttcaatcctctgccgagcatttaaaacattatttaagaaggggaaagcaagttttatactctgacattgagcaaaacaaattagtagtgtttaagctctgtttctccttcatctcatgttgatcgttgtttaagctatttcactagttaaaaaagctgtcttgcaactcaagaaattgttctataaggatccttgtaacccaagacatatctttagtagttatgtccattcttattatcaggatgtcttagatagtgttctgtttcttctacatatcatgttgttatcttgtaactcaagaaattaaattaaaaagctatctttgttt

SEQ ID NO: 47903 - protein, 250 aa, Arabidopsis thaliana
  peptide (1)..(250): Ceres Seq. ID no. 15219605
  misc_feature (1)..(203): Pfam Name: Protein kinase domain Pfam Description: Protein kinase domain
  misc_feature (1)..(246): Homolog of NCBI NO: 27312014 NR Description: mitogen-activated protein kinase [Malus
  misc_feature (1)..(250): Homolog of NCBI NO: 2129645 NR Description: mitogen-activated protein kinase 4 (EC 2.7.1.-) -
  misc_feature (1)..(250): Homolog of NCBI NO: 15234152 NR Description: mitogen-activated protein kinase (MAPK), putative
  misc_feature (1)..(250): Homolog of NCBI NO: 2499613 NR Description: MITOGEN-ACTIVATED PROTEIN KINASE HOMOLOG MMK2
  misc_feature (1)..(250): Homolog of NCBI NO: 2129855 NR Description: mitogen-activated protein kinase MMK2 (EC
  misc_feature (1)..(248): Homolog of NCBI NO: 25052804 NR Description: mitogen-activated protein kinase 4 [Petroselinum
  misc_feature (1)..(246): Homolog of NCBI NO: 21165527 NR Description: mitogen-activated protein kinase [Solanum
  misc_feature (1)..(250): Homolog of NCBI NO: 7434325 NR Description: probable protein kinase (EC 2.7.1.-) F8L21.120 -
  misc_feature (1)..(250): Homolog of NCBI NO: 629546 NR Description: mitogen-activated protein kinase 5 (EC 2.7.1.-) -
  misc_feature (1)..(250): Homolog of NCBI NO: 21431796 NR Description: Mitogen-activated protein kinase homolog 5 (MAP
MDTDLHQIIRSNQSLNDDHCQYFLYQILRGLKYIHSANVLHRDLKPSNLLLNSNCDLKITDFGLARTTSETEYMTEYVVTRWYRAPELLLNSSEYTSAIDVWSVGCIFAEIMTREPLFPGKDYVHQLKLITELIGSPDGASLEFLRSANARKYVKELPKFPRQNFSARFPSMNSTAIDLLEKMLVFDPVKRITVEEALCYPYLSALHDLNDEPVCSNHFSFHFEDPSSTEEEIKELVWLESVKFNPLPSI

SEQ ID NO: 47904 - protein, 177 aa, Arabidopsis thaliana
  peptide (1)..(177): Ceres Seq. ID no. 15219606
  misc_feature (1)..(130): Pfam Name: Protein kinase domain Pfam Description: Protein kinase domain
  misc_feature (1)..(173): Homolog of NCBI NO: 27312014 NR Description: mitogen-activated protein kinase [Malus
  misc_feature (1)..(177): Homolog of NCBI NO: 2129645 NR Description: mitogen-activated protein kinase 4 (EC 2.7.1.-) -
  misc_feature (1)..(177): Homolog of NCBI NO: 15234152 NR Description: mitogen-activated protein kinase (MAPK), putative
  misc_feature (1)..(177): Homolog of NCBI NO: 2499613 NR Description: MITOGEN-ACTIVATED PROTEIN KINASE HOMOLOG MMK2
  misc_feature (1)..(177): Homolog of NCBI NO: 2129855 NR Description: mitogen-activated protein kinase MMK2 (EC
  misc_feature (1)..(175): Homolog of NCBI NO: 25052804 NR Description: mitogen-activated protein kinase 4 [Petroselinum
  misc_feature (1)..(173): Homolog of NCBI NO: 21165527 NR Description: mitogen-activated protein kinase [Solanum
  misc_feature (1)..(177): Homolog of NCBI NO: 7434325 NR Description: probable protein kinase (EC 2.7.1.-) F8L21.120 -
  misc_feature (1)..(177): Homolog of NCBI NO: 629546 NR Description: mitogen-activated protein kinase 5 (EC 2.7.1.-) -
  misc_feature (1)..(177): Homolog of NCBI NO: 21431796 NR Description: Mitogen-activated protein kinase homolog 5 (MAP
MTEYVVTRWYRAPELLLNSSEYTSAIDVWSVGCIFAEIMTREPLFPGKDYVHQLKLITELIGSPDGASLEFLRSANARKYVKELPKFPRQNFSARFPSMNSTAIDLLEKMLVFDPVKRITVEEALCYPYLSALHDLNDEPVCSNHFSFHFEDPSSTEEEIKELVWLESVKFNPLPSI

SEQ ID NO: 47905 - protein, 139 aa, Arabidopsis thaliana
  peptide (1)..(139): Ceres Seq. ID no. 15219607
  misc_feature (1)..(92): Pfam Name: Protein kinase domain Pfam Description: Protein kinase domain
  misc_feature (1)..(135): Homolog of NCBI NO: 27312014 NR Description: mitogen-activated protein kinase [Malus
  misc_feature (1)..(139): Homolog of NCBI NO: 2129645 NR Description: mitogen-activated protein kinase 4 (EC 2.7.1.-) -
  misc_feature (1)..(139): Homolog of NCBI NO: 15234152 NR Description: mitogen-activated protein kinase (MAPK), putative
  misc_feature (1)..(139): Homolog of NCBI NO: 2499613 NR Description: MITOGEN-ACTIVATED PROTEIN KINASE HOMOLOG MMK2
  misc_feature (1)..(139): Homolog of NCBI NO: 2129855 NR Description: mitogen-activated protein kinase MMK2 (EC
  misc_feature (1)..(137): Homolog of NCBI NO: 25052804 NR Description: mitogen-activated protein kinase 4 [Petroselinum
  misc_feature (1)..(135): Homolog of NCBI NO: 21165527 NR Description: mitogen-activated protein kinase [Solanum
  misc_feature (1)..(139): Homolog of NCBI NO: 7434325 NR Description: probable protein kinase (EC 2.7.1.-) F8L21.120 -
  misc_feature (1)..(139): Homolog of NCBI NO: 629546 NR Description: mitogen-activated protein kinase 5 (EC 2.7.1.-) -
  misc_feature (1)..(139): Homolog of NCBI NO: 21431796 NR Description: Mitogen-activated protein kinase homolog 5 (MAP
MTREPLFPGKDYVHQLKLITELIGSPDGASLEFLRSANARKYVKELPKFPRQNFSARFPSMNSTAIDLLEKMLVFDPVKRITVEEALCYPYLSALHDLNDEPVCSNHFSFHFEDPSSTEEEIKELVWLESVKFNPLPSI

SEQ ID NO: 47906 - DNA, 2283 bp, Arabidopsis thaliana
  misc_feature (1)..(2283): Ceres Seq. ID no. 13649519
  misc_feature: MA Experiment ID: 20000307 Result: Up-regulated in Transcription
  misc_feature: MA Experiment 20000307 PARAMETER Experiment Name: At_Germinating_Seeds_Sub_P Parameter: Age (hr) Value: 24 vs. 0
  misc_feature: MA Experiment 20000307 PARAMETER Experiment Name: At_Germinating_Seeds_Sub_P Parameter: Organism Value: A. thaliana
  misc_feature: MA Experiment 20000307 PARAMETER Experiment Name: At_Germinating_Seeds_Sub_P Parameter: Plant Line Value: WS
  misc_feature: MA Experiment 20000307 PARAMETER Experiment Name: At_Germinating_Seeds_Sub_P Parameter: Tissue Value: Germinating Seeds
  misc_feature: MA Experiment ID: 20000440 Result: Up-regulated in Transcription
  misc_feature: MA Experiment 20000440 PARAMETER Experiment Name: At_Closed-Flower__Sub_P Parameter: Tissue Value: Closed Flower vs. Whole Plant
atgactacacctgcacaggctcctagggaggaggtgtcactgtctccatcattggcgtcccctccactaatggcgttgcctccaccgcagccttcgtttcccggtgataatgccacttccccaactagagagcccactaatggcaatccaccagagaccacaaacaccccagctcagtcttctcctcctcctgagactccactatcatcaccaccaccagaaccttctcccccatcaccttcactaactggacctcctccgacgacgattccagtatctcctccaccagaaccttctcccccaccacctttaccaactgaagctcctcctccagcgaatccagtatcatcacctccaccagaatcttctcccccgccacctccaccaactgaagctcctcctactactcctattacatcacccagcccgccaacaaatccaccaccaccaccggaaagccctccttcactacctgcaccagaccctccaagcaatccacttccaccacctaagttagtcccaccatcacattcacctccacgtcatttaccttccccgccagcctcagaaattcctcctcctccacgtcatttaccttccccaccagcctcagaacgtccttcaactcctccatcagattcagaacatccttctcctcctcctccagggcatccaaaacgtcgtgagcaacctcctccaccgggttctaaacgtcctactccatcacctccttctccaagtgactcaaaacgtcctgtgcatccttcacctccttctccaccagaggaaactctcccacctcccaagccaagtccagatcccttaccttctaattcgtcttcaccaccaacattgcttccaccatcgtcagttgtatccccgccttcgcctcctcgaaaatctgtgtcaggtcctgataatccatctccaaacaaccccactcctgtgacagataattccagcagttctggtattagtacagcggctgttgtgggtgtaagtattggagtggcccttgtgctgcttactctcattggagttgttgtctgttgcttaaagaaacggaaaaagaggctctcaaccattggtggtggctatgttatgccaacacctatggaatcctcctccccaagatcagattcagcgcttctgaagacgcagtcatccgcacctctagtgggaaatcgttctagcaatcgtacatacttatcacaatcagagcctggtggttttggtcaatcgagggaactgttctcatatgaagaacttgtcatagcaacaaatggattctctgatgaaaatctcttgggtgaaggtggatttggtcgtgtgtataaaggagttttaccagatgaaagagtggttgctgtgaaacaattaaaaataggtggaggacaaggtgaccgagagttcaaagccgaggttgataccataagcagggtacatcaccggaatttgctttctatggttggatactgcatttccgagaaccggagattgcttatttatgattatgtccctaacaacaacctttacttccatcttcacggaactccgggtctagactgggcaacacgtgttaaaattgctgctggtgcggctcgtggactagcttatctccatgaagattgtcaccctcgtatcatacatagggacatcaaatcatccaacattctcttagaaaataacttccatgccctggtttctgacttcggccttgcaaagctagctctcgactgtaacacacatattacaactcgggtcatgggaacattcggctacatggctccggaatatgcatcaagtggcaaattaaccgagaaatcagacgtattctcctttggggttgttctactggagttaatcactggacgtaagcctgtggatgcatcccaacctctgggagatgagagccttgttgaatgggctcgtcctttgcttagtaatgccactgaaaccgaagagtttacagctttagcagatcccaagctaggtagaaactatgttggtgttgaaatgtttagaatgattgaagcagcggcagcttgtattcgccattcagctacaaagagaccccgaatgagtcaaattgtgagagctttcgacagtctagctgaggaagacctcaccaatggaatgagactaggcgaaagcgaaataatcaactcagctcaacagtctgcagaaatcagattgtttagaagaatggcttttggcagccaaaactacagtacagattctttaactcgtaatagttatataagcaaagatgaaaacttgtaa

SEQ ID NO: 47907 - protein, 760 aa, Arabidopsis thaliana
  peptide (1)..(760): Ceres Seq. ID no. 13649520
  misc_feature (430)..(627): Pfam Name: Protein kinase domain Pfam Description: Protein kinase domain
  misc_feature (13)..(247): Homolog of NCBI NO: 25518375 NR Description: hypothetical protein F5O8.10 - Arabidopsis
  misc_feature (44)..(273): Homolog of NCBI NO: 25518375 NR Description: hypothetical protein F5O8.10 - Arabidopsis
  misc_feature (410)..(759): Homolog of NCBI NO: 25518375 NR Description: hypothetical protein F5O8.10 - Arabidopsis
  misc_feature (50)..(297): Homolog of NCBI NO: 13447449 NR Description: receptor protein kinase PERK1 [Brassica napus]
  misc_feature (369)..(744): Homolog of NCBI NO: 13447449 NR Description: receptor protein kinase PERK1 [Brassica napus]
  misc_feature (83)..(729): Homolog of NCBI NO: 15230108 NR Description: protein kinase -related [Arabidopsis thaliana]
  misc_feature (70)..(757): Homolog of NCBI NO: 15223161 NR Description: protein kinase -related [Arabidopsis thaliana]
  misc_feature (60)..(760): Homolog of NCBI NO: 34894174 NR Description: putative protein kinase [Oryza sativa (japonica
  misc_feature (68)..(759): Homolog of NCBI NO: 15240947 NR Description: protein kinase family [Arabidopsis thaliana]
  misc_feature (38)..(760): Homolog of NCBI NO: 15221470 NR Description: protein kinase family [Arabidopsis thaliana]
MTTPAQAPREEVSLSPSLASPPLMALPPPQPSFPGDNATSPTREPTNGNPPETTNTPAQSSPPPETPLSSPPPEPSPPSPSLTGPPPTTIPVSPPPEPSPPPPLPTEAPPPANPVSSPPPESSPPPPPPTEAPPTTPITSPSPPTNPPPPPESPPSLPAPDPPSNPLPPPKLVPPSHSPPRHLPSPPASEIPPPPRHLPSPPASERPSTPPSDSEHPSPPPPGHPKRREQPPPPGSKRPTPSPPSPSDSKRPVHPSPPSPPEETLPPPKPSPDPLPSNSSSPPTLLPPSSVVSPPSPPRKSVSGPDNPSPNNPTPVTDNSSSSGISTAAVVGVSIGVALVLLTLIGVVVCCLKKRKKRLSTIGGGYVMPTPMESSSPRSDSALLKTQSSAPLVGNRSSNRTYLSQSEPGGFGQSRELFSYEELVIATNGFSDENLLGEGGFGRVYKGVLPDERVVAVKQLKIGGGQGDREFKAEVDTISRVHHRNLLSMVGYCISENRRLLIYDYVPNNNLYFHLHGTPGLDWATRVKIAAGAARGLAYLHEDCHPRIIHRDIKSSNILLENNFHALVSDFGLAKLALDCNTHITTRVMGTFGYMAPEYASSGKLTEKSDVFSFGVVLLELITGRKPVDASQPLGDESLVEWARPLLSNATETEEFTALADPKLGRNYVGVEMFRMIEAAAACIRHSATKRPRMSQIVRAFDSLAEEDLTNGMRLGESEIINSAQQSAEIRLFRRMAFGSQNYSTDSLTRNSYISKDENL

SEQ ID NO: 47908 - protein, 737 aa, Arabidopsis thaliana
  peptide (1)..(737): Ceres Seq. ID no. 13649521
  misc_feature (407)..(604): Pfam Name: Protein kinase domain Pfam Description: Protein kinase domain
  misc_feature (1)..(224): Homolog of NCBI NO: 25518375 NR Description: hypothetical protein F5O8.10 - Arabidopsis
  misc_feature (21)..(250): Homolog of NCBI NO: 25518375 NR Description: hypothetical protein F5O8.10 - Arabidopsis
  misc_feature (387)..(736): Homolog of NCBI NO: 25518375 NR Description: hypothetical protein F5O8.10 - Arabidopsis
  misc_feature (27)..(274): Homolog of NCBI NO: 13447449 NR Description: receptor protein kinase PERK1 [Brassica napus]
  misc_feature (346)..(721): Homolog of NCBI NO: 13447449 NR Description: receptor protein kinase PERK1 [Brassica napus]
  misc_feature (60)..(706): Homolog of NCBI NO: 15230108 NR Description: protein kinase -related [Arabidopsis thaliana]
  misc_feature (47)..(734): Homolog of NCBI NO: 15223161 NR Description: protein kinase -related [Arabidopsis thaliana]
  misc_feature (37)..(737): Homolog of NCBI NO: 34894174 NR Description: putative protein kinase [Oryza sativa (japonica
  misc_feature (45)..(736): Homolog of NCBI NO: 15240947 NR Description: protein kinase family [Arabidopsis thaliana]
  misc_feature (15)..(737): Homolog of NCBI NO: 15221470 NR Description: protein kinase family [Arabidopsis thaliana]
MALPPPQPSFPGDNATSPTREPTNGNPPETTNTPAQSSPPPETPLSSPPPEPSPPSPSLTGPPPTTIPVSPPPEPSPPPPLPTEAPPPANPVSSPPPESSPPPPPPTEAPPTTPITSPSPPTNPPPPPESPPSLPAPDPPSNPLPPPKLVPPSHSPPRHLPSPPASEIPPPPRHLPSPPASERPSTPPSDSEHPSPPPPGHPKRREQPPPPGSKRPTPSPPSPSDSKRPVHPSPPSPPEETLPPPKPSPDPLPSNSSSPPTLLPPSSVVSPPSPPRKSVSGPDNPSPNNPTPVTDNSSSSGISTAAVVGVSIGVALVLLTLIGVVVCCLKKRKKRLSTIGGGYVMPTPMESSSPRSDSALLKTQSSAPLVGNRSSNRTYLSQSEPGGFGQSRELFSYEELVIATNGFSDENLLGEGGFGRVYKGVLPDERVVAVKQLKIGGGQGDREFKAEVDTISRVHHRNLLSMVGYCISENRRLLIYDYVPNNNLYFHLHGTPGLDWATRVKIAAGAARGLAYLHEDCHPRIIHRDIKSSNILLENNFHALVSDFGLAKLALDCNTHITTRVMGTFGYMAPEYASSGKLTEKSDVFSFGVVLLELITGRKPVDASQPLGDESLVEWARPLLSNATETEEFTALADPKLGRNYVGVEMFRMIEAAAACIRHSATKRPRMSQIVRAFDSLAEEDLTNGMRLGESEIINSAQQSAEIRLFRRMAFGSQNYSTDSLTRNSYISKDENL

SEQ ID NO: 47909 - protein, 393 aa, Arabidopsis thaliana
  peptide (1)..(393): Ceres Seq. ID no. 13649522
  misc_feature (63)..(260): Pfam Name: Protein kinase domain Pfam Description: Protein kinase domain
  misc_feature (1)..(378): Homolog of NCBI NO: 13877617 NR Description: protein kinase-like protein [Arabidopsis
  misc_feature (1)..(12): Homolog of NCBI NO: 15230130 NR Description: protein kinase -related [Arabidopsis thaliana]
  misc_feature (1)..(378): Homolog of NCBI NO: 15230130 NR Description: protein kinase -related [Arabidopsis thaliana]
  misc_feature (43)..(392): Homolog of NCBI NO: 25518375 NR Description: hypothetical protein F5O8.10 - Arabidopsis
  misc_feature (2)..(377): Homolog of NCBI NO: 13447449 NR Description: receptor protein kinase PERK1 [Brassica napus]
  misc_feature (1)..(362): Homolog of NCBI NO: 15230108 NR Description: protein kinase -related [Arabidopsis thaliana]
  misc_feature (1)..(390): Homolog of NCBI NO: 15223161 NR Description: protein kinase -related [Arabidopsis thaliana]
  misc_feature (1)..(393): Homolog of NCBI NO: 34894174 NR Description: putative protein kinase [Oryza sativa (japonica
  misc_feature (1)..(392): Homolog of NCBI NO: 15240947 NR Description: protein kinase family [Arabidopsis thaliana]
  misc_feature (1)..(393): Homolog of NCBI NO: 15221470 NR Description: protein kinase family [Arabidopsis thaliana]
MPTPMESSSPRSDSALLKTQSSAPLVGNRSSNRTYLSQSEPGGFGQSRELFSYEELVIATNGFSDENLLGEGGFGRVYKGVLPDERVVAVKQLKIGGGQGDREFKAEVDTISRVHHRNLLSMVGYCISENRRLLIYDYVPNNNLYFHLHGTPGLDWATRVKIAAGAARGLAYLHEDCHPRIIHRDIKSSNILLENNFHALVSDFGLAKLALDCNTHITTRVMGTFGYMAPEYASSGKLTEKSDVFSFGVVLLELITGRKPVDASQPLGDESLVEWARPLLSNATETEEFTALADPKLGRNYVGVEMFRMIEAAAACIRHSATKRPRMSQIVRAFDSLAEEDLTNGMRLGESEIINSAQQSAEIRLFRRMAFGSQNYSTDSLTRNSYISKDENL

SEQ ID NO: 47910 - DNA, 1621 bp, Arabidopsis thaliana
  misc_feature (1)..(1621): Ceres Seq. ID no. 13649523
  misc_feature: MA Experiment ID: 108573 Result: Up-regulated in Transcription
  misc_feature: MA Experiment 108573 PARAMETER Experiment Name: At_Drought_cDNA_P Parameter: Timepoint (hr) Value: 6
  misc_feature: MA Experiment 108573 PARAMETER Experiment Name: At_Drought_cDNA_P Parameter: Tissue Value: Aerial
  misc_feature: MA Experiment 108573 PARAMETER Experiment Name: At_Drought_cDNA_P Parameter: Treatment Value: Drought vs. No Drought
  misc_feature: MA Experiment ID: 108607 Result: Up-regulated in Transcription
  misc_feature: MA Experiment 108607 PARAMETER Experiment Name: At_100uM_ABA_cDNA_P Parameter: Timepoint (hr) Value: 4
  misc_feature: MA Experiment 108607 PARAMETER Experiment Name: At_100uM_ABA_cDNA_P Parameter: Tissue Value: Aerial
  misc_feature: MA Experiment 108607 PARAMETER Experiment Name: At_100uM_ABA_cDNA_P Parameter: Treatment Value: 100uM ABA vs. No Treatment
  misc_feature: MA Experiment ID: 20000069 Result: Up-regulated in Transcription
  misc_feature: MA Experiment 20000069 PARAMETER Experiment Name: At_100uM_ABA_Mutants_cDNA_P Parameter: Plant Line Value: CS23
  misc_feature: MA Experiment 20000069 PARAMETER Experiment Name: At_100uM_ABA_Mutants_cDNA_P Parameter: Timepoint (hr) Value: 6
  misc_feature: MA Experiment 20000069 PARAMETER Experiment Name: At_100uM_ABA_Mutants_cDNA_P Parameter: Tissue Value: Aerial
  misc_feature: MA Experiment 20000069 PARAMETER Experiment Name: At_100uM_ABA_Mutants_cDNA_P Parameter: Treatment Value: 100uM ABA vs. No Treatment
  misc_feature: MA Experiment ID: 20000070 Result: Up-regulated in Transcription
  misc_feature: MA Experiment 20000070 PARAMETER Experiment Name: At_100uM_ABA_Mutants_cDNA_P Parameter: Plant Line Value: CS24
  misc_feature: MA Experiment 20000070 PARAMETER Experiment Name: At_100uM_ABA_Mutants_cDNA_P Parameter: Timepoint (hr) Value: 6
  misc_feature: MA Experiment 20000070 PARAMETER Experiment Name: At_100uM_ABA_Mutants_cDNA_P Parameter: Tissue Value: Aerial
  misc_feature: MA Experiment 20000070 PARAMETER Experiment Name: At_100uM_ABA_Mutants_cDNA_P Parameter: Treatment Value: 100uM ABA vs. No Treatment
  misc_feature: MA Experiment ID: 20000071 Result: Up-regulated in Transcription
  misc_feature: MA Experiment 20000071 PARAMETER Experiment Name: At_100uM_ABA_Mutants_cDNA_P Parameter: Plant Line Value: CS8104
  misc_feature: MA Experiment 20000071 PARAMETER Experiment Name: At_100uM_ABA_Mutants_cDNA_P Parameter: Timepoint (hr) Value: 6
  misc_feature: MA Experiment 20000071 PARAMETER Experiment Name: At_100uM_ABA_Mutants_cDNA_P Parameter: Tissue Value: Aerial
  misc_feature: MA Experiment 20000071 PARAMETER Experiment Name: At_100uM_ABA_Mutants_cDNA_P Parameter: Treatment Value: 100uM ABA vs. No Treatment
  misc_feature: MA Experiment ID: 20000072 Result: Up-regulated in Transcription
  misc_feature: MA Experiment 20000072 PARAMETER Experiment Name: At_100uM_ABA_Mutants_cDNA_P Parameter: Plant Line Value: CS8105
  misc_feature: MA Experiment 20000072 PARAMETER Experiment Name: At_100uM_ABA_Mutants_cDNA_P Parameter: Timepoint (hr) Value: 6
  misc_feature: MA Experiment 20000072 PARAMETER Experiment Name: At_100uM_ABA_Mutants_cDNA_P Parameter: Tissue Value: Aerial
  misc_feature: MA Experiment 20000072 PARAMETER Experiment Name: At_100uM_ABA_Mutants_cDNA_P Parameter: Treatment Value: 100uM ABA vs. No Treatment
  misc_feature: MA Experiment ID: 20000184 Result: Down-regulated in Transcription
  misc_feature: MA Experiment 20000184 PARAMETER Experiment Name: At_Shoots__P Parameter: Age (day) Value: 7
  misc_feature: MA Experiment 20000184 PARAMETER Experiment Name: At_Shoots__P Parameter: Tissue Value: Shoots vs. Whole Plant
  misc_feature: MA Experiment ID: 20000437 Result: Up-regulated in Transcription
  misc_feature: MA Experiment 20000437 PARAMETER Experiment Name: At_Drought_P Parameter: Age (day) Value: 8
  misc_feature: MA Experiment 20000437 PARAMETER Experiment Name: At_Drought_P Parameter: Organism Value: A. thaliana
  misc_feature: MA Experiment 20000437 PARAMETER Experiment Name: At_Drought_P Parameter: Plant Line Value: WS
  misc_feature: MA Experiment 20000437 PARAMETER Experiment Name: At_Drought_P Parameter: Timepoint (hr) Value: 24
  misc_feature: MA Experiment 20000437 PARAMETER Experiment Name: At_Drought_P Parameter: Tissue Value: Whole Plant
  misc_feature: MA Experiment 20000437 PARAMETER Experiment Name: At_Drought_P Parameter: Treatment Value: Drought vs. No Drought
  misc_feature: MA Experiment ID: 20000794 Result: Up-regulated in Transcription
  misc_feature: MA Experiment 20000794 PARAMETER Experiment Name: At_Petals_P Parameter: Age (day) Value: 23-25 days
  misc_feature: MA Experiment 20000794 PARAMETER Experiment Name: At_Petals_P Parameter: Plant Line Value: WS
  misc_feature: MA Experiment 20000794 PARAMETER Experiment Name: At_Petals_P Parameter: Tissue Value: Petals vs. Whole plant
aaaatcgcgtcaattctcaacccagttttcagatttggtttttggaagctaacttattgttggaggtggagagatatggctgactttgatgaatatatggctgatgagtatgacatggatgatctcgaggatgatatgaatgccgcgtttgatggaagagatatcgatgcttctgattccgaagtcgaagatttcgatcaattgaacaaggctgcagatacttctgctgctcaagcacggaatgggaaggatattcagggtataccgtgggatagtcttactcttactagaaaagattacagaaaaactaggctagaacaatataaaaactatgaaaatatacccaattctggtgatgaatctgccaagaaatgcatgaatactgagaaaggcagctctttctatgagttcagaaggaattctagatccgtgagatcaacgattctccattttcagttgaggaatttggtctgggctacctcaaaacacgatgtttatttattgtccaactactccatcagccactggtcttctttgacaggttgtaggagtgaaattcttaacgttaaaggtcatgtggctccgtctgagaaacatcccgagagtttgttggaaggatttacagagactcaagttagcactcttgcagtaaaagaaaggctactagttgctggtggattccaaggagaactcatttgcaagcatctcgatagacctggtgtgagcttctgctcacgcacaacttacaccgaaaacgctatcaccaatgcagtagatatatatagaaactccagcggcgcactgcatttcatggcctcaaataatgactgtggagtcagagactttgacatggagagatataagcttgtccaactcttccgttatctatggcccgtcaatcatagttccctaagtcctgatggaaaactagtagcagtcgttggagatgacccagatggtctactggtagacacaagtaacggacagacgatcgggacgctaaaaggtcacttagattattcatttgcatcagcttggcatccaaacggtgtaacatttgccacaggaaaccaagacaagacctgtcgtatttgggacacaaggaaactctcggaatcagtcgctgtcctaaaaggtaaccttggagccgtacggtccattaggttcacatctgacggacggtacgttgccatggccgagccagcagatttcgttcatatctatgacacaaaatcaggatacaaaaaggagcaagagattgatttctttggagagatttctgggatatcgtttagcccagatactgaatctctcttcatcggtgtttgggacaggacttatggaagtctcttggagtatggtcgaaccagagactacacttatctcgattcattactttgatggaaatttaagctaagcctaaagaaaaaaaacttacgtaaaaataatttgttatacgccgtcttggttaggtttcataatcatatcgacaaaagaaaagaaagagagaccatggttcgattcacaagctgttcatttatgtaatttgttgtaaaaattgtacattttccatgaacttgggaatttgtttttgggatcataagtcaaactcacattcttc

SEQ ID NO: 47911 - protein, 466 aa, Arabidopsis thaliana
  peptide (1)..(466): Ceres Seq. ID no. 13649524
  misc_feature (88)..(466): Homolog of NCBI NO: 27948448 NR Description: GAMYB-binding protein [Hordeum vulgare subsp.
  misc_feature (25)..(465): Homolog of NCBI NO: 13937195 NR Description: At1g78070/F28K19_28 [Arabidopsis thaliana]
  misc_feature (54)..(466): Homolog of NCBI NO: 9294540 NR Description: WD domain protein-like [Arabidopsis thaliana]
  misc_feature (25)..(466): Homolog of NCBI NO: 25405994 NR Description: protein F20N2.10 [imported] - Arabidopsis
  misc_feature (25)..(466): Homolog of NCBI NO: 18405485 NR Description: WD-40 repeat protein family [Arabidopsis
  misc_feature (28)..(466): Homolog of NCBI NO: 18399975 NR Description: WD-40 repeat protein family [Arabidopsis
  misc_feature (30)..(466): Homolog of NCBI NO: 9758639 NR Description: WD-repeat protein-like [Arabidopsis thaliana]
  misc_feature (30)..(466): Homolog of NCBI NO: 21536732 NR Description: WD-repeat protein-like [Arabidopsis thaliana]
  misc_feature (30)..(466): Homolog of NCBI NO: 18423837 NR Description: WD-40 repeat protein family [Arabidopsis thaliana]
  misc_feature (26)..(466): Homolog of NCBI NO: 30696707 NR Description: WD-40 repeat protein family [Arabidopsis
KIASILNPVFRFGFWKLTYCWRWRDMADFDEYMADEYDMDDLEDDMNAAFDGRDIDASDSEVEDFDQLNKAADTSAAQARNGKDIQGIPWDSLTLTRKDYRKTRLEQYKNYENIPNSGDESAKKCMNTEKGSSFYEFRRNSRSVRSTILHFQLRNLVWATSKHDVYLLSNYSISHWSSLTGCRSEILNVKGHVAPSEKHPESLLEGFTETQVSTLAVKERLLVAGGFQGELICKHLDRPGVSFCSRTTYTENAITNAVDIYRNSSGALHFMASNNDCGVRDFDMERYKLVQLFRYLWPVNHSSLSPDGKLVAVVGDDPDGLLVDTSNGQTIGTLKGHLDYSFASAWHPNGVTFATGNQDKTCRIWDTRKLSESVAVLKGNLGAVRSIRFTSDGRYVAMAEPADFVHIYDTKSGYKKEQEIDFFGEISGISFSPDTESLFIGVWDRTYGSLLEYGRTRDYTYLDSLL

SEQ ID NO: 47912 - protein, 441 aa, Arabidopsis thaliana
  peptide (1)..(441): Ceres Seq. ID no. 13649525
  misc_feature (63)..(441): Homolog of NCBI NO: 27948448 NR Description: GAMYB-binding protein [Hordeum vulgare subsp.
  misc_feature (1)..(440): Homolog of NCBI NO: 13937195 NR Description: At1g78070/F28K19_28 [Arabidopsis thaliana]
  misc_feature (29)..(441): Homolog of NCBI NO: 9294540 NR Description: WD domain protein-like [Arabidopsis thaliana]
  misc_feature (1)..(441): Homolog of NCBI NO: 25405994 NR Description: protein F20N2.10 [imported] - Arabidopsis
  misc_feature (1)..(441): Homolog of NCBI NO: 18405485 NR Description: WD-40 repeat protein family [Arabidopsis
  misc_feature (3)..(441): Homolog of NCBI NO: 18399975 NR Description: WD-40 repeat protein family [Arabidopsis
  misc_feature (5)..(441): Homolog of NCBI NO: 9758639 NR Description: WD-repeat protein-like [Arabidopsis thaliana]
  misc_feature (5)..(441): Homolog of NCBI NO: 21536732 NR Description: WD-repeat protein-like [Arabidopsis thaliana]
  misc_feature (5)..(441): Homolog of NCBI NO: 18423837 NR Description: WD-40 repeat protein family [Arabidopsis thaliana]
  misc_feature (1)..(441): Homolog of NCBI NO: 30696707 NR Description: WD-40 repeat protein family [Arabidopsis
MADFDEYMADEYDMDDLEDDMNAAFDGRDIDASDSEVEDFDQLNKAADTSAAQARNGKDIQGIPWDSLTLTRKDYRKTRLEQYKNYENIPNSGDESAKKCMNTEKGSSFYEFRRNSRSVRSTILHFQLRNLVWATSKHDVYLLSNYSISHWSSLTGCRSEILNVKGHVAPSEKHPESLLEGFTETQVSTLAVKERLLVAGGFQGELICKHLDRPGVSFCSRTTYTENAITNAVDIYRNSSGALHFMASNNDCGVRDFDMERYKLVQLFRYLWPVNHSSLSPDGKLVAVVGDDPDGLLVDTSNGQTIGTLKGHLDYSFASAWHPNGVTFATGNQDKTCRIWDTRKLSESVAVLKGNLGAVRSIRFTSDGRYVAMAEPADFVHIYDTKSGYKKEQEIDFFGEISGISFSPDTESLFIGVWDRTYGSLLEYGRTRDYTYLDSLL

SEQ ID NO: 47913 - protein, 434 aa, Arabidopsis thaliana
  peptide (1)..(434): Ceres Seq. ID no. 13649526
  misc_feature (56)..(434): Homolog of NCBI NO: 27948448 NR Description: GAMYB-binding protein [Hordeum vulgare subsp.
  misc_feature (1)..(433): Homolog of NCBI NO: 13937195 NR Description: At1g78070/F28K19_28 [Arabidopsis thaliana]
  misc_feature (22)..(434): Homolog of NCBI NO: 9294540 NR Description: WD domain protein-like [Arabidopsis thaliana]
  misc_feature (1)..(434): Homolog of NCBI NO: 25405994 NR Description: protein F20N2.10 [imported] - Arabidopsis
  misc_feature (1)..(434): Homolog of NCBI NO: 18405485 NR Description: WD-40 repeat protein family [Arabidopsis
  misc_feature (1)..(434): Homolog of NCBI NO: 18399975 NR Description: WD-40 repeat protein family [Arabidopsis
  misc_feature (1)..(434): Homolog of NCBI NO: 9758639 NR Description: WD-repeat protein-like [Arabidopsis thaliana]
  misc_feature (1)..(434): Homolog of NCBI NO: 21536732 NR Description: WD-repeat protein-like [Arabidopsis thaliana]
  misc_feature (1)..(434): Homolog of NCBI NO: 18423837 NR Description: WD-40 repeat protein family [Arabidopsis thaliana]
  misc_feature (1)..(434): Homolog of NCBI NO: 30696707 NR Description: WD-40 repeat protein family [Arabidopsis
MADEYDMDDLEDDMNAAFDGRDIDASDSEVEDFDQLNKAADTSAAQARNGKDIQGIPWDSLTLTRKDYRKTRLEQYKNYENIPNSGDESAKKCMNTEKGSSFYEFRRNSRSVRSTILHFQLRNLVWATSKHDVYLLSNYSISHWSSLTGCRSEILNVKGHVAPSEKHPESLLEGFTETQVSTLAVKERLLVAGGFQGELICKHLDRPGVSFCSRTTYTENAITNAVDIYRNSSGALHFMASNNDCGVRDFDMERYKLVQLFRYLWPVNHSSLSPDGKLVAVVGDDPDGLLVDTSNGQTIGTLKGHLDYSFASAWHPNGVTFATGNQDKTCRIWDTRKLSESVAVLKGNLGAVRSIRFTSDGRYVAMAEPADFVHIYDTKSGYKKEQEIDFFGEISGISFSPDTESLFIGVWDRTYGSLLEYGRTRDYTYLDSLL

SEQ ID NO: 47914 - DNA, 997 bp, Arabidopsis thaliana
  misc_feature (1)..(997): Ceres Seq. ID no. 13648673
  misc_feature: MA Experiment ID: 20000184 Result: Down-regulated in Transcription
  misc_feature: MA Experiment 20000184 PARAMETER Experiment Name: At_Shoots__P Parameter: Age (day) Value: 7
  misc_feature: MA Experiment 20000184 PARAMETER Experiment Name: At_Shoots__P Parameter: Tissue Value: Shoots vs. Whole Plant
ggggataagtttgagcggtggattttgtatggagccgccgagttcgagaccggaggaacctccgtcatgggaggacctttacaaaatcaatcttatgccatcggagctattccttaagttccgcaaagagcttcaaggccttcgcgtcggcgtcaatctcgagttatataacgaacccacgaatgattaccacgcaaagcttgttttgaagcctctatgtccagaaaggaagtggaagtttatatatgagccgctacaccaagaagttcgtgttttatcgaagaagattcctgtcaccagatttctaaacctccaggttggtgttggacataactttcaaatgaatgcaattggttggaaatggaagcttacttcatgtttgggtggagatggtgtgtctcggattcgaaataaaactactcttggtcttagtcctggtatcgatttccggtttggatggagagctgattttgtactcccagaggttactggggcccttggtactgaggaaccgttattcaacatgagctccgggcgtttagaggcatcactagacagagtagaggccattgtaacccattcagattatctatagccaatccgtacctttcgtgtgcaaacgaggacgagatcttgcattatcagaaggcaaacatgtgaaagcacaagcactttggtgttcacaaccaaaacataagaatgtccataagattttgcttcagagagatatgctgaaagcacaagcactagtgggtagtttcatcagttattatactatctggtaatcactagtttgatggacgttcatacaatgcatctaaagaaatgtataatcgttggatcgttgatacaagttaggttagataatgtatatgccaaatctagtatatggcatagcgttttctaaaataaaaccttggatttgcaggtttgtagatggttccgaaatgatcaaattgcaatgaaagtacaaatgtaaattagagatttgagagtg

SEQ ID NO: 47915 - protein, 197 aa, Arabidopsis thaliana
  peptide (1)..(197): Ceres Seq. ID no. 13648674
  misc_feature (6)..(195): Homolog of NCBI NO: 38344551 NR Description: OSJNBa0027P08.19 [Oryza sativa (japonica
  misc_feature (28)..(179): Homolog of NCBI NO: 25411202 NR Description: hypothetical protein At2g06010 [imported] -
  misc_feature (10)..(197): Homolog of NCBI NO: 18396223 NR Description: expressed protein [Arabidopsis thaliana]
GISLSGGFCMEPPSSRPEEPPSWEDLYKINLMPSELFLKFRKELQGLRVGVNLELYNEPTNDYHAKLVLKPLCPERKWKFIYEPLHQEVRVLSKKIPVTRFLNLQVGVGHNFQMNAIGWKWKLTSCLGGDGVSRIRNKTTLGLSPGIDFRFGWRADFVLPEVTGALGTEEPLFNMSSGRLEASLDRVEAIVTHSDYL

SEQ ID NO: 47916 - protein, 188 aa, Arabidopsis thaliana
  peptide (1)..(188): Ceres Seq. ID no. 13648675
  misc_feature (1)..(186): Homolog of NCBI NO: 38344551 NR Description: OSJNBa0027P08.19 [Oryza sativa (japonica
  misc_feature (19)..(170): Homolog of NCBI NO: 25411202 NR Description: hypothetical protein At2g06010 [imported] -
  misc_feature (1)..(188): Homolog of NCBI NO: 18396223 NR Description: expressed protein [Arabidopsis thaliana]
MEPPSSRPEEPPSWEDLYKINLMPSELFLKFRKELQGLRVGVNLELYNEPTNDYHAKLVLKPLCPERKWKFIYEPLHQEVRVLSKKIPVTRFLNLQVGVGHNFQMNAIGWKWKLTSCLGGDGVSRIRNKTTLGLSPGIDFRFGWRADFVLPEVTGALGTEEPLFNMSSGRLEASLDRVEAIVTHSDYL

SEQ ID NO: 47917 - protein, 166 aa, Arabidopsis thaliana
  peptide (1)..(166): Ceres Seq. ID no. 13648676
  misc_feature (1)..(164): Homolog of NCBI NO: 38344551 NR Description: OSJNBa0027P08.19 [Oryza sativa (japonica
  misc_feature (1)..(148): Homolog of NCBI NO: 25411202 NR Description: hypothetical protein At2g06010 [imported] -
  misc_feature (1)..(166): Homolog of NCBI NO: 18396223 NR Description: expressed protein [Arabidopsis thaliana]
MPSELFLKFRKELQGLRVGVNLELYNEPTNDYHAKLVLKPLCPERKWKFIYEPLHQEVRVLSKKIPVTRFLNLQVGVGHNFQMNAIGWKWKLTSCLGGDGVSRIRNKTTLGLSPGIDFRFGWRADFVLPEVTGALGTEEPLFNMSSGRLEASLDRVEAIVTHSDYL

SEQ ID NO: 47918 - DNA, 1358 bp, Arabidopsis thaliana
  misc_feature (1)..(1358): Ceres Seq. ID no. 13648677
  misc_feature: MA Experiment ID: 20000315 Result: Down-regulated in Transcription
  misc_feature: MA Experiment 20000315 PARAMETER Experiment Name: At_14day_Shoots-Roots_Sub_P Parameter: Age (day) Value: 14
  misc_feature: MA Experiment 20000315 PARAMETER Experiment Name: At_14day_Shoots-Roots_Sub_P Parameter: Organism Value: A. thaliana
  misc_feature: MA Experiment 20000315 PARAMETER Experiment Name: At_14day_Shoots-Roots_Sub_P Parameter: Plant Line Value: WS
  misc_feature: MA Experiment 20000315 PARAMETER Experiment Name: At_14day_Shoots-Roots_Sub_P Parameter: Tissue Value: Shoots vs. Whole Plant
  misc_feature: MA Experiment ID: 20000347 Result: Up-regulated in Transcription
  misc_feature: MA Experiment 20000347 PARAMETER Experiment Name: At_2mM_SA_Sub_P Parameter: Age (day) Value: 14
  misc_feature: MA Experiment 20000347 PARAMETER Experiment Name: At_2mM_SA_Sub_P Parameter: Organism Value: A. thaliana
  misc_feature: MA Experiment 20000347 PARAMETER Experiment Name: At_2mM_SA_Sub_P Parameter: Plant Line Value: WS
  misc_feature: MA Experiment 20000347 PARAMETER Experiment Name: At_2mM_SA_Sub_P Parameter: Timepoint (hr) Value: 6
  misc_feature: MA Experiment 20000347 PARAMETER Experiment Name: At_2mM_SA_Sub_P Parameter: Tissue Value: Aerial
  misc_feature: MA Experiment 20000347 PARAMETER Experiment Name: At_2mM_SA_Sub_P Parameter: Treatment Value: 2mM SA vs. No Treatment
acaacagttgttgttgccattcatacgcgcttccatcaaccctttggtcttggaagccaaatcaaacctttccttcaatcctcaaattttcgaaaattttctcttttgctttacgttctctcaattcttatttgtaagaaagtttgttcctttaatcaatcaaatcaaagagacttttgaagattgtttcccaatttgcgtcaatcgggatcgagtcaaatctgaaatcttctccactcatcatctgactataagacttaatcaagggactttttgttcgggtttggttttaaacgtcttggattcgaagtggttaaggtatggatgaaaataatggaggttcaagctcacttccacctttccttactaaaacatatgaaatggttgatgattcttcttctgactcggtcgttgcttggagcgaaaacaacaaaagcttcatcgtcaagaatccagcagagttttcaagagaccttcttccgagattcttcaagcataagaatttctcaagtttcatccgtcagcttaatacatatggttttcgaaaagtagatcctgagaaatgggaattcttgaatgatgattttgttagaggtcgaccttaccttatgaagaacattcatagacgaaaaccggttcatagccactcgttagtgaatctacaagcgcaaaatcctttgacggaatcagaaagacggagcatggaggatcagatagaaagactgaaaaatgagaaagaaggccttcttgcggagttacagaaccaagagcaagaacggaaagagtttgagctgcaagtaacgacattgaaagatcggttacaacatatggaacaacatcagaaatcaatagtggcatatgtttcacaggttttgggaaaaccaggactttcactaaacctcgaaaaccatgagagaagaaaaagaagatttcaagagaactctcttcctccaagcagttcacacatagaacaggtcgaaaagttagaatcttcgctaacgttttgggagaatcttgtatcggaatcatgcgagaagagcggtttgcagtcatcaagcatggatcatgatgcagctgagtcaagtctaagtattggcgatacacgacccaaatcatcgaagattgatatgaactcagagccgcccgttaccgttactgcgcctgctccaaaaacaggcgttaacgatgacttttgggaacaatgtttgacagagaaccctggatcaaccgagcaacaagaagttcagtcagagagaagagatgtcggtaatgataataatggtaataagattggaaatcaaaggacgtattggtggaattcagggaatgtaaataacattacagagaaagcttcttga

SEQ ID NO: 47919 - protein, 345 aa, Arabidopsis thaliana
  peptide (1)..(345): Ceres Seq. ID no. 13648678
  misc_feature (12)..(185): Pfam Name: HSF-type DNA-binding Pfam Description: HSF-type DNA-binding
  misc_feature (1)..(202): Homolog of NCBI NO: 7158882 NR Description: heat shock transcription factor [Medicago sativa]
  misc_feature (260)..(343): Homolog of NCBI NO: 34909524 NR Description: putative heat shock factor
  misc_feature (3)..(260): Homolog of NCBI NO: 34909524 NR Description: putative heat shock factor
  misc_feature (4)..(218): Homolog of NCBI NO: 3399765 NR Description: heat shock transcription factor 21 [Arabidopsis
  misc_feature (1)..(218): Homolog of NCBI NO: 15234053 NR Description: heat shock transcription factor 21 [Arabidopsis
  misc_feature (233)..(343): Homolog of NCBI NO: 5821138 NR Description: heat shock factor [Nicotiana tabacum]
  misc_feature (1)..(232): Homolog of NCBI NO: 5821138 NR Description: heat shock factor [Nicotiana tabacum]
  misc_feature (260)..(342): Homolog of NCBI NO: 16118447 NR Description: heat shock transcription factor [Phaseolus
  misc_feature (1)..(257): Homolog of NCBI NO: 16118447 NR Description: heat shock transcription factor [Phaseolus
  misc_feature (1)..(345): Homolog of NCBI NO: 15242478 NR Description: heat shock transcription factor family
MDENNGGSSSLPPFLTKTYEMVDDSSSDSVVAWSENNKSFIVKNPAEFSRDLLPRFFKHKNFSSFIRQLNTYGFRKVDPEKWEFLNDDFVRGRPYLMKNIHRRKPVHSHSLVNLQAQNPLTESERRSMEDQIERLKNEKEGLLAELQNQEQERKEFELQVTTLKDRLQHMEQHQKSIVAYVSQVLGKPGLSLNLENHERRKRRFQENSLPPSSSHIEQVEKLESSLTFWENLVSESCEKSGLQSSSMDHDAAESSLSIGDTRPKSSKIDMNSEPPVTVTAPAPKTGVNDDFWEQCLTENPGSTEQQEVQSERRDVGNDNNGNKIGNQRTYWWNSGNVNNITEKAS

SEQ ID NO: 47920 - protein, 325 aa, Arabidopsis thaliana
  peptide (1)..(325): Ceres Seq. ID no. 13648679
  misc_feature (1)..(165): Pfam Name: HSF-type DNA-binding Pfam Description: HSF-type DNA-binding
  misc_feature (1)..(182): Homolog of NCBI NO: 7158882 NR Description: heat shock transcription factor [Medicago sativa]
  misc_feature (240)..(323): Homolog of NCBI NO: 34909524 NR Description: putative heat shock factor
  misc_feature (1)..(240): Homolog of NCBI NO: 34909524 NR Description: putative heat shock factor
  misc_feature (1)..(198): Homolog of NCBI NO: 3399765 NR Description: heat shock transcription factor 21 [Arabidopsis
  misc_feature (1)..(198): Homolog of NCBI NO: 15234053 NR Description: heat shock transcription factor 21 [Arabidopsis
  misc_feature (213)..(323): Homolog of NCBI NO: 5821138 NR Description: heat shock factor [Nicotiana tabacum]
  misc_feature (1)..(212): Homolog of NCBI NO: 5821138 NR Description: heat shock factor [Nicotiana tabacum]
  misc_feature (240)..(322): Homolog of NCBI NO: 16118447 NR Description: heat shock transcription factor [Phaseolus
  misc_feature (1)..(237): Homolog of NCBI NO: 16118447 NR Description: heat shock transcription factor [Phaseolus
  misc_feature (1)..(325): Homolog of NCBI NO: 15242478 NR Description: heat shock transcription factor family
MVDDSSSDSVVAWSENNKSFIVKNPAEFSRDLLPRFFKHKNFSSFIRQLNTYGFRKVDPEKWEFLNDDFVRGRPYLMKNIHRRKPVHSHSLVNLQAQNPLTESERRSMEDQIERLKNEKEGLLAELQNQEQERKEFELQVTTLKDRLQHMEQHQKSIVAYVSQVLGKPGLSLNLENHERRKRRFQENSLPPSSSHIEQVEKLESSLTFWENLVSESCEKSGLQSSSMDHDAAESSLSIGDTRPKSSKIDMNSEPPVTVTAPAPKTGVNDDFWEQCLTENPGSTEQQEVQSERRDVGNDNNGNKIGNQRTYWWNSGNVNNITEKAS

SEQ ID NO: 47921 - protein, 249 aa, Arabidopsis thaliana
  peptide (1)..(249): Ceres Seq. ID no. 13648680
  misc_feature (1)..(89): Pfam Name: HSF-type DNA-binding Pfam Description: HSF-type DNA-binding
  misc_feature (1)..(106): Homolog of NCBI NO: 7158882 NR Description: heat shock transcription factor [Medicago sativa]
  misc_feature (164)..(247): Homolog of NCBI NO: 34909524 NR Description: putative heat shock factor
  misc_feature (1)..(164): Homolog of NCBI NO: 34909524 NR Description: putative heat shock factor
  misc_feature (1)..(122): Homolog of NCBI NO: 3399765 NR Description: heat shock transcription factor 21 [Arabidopsis
  misc_feature (1)..(122): Homolog of NCBI NO: 15234053 NR Description: heat shock transcription factor 21 [Arabidopsis
  misc_feature (137)..(247): Homolog of NCBI NO: 5821138 NR Description: heat shock factor [Nicotiana tabacum]
  misc_feature (1)..(136): Homolog of NCBI NO: 5821138 NR Description: heat shock factor [Nicotiana tabacum]
  misc_feature (164)..(246): Homolog of NCBI NO: 16118447 NR Description: heat shock transcription factor [Phaseolus
  misc_feature (1)..(161): Homolog of NCBI NO: 16118447 NR Description: heat shock transcription factor [Phaseolus
  misc_feature (1)..(249): Homolog of NCBI NO: 15242478 NR Description: heat shock transcription factor family
MKNIHRRKPVHSHSLVNLQAQNPLTESERRSMEDQIERLKNEKEGLLAELQNQEQERKEFELQVTTLKDRLQHMEQHQKSIVAYVSQVLGKPGLSLNLENHERRKRRFQENSLPPSSSHIEQVEKLESSLTFWENLVSESCEKSGLQSSSMDHDAAESSLSIGDTRPKSSKIDMNSEPPVTVTAPAPKTGVNDDFWEQCLTENPGSTEQQEVQSERRDVGNDNNGNKIGNQRTYWWNSGNVNNITEKAS

SEQ ID NO: 47922 - DNA, 1379 bp, Arabidopsis thaliana; identical to SEQ ID NO: 46248
  misc_feature (1)..(1379): Ceres Seq. ID no. 13579157
  misc_feature: MA Experiment ID: 20000180 Result: Up-regulated in Transcription
  misc_feature: MA Experiment 20000180 PARAMETER Experiment Name: At_Germinating_Seeds_P Parameter: Age (hr) Value: 24 vs. 0
  misc_feature: MA Experiment 20000180 PARAMETER Experiment Name: At_Germinating_Seeds_P Parameter: Tissue Value: Germinating Seeds
  misc_feature: MA Experiment ID: 20000184 Result: Up-regulated in Transcription
  misc_feature: MA Experiment 20000184 PARAMETER Experiment Name: At_Shoots__P Parameter: Age (day) Value: 7
  misc_feature: MA Experiment 20000184 PARAMETER Experiment Name: At_Shoots__P Parameter: Tissue Value: Shoots vs. Whole Plant
  misc_feature: MA Experiment ID: 20000185 Result: Up-regulated in Transcription
  misc_feature: MA Experiment 20000185 PARAMETER Experiment Name: At_Roots__P Parameter: Age (day) Value: 7 vs. 21
  misc_feature: MA Experiment 20000185 PARAMETER Experiment Name: At_Roots__P Parameter: Organism Value: A. thaliana
  misc_feature: MA Experiment 20000185 PARAMETER Experiment Name: At_Roots__P Parameter: Tissue Value: Roots vs. Whole Plant
  misc_feature: MA Experiment ID: 20000438 Result: Up-regulated in Transcription
  misc_feature: MA Experiment 20000438 PARAMETER Experiment Name: At_Shoots__P Parameter: Age (day) Value: 14
  misc_feature: MA Experiment 20000438 PARAMETER Experiment Name: At_Shoots__P Parameter: Tissue Value: Shoots vs. Whole Plant
  misc_feature: MA Experiment ID: 20000439 Result: Up-regulated in Transcription
  misc_feature: MA Experiment 20000439 PARAMETER Experiment Name: At_Roots__P Parameter: Age (day) Value: 14 vs. 21
  misc_feature: MA Experiment 20000439 PARAMETER Experiment Name: At_Roots__P Parameter: Organism Value: A. thaliana
  misc_feature: MA Experiment 20000439 PARAMETER Experiment Name: At_Roots__P Parameter: Tissue Value: Roots vs. Whole Plant
  misc_feature: MA Experiment ID: 20000460 Result: Down-regulated in Transcription
  misc_feature: MA Experiment 20000460 PARAMETER Experiment Name: At_10percent_PEG_P Parameter: Age (day) Value: 12
  misc_feature: MA Experiment 20000460 PARAMETER Experiment Name: At_10percent_PEG_P Parameter: Organism Value: A. thaliana
  misc_feature: MA Experiment 20000460 PARAMETER Experiment Name: At_10percent_PEG_P Parameter: Plant Line Value: WS
  misc_feature: MA Experiment 20000460 PARAMETER Experiment Name: At_10percent_PEG_P Parameter: Timepoint (day) Value: 12
  misc_feature: MA Experiment 20000460 PARAMETER Experiment Name: At_10percent_PEG_P Parameter: Tissue Value: Whole Plant
  misc_feature: MA Experiment 20000460 PARAMETER Experiment Name: At_10percent_PEG_P Parameter: Treatment Value: 10percent PEG vs. No Treatment
  misc_feature: MA Experiment ID: 20000495 Result: Up-regulated in Transcription
  misc_feature: MA Experiment 20000495 PARAMETER Experiment Name: At_Guard_Cells_P Parameter: Harvest Date Value: 8/2/2002
  misc_feature: MA Experiment 20000495 PARAMETER Experiment Name: At_Guard_Cells_P Parameter: Organism Value: A. thaliana
  misc_feature: MA Experiment 20000495 PARAMETER Experiment Name: At_Guard_Cells_P Parameter: Tissue Value: Guard Cells vs. Leaves
  misc_feature: MA Experiment ID: 20001247 Result: Down-regulated in Transcription
  misc_feature: MA Experiment 20001247 PARAMETER Experiment Name: At_Far-red-induction_P Parameter: Age (day) Value: 7
  misc_feature: MA Experiment 20001247 PARAMETER Experiment Name: At_Far-red-induction_P Parameter: Light Value: Far-red vs. White
  misc_feature: MA Experiment 20001247 PARAMETER Experiment Name: At_Far-red-induction_P Parameter: Organism Value: A. thaliana
  misc_feature: MA Experiment 20001247 PARAMETER Experiment Name: At_Far-red-induction_P Parameter: Plant Line Value: Columbia
  misc_feature: MA Experiment 20001247 PARAMETER Experiment Name: At_Far-red-induction_P Parameter: Timepoint (hr) Value: 1
  misc_feature: MA Experiment 20001247 PARAMETER Experiment Name: At_Far-red-induction_P Parameter: Tissue Value: Whole Plant
  misc_feature: MA Experiment ID: 20001248 Result: Down-regulated in Transcription
  misc_feature: MA Experiment 20001248 PARAMETER Experiment Name: At_Far-red-induction_P Parameter: Age (day) Value: 7
  misc_feature: MA Experiment 20001248 PARAMETER Experiment Name: At_Far-red-induction_P Parameter: Light Value: Far-red vs. White
  misc_feature: MA Experiment 20001248 PARAMETER Experiment Name: At_Far-red-induction_P Parameter: Organism Value: A. thaliana
  misc_feature: MA Experiment 20001248 PARAMETER Experiment Name: At_Far-red-induction_P Parameter: Plant Line Value: Columbia
  misc_feature: MA Experiment 20001248 PARAMETER Experiment Name: At_Far-red-induction_P Parameter: Timepoint (hr) Value: 4
  misc_feature: MA Experiment 20001248 PARAMETER Experiment Name: At_Far-red-induction_P Parameter: Tissue Value: Whole Plant

SEQ ID NO: 47923 - protein, 413 aa, Arabidopsis thaliana; identical to SEQ ID NO: 46249
  peptide (1)..(413): Ceres Seq. ID no. 13579158
  misc_feature (118)..(297): Pfam Name: Prephenate dehydratase Pfam Description: Prephenate dehydratase
  misc_feature (118)..(297): Pfam Name: Prephenate dehydratase Pfam Description: Prephenate dehydratase
  misc_feature (99)..(402): Homolog of NCBI NO: 15221096 NR Description: prephenate dehydratase family [Arabidopsis
  misc_feature (67)..(403): Homolog of NCBI NO: 21537054 NR Description: putative P-protein: chorismate mutase, prephenate
  misc_feature (67)..(403): Homolog of NCBI NO: 15231489 NR Description: prephenate dehydratase family [Arabidopsis
  misc_feature (81)..(403): Homolog of NCBI NO: 34394031 NR Description: putative prephenate dehydratase
  misc_feature (57)..(410): Homolog of NCBI NO: 15242928 NR Description: prephenate dehydratase family [Arabidopsis
  misc_feature (99)..(402): Homolog of NCBI NO: 15221096 NR Description: prephenate dehydratase family [Arabidopsis
  misc_feature (67)..(403): Homolog of NCBI NO: 15231489 NR Description: prephenate dehydratase family [Arabidopsis
  misc_feature (57)..(410): Homolog of NCBI NO: 15242928 NR Description: prephenate dehydratase family [Arabidopsis
  misc_feature (1)..(413): Homolog of NCBI NO: 18390869 NR Description: prephenate dehydratase family [Arabidopsis
  misc_feature (26)..(413): Homolog of NCBI NO: 15226259 NR Description: prephenate dehydratase family [Arabidopsis
  misc_feature (26)..(413): Homolog of NCBI NO: 21593283 NR Description: putative chorismate mutase/prephenate dehydratase
  misc_feature (27)..(412): Homolog of NCBI NO: 38347597 NR Description: OSJNBa0042I15.10 [Oryza sativa (japonica
  misc_feature (28)..(410): Homolog of NCBI NO: 15230489 NR Description: prephenate dehydratase family [Arabidopsis
  misc_feature (81)..(403): Homolog of NCBI NO: 34394031 NR Description: putative prephenate dehydratase
  misc_feature (67)..(403): Homolog of NCBI NO: 21537054 NR Description: putative P-protein: chorismate mutase, prephenate
  misc_feature (28)..(410): Homolog of NCBI NO: 15230489 NR Description: prephenate dehydratase family [Arabidopsis
  misc_feature (27)..(412): Homolog of NCBI NO: 38347597 NR Description: OSJNBa0042I15.10 [Oryza sativa (japonica
  misc_feature (26)..(413): Homolog of NCBI NO: 21593283 NR Description: putative chorismate mutase/prephenate dehydratase
  misc_feature (26)..(413): Homolog of NCBI NO: 15226259 NR Description: prephenate dehydratase family [Arabidopsis
  misc_feature (1)..(413): Homolog of NCBI NO: 18390869 NR Description: prephenate dehydratase family [Arabidopsis

SEQ ID NO: 47924 - protein, 338 aa, Arabidopsis thaliana; identical to SEQ ID NO: 46250
  peptide (1)..(338): Ceres Seq. ID no. 13579159
  misc_feature (43)..(222): Pfam Name: Prephenate dehydratase Pfam Description: Prephenate dehydratase
  misc_feature (43)..(222): Pfam Name: Prephenate dehydratase Pfam Description: Prephenate dehydratase
  misc_feature (24)..(327): Homolog of NCBI NO: 15221096 NR Description: prephenate dehydratase family [Arabidopsis
  misc_feature (1)..(328): Homolog of NCBI NO: 21537054 NR Description: putative P-protein: chorismate mutase, prephenate
  misc_feature (1)..(328): Homolog of NCBI NO: 15231489 NR Description: prephenate dehydratase family [Arabidopsis
  misc_feature (6)..(328): Homolog of NCBI NO: 34394031 NR Description: putative prephenate dehydratase
  misc_feature (1)..(335): Homolog of NCBI NO: 15242928 NR Description: prephenate dehydratase family [Arabidopsis
  misc_feature (24)..(327): Homolog of NCBI NO: 15221096 NR Description: prephenate dehydratase family [Arabidopsis
  misc_feature (1)..(328): Homolog of NCBI NO: 15231489 NR Description: prephenate dehydratase family [Arabidopsis
  misc_feature (1)..(335): Homolog of NCBI NO: 15242928 NR Description: prephenate dehydratase family [Arabidopsis
  misc_feature (1)..(338): Homolog of NCBI NO: 18390869 NR Description: prephenate dehydratase family [Arabidopsis
  misc_feature (1)..(338): Homolog of NCBI NO: 15226259 NR Description: prephenate dehydratase family [Arabidopsis
  misc_feature (1)..(338): Homolog of NCBI NO: 21593283 NR Description: putative chorismate mutase/prephenate dehydratase
  misc_feature (1)..(337): Homolog of NCBI NO: 38347597 NR Description: OSJNBa0042I15.10 [Oryza sativa (japonica
  misc_feature (1)..(335): Homolog of NCBI NO: 15230489 NR Description: prephenate dehydratase family [Arabidopsis
  misc_feature (6)..(328): Homolog of NCBI NO: 34394031 NR Description: putative prephenate dehydratase
  misc_feature (1)..(328): Homolog of NCBI NO: 21537054 NR Description: putative P-protein: chorismate mutase, prephenate
  misc_feature (1)..(335): Homolog of NCBI NO: 15230489 NR Description: prephenate dehydratase family [Arabidopsis
  misc_feature (1)..(337): Homolog of NCBI NO: 38347597 NR Description: OSJNBa0042I15.10 [Oryza sativa (japonica
  misc_feature (1)..(338): Homolog of NCBI NO: 21593283 NR Description: putative chorismate mutase/prephenate dehydratase
  misc_feature (1)..(338): Homolog of NCBI NO: 15226259 NR Description: prephenate dehydratase family [Arabidopsis
  misc_feature (1)..(338): Homolog of NCBI NO: 18390869 NR Description: prephenate dehydratase family [Arabidopsis

SEQ ID NO: 47925 - protein, 311 aa, Arabidopsis thaliana; identical to SEQ ID NO: 46251
  peptide (1)..(311): Ceres Seq. ID no. 13579160
  misc_feature (16)..(195): Pfam Name: Prephenate dehydratase Pfam Description: Prephenate dehydratase
  misc_feature (16)..(195): Pfam Name: Prephenate dehydratase Pfam Description: Prephenate dehydratase
  misc_feature (1)..(300): Homolog of NCBI NO: 15221096 NR Description: prephenate dehydratase family [Arabidopsis
  misc_feature (1)..(301): Homolog of NCBI NO: 21537054 NR Description: putative P-protein: chorismate mutase, prephenate
  misc_feature (1)..(301): Homolog of NCBI NO: 15231489 NR Description: prephenate dehydratase family [Arabidopsis
  misc_feature (1)..(301): Homolog of NCBI NO: 34394031 NR Description: putative prephenate dehydratase
  misc_feature (1)..(308): Homolog of NCBI NO: 15242928 NR Description: prephenate dehydratase family [Arabidopsis
  misc_feature (1)..(300): Homolog of NCBI NO: 15221096 NR Description: prephenate dehydratase family [Arabidopsis
  misc_feature (1)..(301): Homolog of NCBI NO: 15231489 NR Description: prephenate dehydratase family [Arabidopsis
  misc_feature (1)..(308): Homolog of NCBI NO: 15242928 NR Description: prephenate dehydratase family [Arabidopsis
  misc_feature (1)..(311): Homolog of NCBI NO: 18390869 NR Description: prephenate dehydratase family [Arabidopsis
  misc_feature (1)..(311): Homolog of NCBI NO: 15226259 NR Description: prephenate dehydratase family [Arabidopsis
  misc_feature (1)..(311): Homolog of NCBI NO: 21593283 NR Description: putative chorismate mutase/prephenate dehydratase
  misc_feature (1)..(310): Homolog of NCBI NO: 38347597 NR Description: OSJNBa0042I15.10 [Oryza sativa (japonica
  misc_feature (1)..(308): Homolog of NCBI NO: 15230489 NR Description: prephenate dehydratase family [Arabidopsis
  misc_feature (1)..(301): Homolog of NCBI NO: 34394031 NR Description: putative prephenate dehydratase
  misc_feature (1)..(301): Homolog of NCBI NO: 21537054 NR Description: putative P-protein: chorismate mutase, prephenate
  misc_feature (1)..(308): Homolog of NCBI NO: 15230489 NR Description: prephenate dehydratase family [Arabidopsis
  misc_feature (1)..(310): Homolog of NCBI NO: 38347597 NR Description: OSJNBa0042I15.10 [Oryza sativa (japonica
  misc_feature (1)..(311): Homolog of NCBI NO: 21593283 NR Description: putative chorismate mutase/prephenate dehydratase
  misc_feature (1)..(311): Homolog of NCBI NO: 15226259 NR Description: prephenate dehydratase family [Arabidopsis
  misc_feature (1)..(311): Homolog of NCBI NO: 18390869 NR Description: prephenate dehydratase family [Arabidopsis

SEQ ID NO: 47926 - DNA, 822 bp, Arabidopsis thaliana
  misc_feature (1)..(822): Ceres Seq. ID no. 13648897
  misc_feature: MA Experiment ID: 20000184 Result: Down-regulated in Transcription
  misc_feature: MA Experiment 20000184 PARAMETER Experiment Name: At_Shoots__P Parameter: Age (day) Value: 7
  misc_feature: MA Experiment 20000184 PARAMETER Experiment Name: At_Shoots__P Parameter: Tissue Value: Shoots vs. Whole Plant
  misc_feature: MA Experiment ID: 20000437 Result: Up-regulated in Transcription
  misc_feature: MA Experiment 20000437 PARAMETER Experiment Name: At_Drought_P Parameter: Age (day) Value: 8
  misc_feature: MA Experiment 20000437 PARAMETER Experiment Name: At_Drought_P Parameter: Organism Value: A. thaliana
  misc_feature: MA Experiment 20000437 PARAMETER Experiment Name: At_Drought_P Parameter: Plant Line Value: WS
  misc_feature: MA Experiment 20000437 PARAMETER Experiment Name: At_Drought_P Parameter: Timepoint (hr) Value: 24
  misc_feature: MA Experiment 20000437 PARAMETER Experiment Name: At_Drought_P Parameter: Tissue Value: Whole Plant
  misc_feature: MA Experiment 20000437 PARAMETER Experiment Name: At_Drought_P Parameter: Treatment Value: Drought vs. No Drought
  misc_feature: MA Experiment ID: 20000794 Result: Down-regulated in Transcription
  misc_feature: MA Experiment 20000794 PARAMETER Experiment Name: At_Petals_P Parameter: Age (day) Value: 23-25 days
  misc_feature: MA Experiment 20000794 PARAMETER Experiment Name: At_Petals_P Parameter: Plant Line Value: WS
  misc_feature: MA Experiment 20000794 PARAMETER Experiment Name: At_Petals_P Parameter: Tissue Value: Petals vs. Whole plant
  misc_feature: MA Experiment ID: 20001248 Result: Up-regulated in Transcription
  misc_feature: MA Experiment 20001248 PARAMETER Experiment Name: At_Far-red-induction_P Parameter: Age (day) Value: 7
  misc_feature: MA Experiment 20001248 PARAMETER Experiment Name: At_Far-red-induction_P Parameter: Light Value: Far-red vs. White
  misc_feature: MA Experiment 20001248 PARAMETER Experiment Name: At_Far-red-induction_P Parameter: Organism Value: A. thaliana
  misc_feature: MA Experiment 20001248 PARAMETER Experiment Name: At_Far-red-induction_P Parameter: Plant Line Value: Columbia
  misc_feature: MA Experiment 20001248 PARAMETER Experiment Name: At_Far-red-induction_P Parameter: Timepoint (hr) Value: 4
  misc_feature: MA Experiment 20001248 PARAMETER Experiment Name: At_Far-red-induction_P Parameter: Tissue Value: Whole Plant
  misc_feature: MA Experiment ID: 20001450 Result: Up-regulated in Transcription
  misc_feature: MA Experiment 20001450 PARAMETER Experiment Name: At_Far-red-induction_P Parameter: Age (day) Value: 7
  misc_feature: MA Experiment 20001450 PARAMETER Experiment Name: At_Far-red-induction_P Parameter: Light Value: Far-red vs. White
  misc_feature: MA Experiment 20001450 PARAMETER Experiment Name: At_Far-red-induction_P Parameter: Organism Value: A. thaliana
  misc_feature: MA Experiment 20001450 PARAMETER Experiment Name: At_Far-red-induction_P Parameter: Plant Line Value: Columbia
  misc_feature: MA Experiment 20001450 PARAMETER Experiment Name: At_Far-red-induction_P Parameter: Timepoint (hr) Value: 8
  misc_feature: MA Experiment 20001450 PARAMETER Experiment Name: At_Far-red-induction_P Parameter: Tissue Value: Whole Plant
aaaatttaagctcccaatcaaaatctctcttagggttcttcttcttcaataaattgagtgactctttaattaccataaaaatccacagaaatggttagagaaggtgaagaagaagaagagatgatgatgatgatggcaacgaaacctgcatggcttgaaggtttaatggcggagactttcttctcaagctgtggaatccacgaaactcgccgtaaaagtgaaaagaacgttttttgcttactctgttatctcagtgtttgtcctcactgtctcccttctcatcgctctcatcctcttcttcaggtgagacgatacgtataccacgacgtcgttcggttgagtgatcttgagaagctcatagattgttcatatgttcagccatatacaattaatggagccaaagtgatattcttaaaccaaagaccacaatcacgagctaaggtttcttcaaatgtttgcttcacttgtgatagaatccttcaagaaccattccacttttgttccctctcttgcaaggtggattatttatcatatcaaggagatgatttatcaagcattctctatagaattgatgaatcagattttacgttcgagggtttgagaatggacggacatgatcagctcggagagatatcgacgatggaggatggggaggatatactggtaatttcagatgaatctgagcaaggtaacaatagtcataagaaagagaagaagaagagcaagaagaagaagccagagagcaattacttgcctgggatggttctttcatcacttggtaatagaagaaaaggtgctcctcatagggctcctttttcataa

SEQ ID NO: 47927 - protein, 243 aa, Arabidopsis thaliana
  peptide (1)..(243): Ceres Seq. ID no. 13648898
  misc_feature (16)..(236): Pfam Name: Protein of unknown function, DUF597 Pfam Description: Protein of unknown function, DUF597
  misc_feature (1)..(151): Homolog of NCBI NO: 18394936 NR Description: expressed protein [Arabidopsis thaliana]
  misc_feature (17)..(147): Homolog of NCBI NO: 6714272 NR Description: F6N18.8 [Arabidopsis thaliana]
  misc_feature (5)..(147): Homolog of NCBI NO: 18398555 NR Description: expressed protein [Arabidopsis thaliana]
  misc_feature (19)..(214): Homolog of NCBI NO: 15217560 NR Description: hypothetical protein [Arabidopsis thaliana]
  misc_feature (5)..(241): Homolog of NCBI NO: 15236696 NR Description: expressed protein [Arabidopsis thaliana]
  misc_feature (19)..(242): Homolog of NCBI NO: 38346725 NR Description: OSJNBa0086O06.23 [Oryza sativa (japonica
  misc_feature (19)..(241): Homolog of NCBI NO: 15232396 NR Description: hypothetical protein [Arabidopsis thaliana]
  misc_feature (142)..(243): Homolog of NCBI NO: 15221598 NR Description: hypothetical protein [Arabidopsis thaliana]
  misc_feature (12)..(243): Homolog of NCBI NO: 16117799 NR Description: zinc-binding protein [Pisum sativum]
  misc_feature (1)..(243): Homolog of NCBI NO: 9755373 NR Description: F17F8.4 [Arabidopsis thaliana]
MVREGEEEEEMMMMMATKPAWLEGLMAETFFSSCGIHETRRKSEKNVFCLLCYLSVCPHCLPSHRSHPLLQVRRYVYHDVVRLSDLEKLIDCSYVQPYTINGAKVIFLNQRPQSRAKVSSNVCFTCDRILQEPFHFCSLSCKVDYLSYQGDDLSSILYRIDESDFTFEGLRMDGHDQLGEISTMEDGEDILVISDESEQGNNSHKKEKKKSKKKKPESNYLPGMVLSSLGNRRKGAPHRAPFS

SEQ ID NO: 47928 - protein, 233 aa, Arabidopsis thaliana
  peptide (1)..(233): Ceres Seq. ID no. 13648899
  misc_feature (6)..(226): Pfam Name: Protein of unknown function, DUF597 Pfam Description: Protein of unknown function, DUF597
  misc_feature (1)..(141): Homolog of NCBI NO: 18394936 NR Description: expressed protein [Arabidopsis thaliana]
  misc_feature (7)..(137): Homolog of NCBI NO: 6714272 NR Description: F6N18.8 [Arabidopsis thaliana]
  misc_feature (1)..(137): Homolog of NCBI NO: 18398555 NR Description: expressed protein [Arabidopsis thaliana]
  misc_feature (9)..(204): Homolog of NCBI NO: 15217560 NR Description: hypothetical protein [Arabidopsis thaliana]
  misc_feature (1)..(231): Homolog of NCBI NO: 15236696 NR Description: expressed protein [Arabidopsis thaliana]
  misc_feature (9)..(232): Homolog of NCBI NO: 38346725 NR Description: OSJNBa0086O06.23 [Oryza sativa (japonica
  misc_feature (9)..(231): Homolog of NCBI NO: 15232396 NR Description: hypothetical protein [Arabidopsis thaliana]
  misc_feature (132)..(233): Homolog of NCBI NO: 15221598 NR Description: hypothetical protein [Arabidopsis thaliana]
  misc_feature (2)..(233): Homolog of NCBI NO: 16117799 NR Description: zinc-binding protein [Pisum sativum]
  misc_feature (1)..(233): Homolog of NCBI NO: 9755373 NR Description: F17F8.4 [Arabidopsis thaliana]
MMMMMATKPAWLEGLMAETFFSSCGIHETRRKSEKNVFCLLCYLSVCPHCLPSHRSHPLLQVRRYVYHDVVRLSDLEKLIDCSYVQPYTINGAKVIFLNQRPQSRAKVSSNVCFTCDRILQEPFHFCSLSCKVDYLSYQGDDLSSILYRIDESDFTFEGLRMDGHDQLGEISTMEDGEDILVISDESEQGNNSHKKEKKKSKKKKPESNYLPGMVLSSLGNRRKGAPHRAPFS

SEQ ID NO: 47929 - protein, 232 aa, Arabidopsis thaliana
  peptide (1)..(232): Ceres Seq. ID no. 13648900
  misc_feature (5)..(225): Pfam Name: Protein of unknown function, DUF597 Pfam Description: Protein of unknown function, DUF597
  misc_feature (1)..(140): Homolog of NCBI NO: 18394936 NR Description: expressed protein [Arabidopsis thaliana]
  misc_feature (6)..(136): Homolog of NCBI NO: 6714272 NR Description: F6N18.8 [Arabidopsis thaliana]
  misc_feature (1)..(136): Homolog of NCBI NO: 18398555 NR Description: expressed protein [Arabidopsis thaliana]
  misc_feature (8)..(203): Homolog of NCBI NO: 15217560 NR Description: hypothetical protein [Arabidopsis thaliana]
  misc_feature (1)..(230): Homolog of NCBI NO: 15236696 NR Description: expressed protein [Arabidopsis thaliana]
  misc_feature (8)..(231): Homolog of NCBI NO: 38346725 NR Description: OSJNBa0086O06.23 [Oryza sativa (japonica
  misc_feature (8)..(230): Homolog of NCBI NO: 15232396 NR Description: hypothetical protein [Arabidopsis thaliana]
  misc_feature (131)..(232): Homolog of NCBI NO: 15221598 NR Description: hypothetical protein [Arabidopsis thaliana]
  misc_feature (1)..(232): Homolog of NCBI NO: 16117799 NR Description: zinc-binding protein [Pisum sativum]
  misc_feature (1)..(232): Homolog of NCBI NO: 9755373 NR Description: F17F8.4 [Arabidopsis thaliana]
MMMMATKPAWLEGLMAETFFSSCGIHETRRKSEKNVFCLLCYLSVCPHCLPSHRSHPLLQVRRYVYHDVVRLSDLEKLIDCSYVQPYTINGAKVIFLNQRPQSRAKVSSNVCFTCDRILQEPFHFCSLSCKVDYLSYQGDDLSSILYRIDESDFTFEGLRMDGHDQLGEISTMEDGEDILVISDESEQGNNSHKKEKKKSKKKKPESNYLPGMVLSSLGNRRKGAPHRAPFS

SEQ ID NO: 47930 - DNA, 1631 bp, Arabidopsis thaliana
  misc_feature (1)..(1631): Ceres Seq. ID no. 13648687
  misc_feature: MA Experiment ID: 20000171 Result: Up-regulated in Transcription
  misc_feature: MA Experiment 20000171 PARAMETER Experiment Name: At_42deg_Heat_P Parameter: Age (day) Value: 14
  misc_feature: MA Experiment 20000171 PARAMETER Experiment Name: At_42deg_Heat_P Parameter: Organism Value: A. thaliana
  misc_feature: MA Experiment 20000171 PARAMETER Experiment Name: At_42deg_Heat_P Parameter: Plant Line Value: WS
  misc_feature: MA Experiment 20000171 PARAMETER Experiment Name: At_42deg_Heat_P Parameter: Temperature (deg C) Value: 42 vs. 22
  misc_feature: MA Experiment 20000171 PARAMETER Experiment Name: At_42deg_Heat_P Parameter: Timepoint (hr) Value: 1
  misc_feature: MA Experiment 20000171 PARAMETER Experiment Name: At_42deg_Heat_P Parameter: Tissue Value: Aerial
  misc_feature: MA Experiment ID: 20000264 Result: Up-regulated in Transcription
  misc_feature: MA Experiment 20000264 PARAMETER Experiment Name: At_Open_Flower_P Parameter: Age (day) Value: 21
  misc_feature: MA Experiment 20000264 PARAMETER Experiment Name: At_Open_Flower_P Parameter: Plant Line Value: WS
  misc_feature: MA Experiment 20000264 PARAMETER Experiment Name: At_Open_Flower_P Parameter: Tissue Value: Open Flower vs. Whole Plant
  misc_feature: MA Experiment ID: 20000265 Result: Up-regulated in Transcription
  misc_feature: MA Experiment 20000265 PARAMETER Experiment Name: At_Open_Flower_P Parameter: Age (day) Value: 21
  misc_feature: MA Experiment 20000265 PARAMETER Experiment Name: At_Open_Flower_P Parameter: Plant Line Value: WS
  misc_feature: MA Experiment 20000265 PARAMETER Experiment Name: At_Open_Flower_P Parameter: Tissue Value: Closed Flower vs. Whole Plant
  misc_feature: MA Experiment ID: 20000286 Result: Up-regulated in Transcription
  misc_feature: MA Experiment 20000286 PARAMETER Experiment Name: At_Open_Flower_P Parameter: Age (day) Value: 21
  misc_feature: MA Experiment 20000286 PARAMETER Experiment Name: At_Open_Flower_P Parameter: Plant Line Value: WS
  misc_feature: MA Experiment 20000286 PARAMETER Experiment Name: At_Open_Flower_P Parameter: Tissue Value: Half Open vs. Whole Plant
  misc_feature: MA Experiment ID: 20000438 Result: Up-regulated in Transcription
  misc_feature: MA Experiment 20000438 PARAMETER Experiment Name: At_Shoots__P Parameter: Age (day) Value: 14
  misc_feature: MA Experiment 20000438 PARAMETER Experiment Name: At_Shoots__P Parameter: Tissue Value: Shoots vs. Whole Plant
  misc_feature: MA Experiment ID: 20001247 Result: Down-regulated in Transcription
  misc_feature: MA Experiment 20001247 PARAMETER Experiment Name: At_Far-red-induction_P Parameter: Age (day) Value: 7
  misc_feature: MA Experiment 20001247 PARAMETER Experiment Name: At_Far-red-induction_P Parameter: Light Value: Far-red vs. White
  misc_feature: MA Experiment 20001247 PARAMETER Experiment Name: At_Far-red-induction_P Parameter: Organism Value: A. thaliana
  misc_feature: MA Experiment 20001247 PARAMETER Experiment Name: At_Far-red-induction_P Parameter: Plant Line Value: Columbia
  misc_feature: MA Experiment 20001247 PARAMETER Experiment Name: At_Far-red-induction_P Parameter: Timepoint (hr) Value: 1
  misc_feature: MA Experiment 20001247 PARAMETER Experiment Name: At_Far-red-induction_P Parameter: Tissue Value: Whole Plant
  misc_feature: MA Experiment ID: 20001248 Result: Down-regulated in Transcription
  misc_feature: MA Experiment 20001248 PARAMETER Experiment Name: At_Far-red-induction_P Parameter: Age (day) Value: 7
  misc_feature: MA Experiment 20001248 PARAMETER Experiment Name: At_Far-red-induction_P Parameter: Light Value: Far-red vs. White
  misc_feature: MA Experiment 20001248 PARAMETER Experiment Name: At_Far-red-induction_P Parameter: Organism Value: A. thaliana
  misc_feature: MA Experiment 20001248 PARAMETER Experiment Name: At_Far-red-induction_P Parameter: Plant Line Value: Columbia
  misc_feature: MA Experiment 20001248 PARAMETER Experiment Name: At_Far-red-induction_P Parameter: Timepoint (hr) Value: 4
  misc_feature: MA Experiment 20001248 PARAMETER Experiment Name: At_Far-red-induction_P Parameter: Tissue Value: Whole Plant
atgtccacacaaacaccttctctctcctctctctcacacacactcaagtgtcattttctcacatatacttcacacaaaagaaacaaccattcactacatactaccttgtcattgattttctctctccctctatatctctcaaaaatctttgcaaaatcttcttaacctcaaacaatataaacaacattctcaacaaaacccagaaatctcttcctcaaatcctcaatacccttttctattttcctccctatacccttaataaaaaaggatatctttctctttttatcttctttgtcctaattcaagaaaacaagaactagggttcatcatctgtggaaaccgactgaagaatctcttcaagaagaagttaaaggtctctttcatggagctgtttcctgctcagcccgatttatccttacaaataagtccaccaaacagtaaaccatcatcgacatggcagagaagaagatcaacaacagatcaagaagatcatgaagaactcgatttagggttttggagaagagctcttgattcaagaacatcttctctcgtctctaattccacctcaaaaacaatcaatcatccattccaagacctctcgctctctaacatctctcatcatcaacaacaacaacaacatcatcatccacaacttctccctaattgcaacagctctaacatcttgacctctttccaatttccgacacagcagcaacaacaacacttacaagggtttcttgctcacgaccttaatactcacttaagaccaataagaggaataccactttaccacaaccctcctccacatcatcatcctcaccgtccgccaccgccatgtttccctttcgacccgtcgtctctaataccctcttcctccacttcctcgccggctctaaccggaaacaacaatagctttaatactagtagcgttagtaaccctaattaccacaatcatcatcaccagactctaaacagagccagattcatgccaagattcccagctaaacgaagcatgagagctcctaggatgcgatggaccaccactcttcatgcccggttcgttcacgccgttgaattactcggtggccatgaaagagcaacacctaaatcagttcttgagctcatggatgtcaaagatctaaccttggctcatgttaagtcccatttacagatgtacagaacagtgaagacaaccgacaaagcagcagcttcgtcaggacaatctgatgtctatgaaaatggatcatcaggagataataactcagacgactggatgttcgatatgaatagaaaatcgagagatagcgaggaattgacgaatcctctagagaaatcaaatggtctatggaccaattcttccggagaagcacgtttgcatgggaagttaatcgataatgttgcagaaattatgctaccttctgagaaggaactagatggaaagtgctcaagttatgagagaatatcatcagaagagatgagctcatcaagcatctcgggaacaagccctttcaagccaaatcttgagtttactctgggtcgatctcactaaatttattgttgtagctaggtagtaattaattagtatcaattaacttatattttggctactgactagtttcgatattcatatc

SEQ ID NO: 47931 - protein, 388 aa, Arabidopsis thaliana
  peptide (1)..(388): Ceres Seq. ID no. 13648688
  misc_feature (215)..(266): Pfam Name: Myb-like DNA-binding domain Pfam Description: Myb-like DNA-binding domain
  misc_feature (195)..(281): Homolog of NCBI NO: 30793861 NR Description: unknown protein [Arabidopsis thaliana]
  misc_feature (206)..(375): Homolog of NCBI NO: 26450454 NR Description: unknown protein [Arabidopsis thaliana]
  misc_feature (208)..(280): Homolog of NCBI NO: 40737024 NR Description: putative transfactor [Oryza sativa (japonica
  misc_feature (141)..(296): Homolog of NCBI NO: 15239014 NR Description: myb family transcription factor [Arabidopsis
  misc_feature (164)..(264): Homolog of NCBI NO: 9759140 NR Description: gb|AAD20098.1~gene_id:MQK4.31~similar to unknown
  misc_feature (199)..(292): Homolog of NCBI NO: 29837235 NR Description: OSJNBb0032E15.1 [Oryza sativa (japonica
  misc_feature (206)..(386): Homolog of NCBI NO: 34905232 NR Description: P0672D01.18 [Oryza sativa (japonica
  misc_feature (92)..(288): Homolog of NCBI NO: 18414945 NR Description: myb family transcription factor [Arabidopsis
  misc_feature (164)..(386): Homolog of NCBI NO: 18418011 NR Description: myb family transcription factor [Arabidopsis
  misc_feature (1)..(388): Homolog of NCBI NO: 18398337 NR Description: myb family transcription factor [Arabidopsis
MELFPAQPDLSLQISPPNSKPSSTWQRRRSTTDQEDHEELDLGFWRRALDSRTSSLVSNSTSKTINHPFQDLSLSNISHHQQQQQHHHPQLLPNCNSSNILTSFQFPTQQQQQHLQGFLAHDLNTHLRPIRGIPLYHNPPPHHHPHRPPPPCFPFDPSSLIPSSSTSSPALTGNNNSFNTSSVSNPNYHNHHHQTLNRARFMPRFPAKRSMRAPRMRWTTTLHARFVHAVELLGGHERATPKSVLELMDVKDLTLAHVKSHLQMYRTVKTTDKAAASSGQSDVYENGSSGDNNSDDWMFDMNRKSRDSEELTNPLEKSNGLWTNSSGEARLHGKLIDNVAEIMLPSEKELDGKCSSYERISSEEMSSSSISGTSPFKPNLEFTLGRSH

SEQ ID NO: 47932 - DNA, 2398 bp, Arabidopsis thaliana
  misc_feature (1)..(2398): Ceres Seq. ID no. 13649543
  misc_feature: MA Experiment ID: 108434 Result: Down-regulated in Transcription
  misc_feature: MA Experiment 108434 PARAMETER Experiment Name: At_Root_Tips_cDNA_P Parameter: Tissue Value: Root Tips
  misc_feature: MA Experiment ID: 108464 Result: Up-regulated in Transcription
  misc_feature: MA Experiment 108464 PARAMETER Experiment Name: At_Germinating_Seeds_cDNA_P Parameter: Age (day) Value: 4 vs. 0
  misc_feature: MA Experiment 108464 PARAMETER Experiment Name: At_Germinating_Seeds_cDNA_P Parameter: Tissue Value: Germinating Seeds
  misc_feature: MA Experiment ID: 108668 Result: Up-regulated in Transcription
  misc_feature: MA Experiment 108668 PARAMETER Experiment Name: At_2mM_SA_cDNA_P Parameter: Plant Line Value: WS
  misc_feature: MA Experiment 108668 PARAMETER Experiment Name: At_2mM_SA_cDNA_P Parameter: Timepoint (hr) Value: 6
  misc_feature: MA Experiment 108668 PARAMETER Experiment Name: At_2mM_SA_cDNA_P Parameter: Treatment Value: 2mM SA vs. No Treatment
  misc_feature: MA Experiment ID: 20000069 Result: Up-regulated in Transcription
  misc_feature: MA Experiment 20000069 PARAMETER Experiment Name: At_100uM_ABA_Mutants_cDNA_P Parameter: Plant Line Value: CS23
  misc_feature: MA Experiment 20000069 PARAMETER Experiment Name: At_100uM_ABA_Mutants_cDNA_P Parameter: Timepoint (hr) Value: 6
  misc_feature: MA Experiment 20000069 PARAMETER Experiment Name: At_100uM_ABA_Mutants_cDNA_P Parameter: Tissue Value: Aerial
  misc_feature: MA Experiment 20000069 PARAMETER Experiment Name: At_100uM_ABA_Mutants_cDNA_P Parameter: Treatment Value: 100uM ABA vs. No Treatment
  misc_feature: MA Experiment ID: 20000070 Result: Up-regulated in Transcription
  misc_feature: MA Experiment 20000070 PARAMETER Experiment Name: At_100uM_ABA_Mutants_cDNA_P Parameter: Plant Line Value: CS24
  misc_feature: MA Experiment 20000070 PARAMETER Experiment Name: At_100uM_ABA_Mutants_cDNA_P Parameter: Timepoint (hr) Value: 6
  misc_feature: MA Experiment 20000070 PARAMETER Experiment Name: At_100uM_ABA_Mutants_cDNA_P Parameter: Tissue Value: Aerial
  misc_feature: MA Experiment 20000070 PARAMETER Experiment Name: At_100uM_ABA_Mutants_cDNA_P Parameter: Treatment Value: 100uM ABA vs. No Treatment
  misc_feature: MA Experiment ID: 20000071 Result: Up-regulated in Transcription
  misc_feature: MA Experiment 20000071 PARAMETER Experiment Name: At_100uM_ABA_Mutants_cDNA_P Parameter: Plant Line Value: CS8104
  misc_feature: MA Experiment 20000071 PARAMETER Experiment Name: At_100uM_ABA_Mutants_cDNA_P Parameter: Timepoint (hr) Value: 6
  misc_feature: MA Experiment 20000071 PARAMETER Experiment Name: At_100uM_ABA_Mutants_cDNA_P Parameter: Tissue Value: Aerial
  misc_feature: MA Experiment 20000071 PARAMETER Experiment Name: At_100uM_ABA_Mutants_cDNA_P Parameter: Treatment Value: 100uM ABA vs. No Treatment
  misc_feature: MA Experiment ID: 20000072 Result: Up-regulated in Transcription
  misc_feature: MA Experiment 20000072 PARAMETER Experiment Name: At_100uM_ABA_Mutants_cDNA_P Parameter: Plant Line Value: CS8105
  misc_feature: MA Experiment 20000072 PARAMETER Experiment Name: At_100uM_ABA_Mutants_cDNA_P Parameter: Timepoint (hr) Value: 6
  misc_feature: MA Experiment 20000072 PARAMETER Experiment Name: At_100uM_ABA_Mutants_cDNA_P Parameter: Tissue Value: Aerial
  misc_feature: MA Experiment 20000072 PARAMETER Experiment Name: At_100uM_ABA_Mutants_cDNA_P Parameter: Treatment Value: 100uM ABA vs. No Treatment
  misc_feature: MA Experiment ID: 20000088 Result: Up-regulated in Transcription
  misc_feature: MA Experiment 20000088 PARAMETER Experiment Name: At_100uM_ABA_Mutants_cDNA_P Parameter: Plant Line Value: Landsberg
  misc_feature: MA Experiment 20000088 PARAMETER Experiment Name: At_100uM_ABA_Mutants_cDNA_P Parameter: Timepoint (hr) Value: 6
  misc_feature: MA Experiment 20000088 PARAMETER Experiment Name: At_100uM_ABA_Mutants_cDNA_P Parameter: Tissue Value: Aerial
  misc_feature: MA Experiment 20000088 PARAMETER Experiment Name: At_100uM_ABA_Mutants_cDNA_P Parameter: Treatment Value: 100uM ABA vs. No Treatment
  misc_feature: MA Experiment ID: 20000089 Result: Up-regulated in Transcription
  misc_feature: MA Experiment ID: 20000090 Result: Up-regulated in Transcription
  misc_feature: MA Experiment ID: 20000111 Result: Down-regulated in Transcription
  misc_feature: MA Experiment 20000111 PARAMETER Experiment Name: At_42deg_Heat_cDNA_P Parameter: Temperature (deg C) Value: 42 vs. 22
  misc_feature: MA Experiment 20000111 PARAMETER Experiment Name: At_42deg_Heat_cDNA_P Parameter: Timepoint (hr) Value: 6
  misc_feature: MA Experiment 20000111 PARAMETER Experiment Name: At_42deg_Heat_cDNA_P Parameter: Tissue Value: Aerial
  misc_feature: MA Experiment ID: 20000182 Result: Up-regulated in Transcription
  misc_feature: MA Experiment 20000182 PARAMETER Experiment Name: At_2mM_SA_P Parameter: Age (day) Value: 14
  misc_feature: MA Experiment 20000182 PARAMETER Experiment Name: At_2mM_SA_P Parameter: Organism Value: A. thaliana
  misc_feature: MA Experiment 20000182 PARAMETER Experiment Name: At_2mM_SA_P Parameter: Plant Line Value: WS
  misc_feature: MA Experiment 20000182 PARAMETER Experiment Name: At_2mM_SA_P Parameter: Timepoint (hr) Value: 6
  misc_feature: MA Experiment 20000182 PARAMETER Experiment Name: At_2mM_SA_P Parameter: Tissue Value: Aerial
  misc_feature: MA Experiment 20000182 PARAMETER Experiment Name: At_2mM_SA_P Parameter: Treatment Value: 2mM SA vs. No Treatment
  misc_feature: MA Experiment ID: 20000184 Result: Down-regulated in Transcription
  misc_feature: MA Experiment 20000184 PARAMETER Experiment Name: At_Shoots__P Parameter: Age (day) Value: 7
  misc_feature: MA Experiment 20000184 PARAMETER Experiment Name: At_Shoots__P Parameter: Tissue Value: Shoots vs. Whole Plant
  misc_feature: MA Experiment ID: 20000185 Result: Down-regulated in Transcription
  misc_feature: MA Experiment 20000185 PARAMETER Experiment Name: At_Roots__P Parameter: Age (day) Value: 7 vs. 21
  misc_feature: MA Experiment 20000185 PARAMETER Experiment Name: At_Roots__P Parameter: Organism Value: A. thaliana
  misc_feature: MA Experiment 20000185 PARAMETER Experiment Name: At_Roots__P Parameter: Tissue Value: Roots vs. Whole Plant
  misc_feature: MA Experiment ID: 20000234 Result: Down-regulated in Transcription
  misc_feature: MA Experiment 20000234 PARAMETER Experiment Name: At_Siliques_P Parameter: Age (day) Value: 21
  misc_feature: MA Experiment 20000234 PARAMETER Experiment Name: At_Siliques_P Parameter: Organism Value: A. thaliana
  misc_feature: MA Experiment 20000234 PARAMETER Experiment Name: At_Siliques_P Parameter: Plant Line Value: WS
  misc_feature: MA Experiment 20000234 PARAMETER Experiment Name: At_Siliques_P Parameter: Tissue Value: Less Than 5mm Siliques vs. Whole Plant
  misc_feature: MA Experiment ID: 20000235 Result: Down-regulated in Transcription
  misc_feature: MA Experiment 20000235 PARAMETER Experiment Name: At_Siliques_P Parameter: Age (day) Value: 21
  misc_feature: MA Experiment 20000235 PARAMETER Experiment Name: At_Siliques_P Parameter: Organism Value: A. thaliana
  misc_feature: MA Experiment 20000235 PARAMETER Experiment Name: At_Siliques_P Parameter: Plant Line Value: WS
  misc_feature: MA Experiment 20000235 PARAMETER Experiment Name: At_Siliques_P Parameter: Tissue Value: 5-10mm Siliques vs. Whole Plant
  misc_feature: MA Experiment ID: 20000264 Result: Down-regulated in Transcription
  misc_feature: MA Experiment 20000264 PARAMETER Experiment Name: At_Open_Flower_P Parameter: Age (day) Value: 21
  misc_feature: MA Experiment 20000264 PARAMETER Experiment Name: At_Open_Flower_P Parameter: Plant Line Value: WS
  misc_feature: MA Experiment 20000264 PARAMETER Experiment Name: At_Open_Flower_P Parameter: Tissue Value: Open Flower vs. Whole Plant
  misc_feature: MA Experiment ID: 20000265 Result: Down-regulated in Transcription
  misc_feature: MA Experiment 20000265 PARAMETER Experiment Name: At_Open_Flower_P Parameter: Age (day) Value: 21
  misc_feature: MA Experiment 20000265 PARAMETER Experiment Name: At_Open_Flower_P Parameter: Plant Line Value: WS
  misc_feature: MA Experiment 20000265 PARAMETER Experiment Name: At_Open_Flower_P Parameter: Tissue Value: Closed Flower vs. Whole Plant
  misc_feature: MA Experiment ID: 20000438 Result: Down-regulated in Transcription
  misc_feature: MA Experiment 20000438 PARAMETER Experiment Name: At_Shoots__P Parameter: Age (day) Value: 14
  misc_feature: MA Experiment 20000438 PARAMETER Experiment Name: At_Shoots__P Parameter: Tissue Value: Shoots vs. Whole Plant
  misc_feature: MA Experiment ID: 20001555 Result: Down-regulated in Transcription
  misc_feature: MA Experiment 20001555 PARAMETER Experiment Name: At_Drought_Soil_Dry_P Parameter: Age (day) Value: 24
  misc_feature: MA Experiment 20001555 PARAMETER Experiment Name: At_Drought_Soil_Dry_P Parameter: Organism Value: A. thaliana
  misc_feature: MA Experiment 20001555 PARAMETER Experiment Name: At_Drought_Soil_Dry_P Parameter: Plant Line Value: WS
  misc_feature: MA Experiment 20001555 PARAMETER Experiment Name: At_Drought_Soil_Dry_P Parameter: Post Timepoint (hr) Value: None
  misc_feature: MA Experiment 20001555 PARAMETER Experiment Name: At_Drought_Soil_Dry_P Parameter: Post-Treatment Value: None
  misc_feature: MA Experiment 20001555 PARAMETER Experiment Name: At_Drought_Soil_Dry_P Parameter: Timepoint (day) Value: 10
  misc_feature: MA Experiment 20001555 PARAMETER Experiment Name: At_Drought_Soil_Dry_P Parameter: Treatment Value: Drought vs. No Drought
  misc_feature: MA Experiment ID: 20001560 Result: Down-regulated in Transcription
  misc_feature: MA Experiment 20001560 PARAMETER Experiment Name: At_Drought_Soil_Dry_P Parameter: Age (day) Value: 28
  misc_feature: MA Experiment 20001560 PARAMETER Experiment Name: At_Drought_Soil_Dry_P Parameter: Organism Value: A. thaliana
  misc_feature: MA Experiment 20001560 PARAMETER Experiment Name: At_Drought_Soil_Dry_P Parameter: Plant Line Value: WS
  misc_feature: MA Experiment 20001560 PARAMETER Experiment Name: At_Drought_Soil_Dry_P Parameter: Post Timepoint (hr) Value: None
  misc_feature: MA Experiment 20001560 PARAMETER Experiment Name: At_Drought_Soil_Dry_P Parameter: Post-Treatment Value: None
  misc_feature: MA Experiment 20001560 PARAMETER Experiment Name: At_Drought_Soil_Dry_P Parameter: Timepoint (day) Value: 14
  misc_feature: MA Experiment 20001560 PARAMETER Experiment Name: At_Drought_Soil_Dry_P Parameter: Treatment Value: Drought vs. No Drought
atcatcatcatcatcatcattcataaccacttagccacagatgcgattttcttctccttcttcattgtgctcttcaacacttatgaacaagagcaccaccaccacgacaacgacgactacaaagaccaaagctttcgttttgtgtttctgattttgattcgattttgatgctcatcgaagagaacccttgattttgttgctgtagttcatagagattttacacattttgtggaatttagtggatttatgatgatgggtaggttagtttttgtaatctggctctataattgtctctgtttgctgctactctcgagcttggttgacgcggatcaggccaacatagattgcttaaggacctttaaatctcaagtagaggatccaaatagatatttatcgacttgggtttttggcaacgagactgctggttatatctgcaagttcagtggtgtgacttgttggcatgatgatgagaatagggttttgagtattaagctatctggttatggtcttagaggagtgtttcctcctgcggttaagctatgtgctgatctcactggtttagatctttctagaaacaacttctctggacctttaccagccaacattagcaccttgattccacttgttacgattctagacctctcctacaatagcttctctggtgaaatccctatgttgatctccaacattacctttttgaacactcttatgcttcagcataaccagttcacgggtactcttcctccccagctagcgcaacttggacggctcaaaacattctctgtgtctgacaatcgtctcgttggtcctatcccaaatttcaaccaaaccttgcagtttaagcaggaattgtttgctaataacctggatctgtgtggtaagcctctagatgactgtaagagtgcttctagctctcgtggtaaagttgttattatagcggcagttggtggactgactgcagcagcattagtcgttggggttgttttgttcttctatttccgtaaattgggtgctgttcggaagaagcaggatgatcctgaaggaaacagatgggcaaagagcttgaaaggacagaaaggtgttaaggttttcatgtttaagaaatcggtttcaaagatgaaattaagcgatcttatgaaggcaacagaggaattcaagaaagataatatcattgcaacaggaagaacaggaactatgtacaaaggtaggcttgaagacgggtctctacttatgataaagaggttgcaggattctcaacgctctgagaaagagtttgatgcagagatgaagactttgggctctgttaaaaacagaaacttagtccctctcttgggctattgtgttgccaataaggagaggcttctaatgtatgagtacatggcaaacggttacctttatgatcagttacatcctgcagatgaagaatccttcaagcccttggattggccttcaaggctgaaaatcgcgattgggacggcaaaaggattggcatggcttcatcatagctgcaacccgagaatcatccatcgcaacataagctcgaaatgcatattgttgactgcagagtttgagccaaagatctcggatttcggtctagctaggctgatgaacccaattgatacccatttaagcacattcgtcaatggagaatttggggatttcggttatgttgctcccgagtattcaagaaccatggttgcaactccaaaaggagatgtctacagcttcggtgttgtgcttctagagctagtaacgggccaaaaagcaacgagtgtaacaaaagtatctgaagaaaaagctgaggaagaaaacttcaagggtaacctcgtggaatggattacaaagctatcaagtgaatcaaaactgcaggaagcaatcgacaggtccttacttgggaacggtgtggatgatgaaatcttcaaagtactcaaagtagcatgcaactgcgttctaccggaaatagcaaagcagaggccaaccatgtttgaagtttatcagcttctaagagccattggagagagctacaacttcaccgccgatgatgatatcttaatcccatctgaatcaggtgaaggcgatttcattgaagagctcatagttgctcgttgatcaagaggaagggtaagaattgtgaaacaaacatctctagtcgtagcagtccaaagatatatataatgtataagtattgtttttattttatttttgggttctcgtcgtcgatggtgtgttgtaatatgatatattgttagatgcactctcttattactatgtactaagctttgggtgtgtggtacagtcactgttttggttttgccactacgtctttgctgccttatattttgcagcactaatttggttgaggagaatacagtcatcacgtgggatatctttgaagact

SEQ ID NO: 47933 - protein, 620 aa, Arabidopsis thaliana
  peptide (1)..(620): Ceres Seq. ID no. 13649544
  misc_feature (80)..(190): Homolog of NCBI NO: 38423526 NR Description: putative brassinosteroid-insensitive protein 1
  misc_feature (65)..(219): Homolog of NCBI NO: 34910644 NR Description: putative brassinosteroid-insensitive protein BRI1
  misc_feature (269)..(589): Homolog of NCBI NO: 34910644 NR Description: putative brassinosteroid-insensitive protein BRI1
  misc_feature (73)..(219): Homolog of NCBI NO: 38423526 NR Description: putative brassinosteroid-insensitive protein 1
  misc_feature (267)..(589): Homolog of NCBI NO: 38423526 NR Description: putative brassinosteroid-insensitive protein 1
  misc_feature (102)..(598): Homolog of NCBI NO: 25406019 NR Description: hypothetical protein F20P5.27 [imported] -
  misc_feature (31)..(611): Homolog of NCBI NO: 38344230 NR Description: OJ991113_30.7 [Oryza sativa (japonica
  misc_feature (18)..(598): Homolog of NCBI NO: 15222519 NR Description: leucine-rich repeat transmembrane protein kinase,
  misc_feature (6)..(600): Homolog of NCBI NO: 15233004 NR Description: leucine-rich repeat transmembrane protein kinase,
  misc_feature (16)..(600): Homolog of NCBI NO: 15223445 NR Description: leucine-rich repeat transmembrane protein kinase,
MMMGRLVFVIWLYNCLCLLLLSSLVDADQANIDCLRTFKSQVEDPNRYLSTWVFGNETAGYICKFSGVTCWHDDENRVLSIKLSGYGLRGVFPPAVKLCADLTGLDLSRNNFSGPLPANISTLIPLVTILDLSYNSFSGEIPMLISNITFLNTLMLQHNQFTGTLPPQLAQLGRLKTFSVSDNRLVGPIPNFNQTLQFKQELFANNLDLCGKPLDDCKSASSSRGKVVIIAAVGGLTAAALVVGVVLFFYFRKLGAVRKKQDDPEGNRWAKSLKGQKGVKVFMFKKSVSKMKLSDLMKATEEFKKDNIIATGRTGTMYKGRLEDGSLLMIKRLQDSQRSEKEFDAEMKTLGSVKNRNLVPLLGYCVANKERLLMYEYMANGYLYDQLHPADEESFKPLDWPSRLKIAIGTAKGLAWLHHSCNPRIIHRNISSKCILLTAEFEPKISDFGLARLMNPIDTHLSTFVNGEFGDFGYVAPEYSRTMVATPKGDVYSFGVVLLELVTGQKATSVTKVSEEKAEEENFKGNLVEWITKLSSESKLQEAIDRSLLGNGVDDEIFKVLKVACNCVLPEIAKQRPTMFEVYQLLRAIGESYNFTADDDILIPSESGEGDFIEELIVAR

SEQ ID NO: 47934 - protein, 619 aa, Arabidopsis thaliana
  peptide (1)..(619): Ceres Seq. ID no. 13649545
  misc_feature (79)..(189): Homolog of NCBI NO: 38423526 NR Description: putative brassinosteroid-insensitive protein 1
  misc_feature (64)..(218): Homolog of NCBI NO: 34910644 NR Description: putative brassinosteroid-insensitive protein BRI1
  misc_feature (268)..(588): Homolog of NCBI NO: 34910644 NR Description: putative brassinosteroid-insensitive protein BRI1
  misc_feature (72)..(218): Homolog of NCBI NO: 38423526 NR Description: putative brassinosteroid-insensitive protein 1
  misc_feature (266)..(588): Homolog of NCBI NO: 38423526 NR Description: putative brassinosteroid-insensitive protein 1
  misc_feature (101)..(597): Homolog of NCBI NO: 25406019 NR Description: hypothetical protein F20P5.27 [imported] -
  misc_feature (30)..(610): Homolog of NCBI NO: 38344230 NR Description: OJ991113_30.7 [Oryza sativa (japonica
  misc_feature (17)..(597): Homolog of NCBI NO: 15222519 NR Description: leucine-rich repeat transmembrane protein kinase,
  misc_feature (5)..(599): Homolog of NCBI NO: 15233004 NR Description: leucine-rich repeat transmembrane protein kinase,
  misc_feature (15)..(599): Homolog of NCBI NO: 15223445 NR Description: leucine-rich repeat transmembrane protein kinase,
MMGRLVFVIWLYNCLCLLLLSSLVDADQANIDCLRTFKSQVEDPNRYLSTWVFGNETAGYICKFSGVTCWHDDENRVLSIKLSGYGLRGVFPPAVKLCADLTGLDLSRNNFSGPLPANISTLIPLVTILDLSYNSFSGEIPMLISNITFLNTLMLQHNQFTGTLPPQLAQLGRLKTFSVSDNRLVGPIPNFNQTLQFKQELFANNLDLCGKPLDDCKSASSSRGKVVIIAAVGGLTAAALVVGVVLFFYFRKLGAVRKKQDDPEGNRWAKSLKGQKGVKVFMFKKSVSKMKLSDLMKATEEFKKDNIIATGRTGTMYKGRLEDGSLLMIKRLQDSQRSEKEFDAEMKTLGSVKNRNLVPLLGYCVANKERLLMYEYMANGYLYDQLHPADEESFKPLDWPSRLKIAIGTAKGLAWLHHSCNPRIIHRNISSKCILLTAEFEPKISDFGLARLMNPIDTHLSTFVNGEFGDFGYVAPEYSRTMVATPKGDVYSFGVVLLELVTGQKATSVTKVSEEKAEEENFKGNLVEWITKLSSESKLQEAIDRSLLGNGVDDEIFKVLKVACNCVLPEIAKQRPTMFEVYQLLRAIGESYNFTADDDILIPSESGEGDFIEELIVAR

SEQ ID NO: 47935 - protein, 618 aa, Arabidopsis thaliana
  peptide (1)..(618): Ceres Seq. ID no. 13649546
  misc_feature (78)..(188): Homolog of NCBI NO: 38423526 NR Description: putative brassinosteroid-insensitive protein 1
  misc_feature (63)..(217): Homolog of NCBI NO: 34910644 NR Description: putative brassinosteroid-insensitive protein BRI1
  misc_feature (267)..(587): Homolog of NCBI NO: 34910644 NR Description: putative brassinosteroid-insensitive protein BRI1
  misc_feature (71)..(217): Homolog of NCBI NO: 38423526 NR Description: putative brassinosteroid-insensitive protein 1
  misc_feature (265)..(587): Homolog of NCBI NO: 38423526 NR Description: putative brassinosteroid-insensitive protein 1
  misc_feature (100)..(596): Homolog of NCBI NO: 25406019 NR Description: hypothetical protein F20P5.27 [imported] -
  misc_feature (29)..(609): Homolog of NCBI NO: 38344230 NR Description: OJ991113_30.7 [Oryza sativa (japonica
  misc_feature (16)..(596): Homolog of NCBI NO: 15222519 NR Description: leucine-rich repeat transmembrane protein kinase,
  misc_feature (4)..(598): Homolog of NCBI NO: 15233004 NR Description: leucine-rich repeat transmembrane protein kinase,
  misc_feature (14)..(598): Homolog of NCBI NO: 15223445 NR Description: leucine-rich repeat transmembrane protein kinase,
MGRLVFVIWLYNCLCLLLLSSLVDADQANIDCLRTFKSQVEDPNRYLSTWVFGNETAGYICKFSGVTCWHDDENRVLSIKLSGYGLRGVFPPAVKLCADLTGLDLSRNNFSGPLPANISTLIPLVTILDLSYNSFSGEIPMLISNITFLNTLMLQHNQFTGTLPPQLAQLGRLKTFSVSDNRLVGPIPNFNQTLQFKQELFANNLDLCGKPLDDCKSASSSRGKVVIIAAVGGLTAAALVVGVVLFFYFRKLGAVRKKQDDPEGNRWAKSLKGQKGVKVFMFKKSVSKMKLSDLMKATEEFKKDNIIATGRTGTMYKGRLEDGSLLMIKRLQDSQRSEKEFDAEMKTLGSVKNRNLVPLLGYCVANKERLLMYEYMANGYLYDQLHPADEESFKPLDWPSRLKIAIGTAKGLAWLHHSCNPRIIHRNISSKCILLTAEFEPKISDFGLARLMNPIDTHLSTFVNGEFGDFGYVAPEYSRTMVATPKGDVYSFGVVLLELVTGQKATSVTKVSEEKAEEENFKGNLVEWITKLSSESKLQEAIDRSLLGNGVDDEIFKVLKVACNCVLPEIAKQRPTMFEVYQLLRAIGESYNFTADDDILIPSESGEGDFIEELIVAR

SEQ ID NO: 47936 - DNA, 1285 bp, Arabidopsis thaliana
  misc_feature (1)..(1285): Ceres Seq. ID no. 12666374
  misc_feature: MA Experiment ID: 20000227 Result: Down-regulated in Transcription
  misc_feature: MA Experiment 20000227 PARAMETER Experiment Name: At_Root-Tips-vs-Tops_P Parameter: Tissue Value: Root Tips vs. Root Tops
  misc_feature: MA Experiment ID: 20000437 Result: Up-regulated in Transcription
  misc_feature: MA Experiment 20000437 PARAMETER Experiment Name: At_Drought_P Parameter: Age (day) Value: 8
  misc_feature: MA Experiment 20000437 PARAMETER Experiment Name: At_Drought_P Parameter: Organism Value: A. thaliana
  misc_feature: MA Experiment 20000437 PARAMETER Experiment Name: At_Drought_P Parameter: Plant Line Value: WS
  misc_feature: MA Experiment 20000437 PARAMETER Experiment Name: At_Drought_P Parameter: Timepoint (hr) Value: 24
  misc_feature: MA Experiment 20000437 PARAMETER Experiment Name: At_Drought_P Parameter: Tissue Value: Whole Plant
  misc_feature: MA Experiment 20000437 PARAMETER Experiment Name: At_Drought_P Parameter: Treatment Value: Drought vs. No Drought
atcgcaaatgttaaactattatacacatataaatttctgtatatacaaaacaaacgaagaagacgaatctctcagtttcgtcgttcgtttcgaagttgtgcgttggtgaaatttgaaatctgaatacactcattgcaaaccttagaagaagaagaagaagaagaagaagaagcttccatagattccgttgggcttttactgtgtttgattgatcggatcgattgcgattacggagaagatatggctcaggctgtagaagaatggtataaacagatgccgattatcactcgctcttatctcacggcggctgttatcaccaccgtcggatgttccctcgatatcatatctccatataacctttatttgaatccgacacttgtggtgaagcaataccaatattggcgtctcgttactaatttcttgtatttccggaagatggatttggacttcatgttccatatgttctttctcgcacgatactgcaaactccttgaagaaaactcattcaggggaaagactgctgatttcctatacatgctcctatttggagcatctgttttaaccggtattgtacttatcggtggaatgataccatacttgtcagcatcatttgctaaaatcatcttcctcagcaactcattaactttcatgatggtctatgtatggagcaaacaaaatccttatattcacatgagtttccttggtctgttcaccttcacagcagcttacctaccatgggtgcttcttggcttctctatccttgttggtgccagtgcttgggtggatcttttgggtatgatagcaggtcacgcttactactttctggctgaggtttatccgcgaatgactaatcgtcgtccattaaagactccatcattcctcaaagcgttatttgcagatgaaccagttgtggttgcacggccagaagatgtgaggtttgctgctgcgcctttcgatgaaatccaccaagactgattctgtcatcttacatttcccaaacctaaacacccgaatcagtagtttggcttgtggatcagatataaatggtgcaaaggcagatgatacacaaaagtctattttgactctgacacgtagttgcgacccacacaccctagtttctagtagttgggtgtgttttggttccttctctttcctcccatctcttcatctttttgtgtatacaaacatcgtttgcttttagtggttattgatatgaacacactcaatttgtacacaacctctactagtgtcgcaatgttttagcgagggaacatgttttgaattc

SEQ ID NO: 47937 - protein, 244 aa, Arabidopsis thaliana
  peptide (1)..(244): Ceres Seq. ID no. 12666375
  misc_feature (12)..(212): Pfam Name: Der1-like family Pfam Description: Der1-like family
  misc_feature (3)..(230): Homolog of NCBI NO: 35505512 NR Description: FLJ43842 protein [Homo sapiens]
  misc_feature (3)..(222): Homolog of NCBI NO: 16151831 NR Description: F-LANa [Mus musculus]
  misc_feature (3)..(222): Homolog of NCBI NO: 15808990 NR Description: carcinoma related gene [Mus musculus]
  misc_feature (1)..(239): Homolog of NCBI NO: 40352706 NR Description: Unknown (protein for MGC:63991) [Danio rerio]
  misc_feature (34)..(244): Homolog of NCBI NO: 25407582 NR Description: hypothetical protein AT4g21810 [imported] -
  misc_feature (15)..(244): Homolog of NCBI NO: 7487831 NR Description: hypothetical protein T8O5.20 - Arabidopsis
  misc_feature (1)..(244): Homolog of NCBI NO: 27573354 NR Description: putative Der1-like protein
  misc_feature (1)..(244): Homolog of NCBI NO: 22328865 NR Description: putative protein
  misc_feature (1)..(244): Homolog of NCBI NO: 17473759 NR Description: putative protein [Arabidopsis thaliana]
  misc_feature (1)..(244): Homolog of NCBI NO: 15234480 NR Description: unknown protein
MAQAVEEWYKQMPIITRSYLTAAVITTVGCSLDIISPYNLYLNPTLVVKQYQYWRLVTNFLYFRKMDLDFMFHMFFLARYCKLLEENSFRGKTADFLYMLLFGASVLTGIVLIGGMIPYLSASFAKIIFLSNSLTFMMVYVWSKQNPYIHMSFLGLFTFTAAYLPWVLLGFSILVGASAWVDLLGMIAGHAYYFLAEVYPRMTNRRPLKTPSFLKALFADEPVVVARPEDVRFAAAPFDEIHQD

SEQ ID NO: 47938 - protein, 233 aa, Arabidopsis thaliana
  peptide (1)..(233): Ceres Seq. ID no. 12666376
  misc_feature (1)..(201): Pfam Name: Der1-like family Pfam Description: Der1-like family
  misc_feature (1)..(219): Homolog of NCBI NO: 35505512 NR Description: FLJ43842 protein [Homo sapiens]
  misc_feature (1)..(211): Homolog of NCBI NO: 16151831 NR Description: F-LANa [Mus musculus]
  misc_feature (1)..(211): Homolog of NCBI NO: 15808990 NR Description: carcinoma related gene [Mus musculus]
  misc_feature (1)..(228): Homolog of NCBI NO: 40352706 NR Description: Unknown (protein for MGC:63991) [Danio rerio]
  misc_feature (23)..(233): Homolog of NCBI NO: 25407582 NR Description: hypothetical protein AT4g21810 [imported] -
  misc_feature (4)..(233): Homolog of NCBI NO: 7487831 NR Description: hypothetical protein T8O5.20 - Arabidopsis
  misc_feature (1)..(233): Homolog of NCBI NO: 27573354 NR Description: putative Der1-like protein
  misc_feature (1)..(233): Homolog of NCBI NO: 22328865 NR Description: putative protein
  misc_feature (1)..(233): Homolog of NCBI NO: 17473759 NR Description: putative protein [Arabidopsis thaliana]
  misc_feature (1)..(233): Homolog of NCBI NO: 15234480 NR Description: unknown protein
MPIITRSYLTAAVITTVGCSLDIISPYNLYLNPTLVVKQYQYWRLVTNFLYFRKMDLDFMFHMFFLARYCKLLEENSFRGKTADFLYMLLFGASVLTGIVLIGGMIPYLSASFAKIIFLSNSLTFMMVYVWSKQNPYIHMSFLGLFTFTAAYLPWVLLGFSILVGASAWVDLLGMIAGHAYYFLAEVYPRMTNRRPLKTPSFLKALFADEPVVVARPEDVRFAAAPFDEIHQD

SEQ ID NO: 47939 - protein, 179 aa, Arabidopsis thaliana
  peptide (1)..(179): Ceres Seq. ID no. 12666377
  misc_feature (1)..(147): Pfam Name: Der1-like family Pfam Description: Der1-like family
  misc_feature (1)..(165): Homolog of NCBI NO: 35505512 NR Description: FLJ43842 protein [Homo sapiens]
  misc_feature (1)..(157): Homolog of NCBI NO: 16151831 NR Description: F-LANa [Mus musculus]
  misc_feature (1)..(157): Homolog of NCBI NO: 15808990 NR Description: carcinoma related gene [Mus musculus]
  misc_feature (1)..(174): Homolog of NCBI NO: 40352706 NR Description: Unknown (protein for MGC:63991) [Danio rerio]
  misc_feature (1)..(179): Homolog of NCBI NO: 25407582 NR Description: hypothetical protein AT4g21810 [imported] -
  misc_feature (1)..(179): Homolog of NCBI NO: 7487831 NR Description: hypothetical protein T8O5.20 - Arabidopsis
  misc_feature (1)..(179): Homolog of NCBI NO: 27573354 NR Description: putative Der1-like protein
  misc_feature (1)..(179): Homolog of NCBI NO: 22328865 NR Description: putative protein
  misc_feature (1)..(179): Homolog of NCBI NO: 17473759 NR Description: putative protein [Arabidopsis thaliana]
  misc_feature (1)..(179): Homolog of NCBI NO: 15234480 NR Description: unknown protein
MDLDFMFHMFFLARYCKLLEENSFRGKTADFLYMLLFGASVLTGIVLIGGMIPYLSASFAKIIFLSNSLTFMMVYVWSKQNPYIHMSFLGLFTFTAAYLPWVLLGFSILVGASAWVDLLGMIAGHAYYFLAEVYPRMTNRRPLKTPSFLKALFADEPVVVARPEDVRFAAAPFDEIHQD

SEQ ID NO: 47940 - DNA, 1330 bp, Arabidopsis thaliana
  misc_feature (1)..(1330): Ceres Seq. ID no. 13648763
  misc_feature: MA Experiment ID: 20000173 Result: Down-regulated in Transcription
  misc_feature: MA Experiment 20000173 PARAMETER Experiment Name: At_42deg_Heat_P Parameter: Age (day) Value: 14
  misc_feature: MA Experiment 20000173 PARAMETER Experiment Name: At_42deg_Heat_P Parameter: Organism Value: A. thaliana
  misc_feature: MA Experiment 20000173 PARAMETER Experiment Name: At_42deg_Heat_P Parameter: Plant Line Value: WS
  misc_feature: MA Experiment 20000173 PARAMETER Experiment Name: At_42deg_Heat_P Parameter: Temperature (deg C) Value: 42 vs. 22
  misc_feature: MA Experiment 20000173 PARAMETER Experiment Name: At_42deg_Heat_P Parameter: Timepoint (hr) Value: 6
  misc_feature: MA Experiment 20000173 PARAMETER Experiment Name: At_42deg_Heat_P Parameter: Tissue Value: Aerial
  misc_feature: MA Experiment ID: 20000184 Result: Down-regulated in Transcription
  misc_feature: MA Experiment 20000184 PARAMETER Experiment Name: At_Shoots__P Parameter: Age (day) Value: 7
  misc_feature: MA Experiment 20000184 PARAMETER Experiment Name: At_Shoots__P Parameter: Tissue Value: Shoots vs. Whole Plant
  misc_feature: MA Experiment ID: 20000234 Result: Up-regulated in Transcription
  misc_feature: MA Experiment 20000234 PARAMETER Experiment Name: At_Siliques_P Parameter: Age (day) Value: 21
  misc_feature: MA Experiment 20000234 PARAMETER Experiment Name: At_Siliques_P Parameter: Organism Value: A. thaliana
  misc_feature: MA Experiment 20000234 PARAMETER Experiment Name: At_Siliques_P Parameter: Plant Line Value: WS
  misc_feature: MA Experiment 20000234 PARAMETER Experiment Name: At_Siliques_P Parameter: Tissue Value: Less Than 5mm Siliques vs. Whole Plant
  misc_feature: MA Experiment ID: 20000264 Result: Up-regulated in Transcription
  misc_feature: MA Experiment 20000264 PARAMETER Experiment Name: At_Open_Flower_P Parameter: Age (day) Value: 21
  misc_feature: MA Experiment 20000264 PARAMETER Experiment Name: At_Open_Flower_P Parameter: Plant Line Value: WS
  misc_feature: MA Experiment 20000264 PARAMETER Experiment Name: At_Open_Flower_P Parameter: Tissue Value: Open Flower vs. Whole Plant
  misc_feature: MA Experiment ID: 20000265 Result: Up-regulated in Transcription
  misc_feature: MA Experiment 20000265 PARAMETER Experiment Name: At_Open_Flower_P Parameter: Age (day) Value: 21
  misc_feature: MA Experiment 20000265 PARAMETER Experiment Name: At_Open_Flower_P Parameter: Plant Line Value: WS
  misc_feature: MA Experiment 20000265 PARAMETER Experiment Name: At_Open_Flower_P Parameter: Tissue Value: Closed Flower vs. Whole Plant
  misc_feature: MA Experiment ID: 20000286 Result: Up-regulated in Transcription
  misc_feature: MA Experiment 20000286 PARAMETER Experiment Name: At_Open_Flower_P Parameter: Age (day) Value: 21
  misc_feature: MA Experiment 20000286 PARAMETER Experiment Name: At_Open_Flower_P Parameter: Plant Line Value: WS
  misc_feature: MA Experiment 20000286 PARAMETER Experiment Name: At_Open_Flower_P Parameter: Tissue Value: Half Open vs. Whole Plant
  misc_feature: MA Experiment ID: 20000451 Result: Up-regulated in Transcription
  misc_feature: MA Experiment 20000451 PARAMETER Experiment Name: At_CS6879_Shoots-Roots_P Parameter: Age (day) Value: 14
  misc_feature: MA Experiment 20000451 PARAMETER Experiment Name: At_CS6879_Shoots-Roots_P Parameter: Organism Value: A. thaliana
  misc_feature: MA Experiment 20000451 PARAMETER Experiment Name: At_CS6879_Shoots-Roots_P Parameter: Plant Line Value: CS6879 vs. WS
  misc_feature: MA Experiment 20000451 PARAMETER Experiment Name: At_CS6879_Shoots-Roots_P Parameter: Tissue Value: Roots
  misc_feature: MA Experiment ID: 20000794 Result: Up-regulated in Transcription
  misc_feature: MA Experiment 20000794 PARAMETER Experiment Name: At_Petals_P Parameter: Age (day) Value: 23-25 days
  misc_feature: MA Experiment 20000794 PARAMETER Experiment Name: At_Petals_P Parameter: Plant Line Value: WS
  misc_feature: MA Experiment 20000794 PARAMETER Experiment Name: At_Petals_P Parameter: Tissue Value: Petals vs. Whole plant
  misc_feature: MA Experiment ID: 20001451 Result: Down-regulated in Transcription
  misc_feature: MA Experiment 20001451 PARAMETER Experiment Name: At_Far-red-induction_P Parameter: Age (day) Value: 7
  misc_feature: MA Experiment 20001451 PARAMETER Experiment Name: At_Far-red-induction_P Parameter: Light Value: Far-red vs. White
  misc_feature: MA Experiment 20001451 PARAMETER Experiment Name: At_Far-red-induction_P Parameter: Organism Value: A. thaliana
  misc_feature: MA Experiment 20001451 PARAMETER Experiment Name: At_Far-red-induction_P Parameter: Plant Line Value: Columbia
  misc_feature: MA Experiment 20001451 PARAMETER Experiment Name: At_Far-red-induction_P Parameter: Timepoint (hr) Value: 24
  misc_feature: MA Experiment 20001451 PARAMETER Experiment Name: At_Far-red-induction_P Parameter: Tissue Value: Whole Plant
  misc_feature: MA Experiment ID: 20001555 Result: Up-regulated in Transcription
  misc_feature: MA Experiment 20001555 PARAMETER Experiment Name: At_Drought_Soil_Dry_P Parameter: Age (day) Value: 24
  misc_feature: MA Experiment 20001555 PARAMETER Experiment Name: At_Drought_Soil_Dry_P Parameter: Organism Value: A. thaliana
  misc_feature: MA Experiment 20001555 PARAMETER Experiment Name: At_Drought_Soil_Dry_P Parameter: Plant Line Value: WS
  misc_feature: MA Experiment 20001555 PARAMETER Experiment Name: At_Drought_Soil_Dry_P Parameter: Post Timepoint (hr) Value: None
  misc_feature: MA Experiment 20001555 PARAMETER Experiment Name: At_Drought_Soil_Dry_P Parameter: Post-Treatment Value: None
  misc_feature: MA Experiment 20001555 PARAMETER Experiment Name: At_Drought_Soil_Dry_P Parameter: Timepoint (day) Value: 10
  misc_feature: MA Experiment 20001555 PARAMETER Experiment Name: At_Drought_Soil_Dry_P Parameter: Treatment Value: Drought vs. No Drought
agctctcaaacaaagatattgctactgcctcaccaaattttcctccggaaagagagtgagaaaatttccaagagaaagaggagagagaatggctggagaagaaatagagagggagaagaaatctgcagcatctgcaagaactcacaccagaaacaacactcaacaaagttcttcttctggttatctgaaaacgcttctcctggtaacgttcgtcggagttttagcatgggtttatcaaacaatccaaccaccacccgccaaaatcgtcggctctcccggtggacccaccgtgacatcaccgaggatcaaactgagagacggaagacatctggcttacacagaattcggaatccctagagacgaagccaagttcaagatcataaacatccacggcttcgattcttgtatgcgagactcgcatttcgccaatttcttatcgccggctcttgtggaggaattgaggatatacattgtgtcttttgatcgtcctggttatggagagagtgatcctaacctgaatgggtcaccaagaagcatagcattggatatagaagagcttgctgatgggttaggactaggacctcagttctatctctttggttactccatgggtggtgaaattacatgggcatgccttaactacattcctcacaggttagcaggagctgcccttgtagctccagcgattaactattggtggagaaacttaccgggagatttaacaagagaagctttctctcttatgcatcctgcagatcaatggtcacttcgagtagctcattatgctccttggcttacatattggtggaacactcagaaatggttcccaatctccaatgtgattgccggtaatcccattattttctcacgtcaggacatggagatcttgtcgaagctcggattcgtcaatccaaatcgggcatacataagacaacaaggtgaatatgtaagcttacaccgagatttgaatgtcgcattttcaagctgggagtttgatccgttagaccttcaagatccgttcccgaacaacaatggctcagttcacgtatggaatggcgatgaggataagtttgtgccagtaaagcttcaacggtatgtcgcgtcaaagctgccatggattcgttaccatgaaatatctggatcaggacattttgtaccatttgtggaaggtatgactgataagatcatcaagtcacttttggttggggaagaagatgtaagtgagagtagagaagcctctgtttaagtcaatgtggtttttaagaataattaattgcttgcaatgctaaactagttatgatcaacaatcaaatcaaagcaactttagtcg

SEQ ID NO: 47941 - protein, 414 aa, Arabidopsis thaliana
  peptide (1)..(414): Ceres Seq. ID no. 13648764
  misc_feature (155)..(412): Pfam Name: alpha/beta hydrolase fold Pfam Description: alpha/beta hydrolase fold
  misc_feature (56)..(399): Homolog of NCBI NO: 37536162 NR Description: putative alpha/beta hydrolase
  misc_feature (62)..(404): Homolog of NCBI NO: 38346334 NR Description: OSJNBa0073L04.5 [Oryza sativa (japonica
  misc_feature (50)..(405): Homolog of NCBI NO: 15221193 NR Description: esterase/lipase/thioesterase family [Arabidopsis
  misc_feature (49)..(410): Homolog of NCBI NO: 18410575 NR Description: hydrolase, alpha/beta fold family [Arabidopsis
  misc_feature (49)..(400): Homolog of NCBI NO: 21537089 NR Description: unknown [Arabidopsis thaliana]
  misc_feature (67)..(400): Homolog of NCBI NO: 18410582 NR Description: esterase/lipase/thioesterase family [Arabidopsis
  misc_feature (67)..(400): Homolog of NCBI NO: 21592662 NR Description: unknown [Arabidopsis thaliana]
  misc_feature (47)..(403): Homolog of NCBI NO: 18404095 NR Description: hydrolase, alpha/beta fold family [Arabidopsis
  misc_feature (47)..(403): Homolog of NCBI NO: 28416665 NR Description: At2g36290 [Arabidopsis thaliana]
  misc_feature (30)..(414): Homolog of NCBI NO: 15228377 NR Description: hydrolase, alpha/beta fold family [Arabidopsis
ALKQRYCYCLTKFSSGKRVRKFPRERGERMAGEEIEREKKSAASARTHTRNNTQQSSSSGYLKTLLLVTFVGVLAWVYQTIQPPPAKIVGSPGGPTVTSPRIKLRDGRHLAYTEFGIPRDEAKFKIINIHGFDSCMRDSHFANFLSPALVEELRIYIVSFDRPGYGESDPNLNGSPRSIALDIEELADGLGLGPQFYLFGYSMGGEITWACLNYIPHRLAGAALVAPAINYWWRNLPGDLTREAFSLMHPADQWSLRVAHYAPWLTYWWNTQKWFPISNVIAGNPIIFSRQDMEILSKLGFVNPNRAYIRQQGEYVSLHRDLNVAFSSWEFDPLDLQDPFPNNNGSVHVWNGDEDKFVPVKLQRYVASKLPWIRYHEISGSGHFVPFVEGMTDKIIKSLLVGEEDVSESREASV

SEQ ID NO: 47942 - protein, 385 aa, Arabidopsis thaliana
  peptide (1)..(385): Ceres Seq. ID no. 13648765
  misc_feature (126)..(383): Pfam Name: alpha/beta hydrolase fold Pfam Description: alpha/beta hydrolase fold
  misc_feature (27)..(370): Homolog of NCBI NO: 37536162 NR Description: putative alpha/beta hydrolase
  misc_feature (33)..(375): Homolog of NCBI NO: 38346334 NR Description: OSJNBa0073L04.5 [Oryza sativa (japonica
  misc_feature (21)..(376): Homolog of NCBI NO: 15221193 NR Description: esterase/lipase/thioesterase family [Arabidopsis
  misc_feature (20)..(381): Homolog of NCBI NO: 18410575 NR Description: hydrolase, alpha/beta fold family [Arabidopsis
  misc_feature (20)..(371): Homolog of NCBI NO: 21537089 NR Description: unknown [Arabidopsis thaliana]
  misc_feature (38)..(371): Homolog of NCBI NO: 18410582 NR Description: esterase/lipase/thioesterase family [Arabidopsis
  misc_feature (38)..(371): Homolog of NCBI NO: 21592662 NR Description: unknown [Arabidopsis thaliana]
  misc_feature (18)..(374): Homolog of NCBI NO: 18404095 NR Description: hydrolase, alpha/beta fold family [Arabidopsis
  misc_feature (18)..(374): Homolog of NCBI NO: 28416665 NR Description: At2g36290 [Arabidopsis thaliana]
  misc_feature (1)..(385): Homolog of NCBI NO: 15228377 NR Description: hydrolase, alpha/beta fold family [Arabidopsis
MAGEEIEREKKSAASARTHTRNNTQQSSSSGYLKTLLLVTFVGVLAWVYQTIQPPPAKIVGSPGGPTVTSPRIKLRDGRHLAYTEFGIPRDEAKFKIINIHGFDSCMRDSHFANFLSPALVEELRIYIVSFDRPGYGESDPNLNGSPRSIALDIEELADGLGLGPQFYLFGYSMGGEITWACLNYIPHRLAGAALVAPAINYWWRNLPGDLTREAFSLMHPADQWSLRVAHYAPWLTYWWNTQKWFPISNVIAGNPIIFSRQDMEILSKLGFVNPNRAYIRQQGEYVSLHRDLNVAFSSWEFDPLDLQDPFPNNNGSVHVWNGDEDKFVPVKLQRYVASKLPWIRYHEISGSGHFVPFVEGMTDKIIKSLLVGEEDVSESREASV

SEQ ID NO: 47943 - protein, 279 aa, Arabidopsis thaliana
  peptide (1)..(279): Ceres Seq. ID no. 13648766
  misc_feature (20)..(277): Pfam Name: alpha/beta hydrolase fold Pfam Description: alpha/beta hydrolase fold
  misc_feature (1)..(264): Homolog of NCBI NO: 37536162 NR Description: putative alpha/beta hydrolase
  misc_feature (1)..(269): Homolog of NCBI NO: 38346334 NR Description: OSJNBa0073L04.5 [Oryza sativa (japonica
  misc_feature (1)..(270): Homolog of NCBI NO: 15221193 NR Description: esterase/lipase/thioesterase family [Arabidopsis
  misc_feature (1)..(275): Homolog of NCBI NO: 18410575 NR Description: hydrolase, alpha/beta fold family [Arabidopsis
  misc_feature (1)..(265): Homolog of NCBI NO: 21537089 NR Description: unknown [Arabidopsis thaliana]
  misc_feature (1)..(265): Homolog of NCBI NO: 18410582 NR Description: esterase/lipase/thioesterase family [Arabidopsis
  misc_feature (1)..(265): Homolog of NCBI NO: 21592662 NR Description: unknown [Arabidopsis thaliana]
  misc_feature (1)..(268): Homolog of NCBI NO: 18404095 NR Description: hydrolase, alpha/beta fold family [Arabidopsis
  misc_feature (1)..(268): Homolog of NCBI NO: 28416665 NR Description: At2g36290 [Arabidopsis thaliana]
  misc_feature (1)..(279): Homolog of NCBI NO: 15228377 NR Description: hydrolase, alpha/beta fold family [Arabidopsis
MRDSHFANFLSPALVEELRIYIVSFDRPGYGESDPNLNGSPRSIALDIEELADGLGLGPQFYLFGYSMGGEITWACLNYIPHRLAGAALVAPAINYWWRNLPGDLTREAFSLMHPADQWSLRVAHYAPWLTYWWNTQKWFPISNVIAGNPIIFSRQDMEILSKLGFVNPNRAYIRQQGEYVSLHRDLNVAFSSWEFDPLDLQDPFPNNNGSVHVWNGDEDKFVPVKLQRYVASKLPWIRYHEISGSGHFVPFVEGMTDKIIKSLLVGEEDVSESREASV

SEQ ID NO: 47944 - DNA, 2765 bp, Arabidopsis thaliana; identical to SEQ ID NO: 46527
  misc_feature (1)..(2765): Ceres Seq. ID no. 13579248
  misc_feature: MA Experiment ID: 20000307 Result: Up-regulated in Transcription
  misc_feature: MA Experiment 20000307 PARAMETER Experiment Name: At_Germinating_Seeds_Sub_P Parameter: Age (hr) Value: 24 vs. 0
  misc_feature: MA Experiment 20000307 PARAMETER Experiment Name: At_Germinating_Seeds_Sub_P Parameter: Organism Value: A. thaliana
  misc_feature: MA Experiment 20000307 PARAMETER Experiment Name: At_Germinating_Seeds_Sub_P Parameter: Plant Line Value: WS
  misc_feature: MA Experiment 20000307 PARAMETER Experiment Name: At_Germinating_Seeds_Sub_P Parameter: Tissue Value: Germinating Seeds
  misc_feature: MA Experiment ID: 20000315 Result: Down-regulated in Transcription
  misc_feature: MA Experiment 20000315 PARAMETER Experiment Name: At_14day_Shoots-Roots_Sub_P Parameter: Age (day) Value: 14
  misc_feature: MA Experiment 20000315 PARAMETER Experiment Name: At_14day_Shoots-Roots_Sub_P Parameter: Organism Value: A. thaliana
  misc_feature: MA Experiment 20000315 PARAMETER Experiment Name: At_14day_Shoots-Roots_Sub_P Parameter: Plant Line Value: WS
  misc_feature: MA Experiment 20000315 PARAMETER Experiment Name: At_14day_Shoots-Roots_Sub_P Parameter: Tissue Value: Shoots vs. Whole Plant
  misc_feature: MA Experiment ID: 20000327 Result: Down-regulated in Transcription
  misc_feature: MA Experiment 20000327 PARAMETER Experiment Name: At_42deg_Heat_Sub_P Parameter: Age (day) Value: 14
  misc_feature: MA Experiment 20000327 PARAMETER Experiment Name: At_42deg_Heat_Sub_P Parameter: Organism Value: A. thaliana
  misc_feature: MA Experiment 20000327 PARAMETER Experiment Name: At_42deg_Heat_Sub_P Parameter: Plant Line Value: WS
  misc_feature: MA Experiment 20000327 PARAMETER Experiment Name: At_42deg_Heat_Sub_P Parameter: Temperature (deg C) Value: 42 vs. 22
  misc_feature: MA Experiment 20000327 PARAMETER Experiment Name: At_42deg_Heat_Sub_P Parameter: Timepoint (hr) Value: 1
  misc_feature: MA Experiment 20000327 PARAMETER Experiment Name: At_42deg_Heat_Sub_P Parameter: Tissue Value: Aerial
  misc_feature: MA Experiment ID: 20000328 Result: Down-regulated in Transcription
  misc_feature: MA Experiment 20000328 PARAMETER Experiment Name: At_42deg_Heat_Sub_P Parameter: Age (day) Value: 14
  misc_feature: MA Experiment 20000328 PARAMETER Experiment Name: At_42deg_Heat_Sub_P Parameter: Organism Value: A. thaliana
  misc_feature: MA Experiment 20000328 PARAMETER Experiment Name: At_42deg_Heat_Sub_P Parameter: Plant Line Value: WS
  misc_feature: MA Experiment 20000328 PARAMETER Experiment Name: At_42deg_Heat_Sub_P Parameter: Temperature (deg C) Value: 42 vs. 22
  misc_feature: MA Experiment 20000328 PARAMETER Experiment Name: At_42deg_Heat_Sub_P Parameter: Timepoint (hr) Value: 6
  misc_feature: MA Experiment 20000328 PARAMETER Experiment Name: At_42deg_Heat_Sub_P Parameter: Tissue Value: Aerial

SEQ ID NO: 47945 - protein, 829 aa, Arabidopsis thaliana; identical to SEQ ID NO: 46528
  peptide (1)..(829): Ceres Seq. ID no. 13579249
  misc_feature (553)..(737): Pfam Name: ATPase family associated with various cellular Pfam Description: ATPase family associated with various cellular
  misc_feature (553)..(737): Pfam Name: ATPase family associated with various cellular Pfam Description: ATPase family associated with various cellular
  misc_feature (553)..(737): Pfam Name: ATPase family associated with various cellular Pfam Description: ATPase family associated with various cellular
  misc_feature (1)..(448): Homolog of NCBI NO: 34912822 NR Description: P0501G01.20 [Oryza sativa (japonica
  misc_feature (1)..(116): Homolog of NCBI NO: 15234347 NR Description: hypothetical protein [Arabidopsis thaliana]
  misc_feature (440)..(829): Homolog of NCBI NO: 15234347 NR Description: hypothetical protein [Arabidopsis thaliana]
  misc_feature (745)..(829): Homolog of NCBI NO: 25404926 NR Description: protein F22C12.12 [imported] - Arabidopsis
  misc_feature (160)..(750): Homolog of NCBI NO: 25404926 NR Description: protein F22C12.12 [imported] - Arabidopsis
  misc_feature (1)..(448): Homolog of NCBI NO: 34912822 NR Description: P0501G01.20 [Oryza sativa (japonica
  misc_feature (440)..(829): Homolog of NCBI NO: 15234347 NR Description: hypothetical protein [Arabidopsis thaliana]
  misc_feature (160)..(750): Homolog of NCBI NO: 25404926 NR Description: protein F22C12.12 [imported] - Arabidopsis
  misc_feature (745)..(829): Homolog of NCBI NO: 25404926 NR Description: protein F22C12.12 [imported] - Arabidopsis
  misc_feature (440)..(829): Homolog of NCBI NO: 15234347 NR Description: hypothetical protein [Arabidopsis thaliana]
  misc_feature (1)..(116): Homolog of NCBI NO: 15234347 NR Description: hypothetical protein [Arabidopsis thaliana]
  misc_feature (1)..(448): Homolog of NCBI NO: 34912822 NR Description: P0501G01.20 [Oryza sativa (japonica
  misc_feature (1)..(829): Homolog of NCBI NO: 30696968 NR Description: expressed protein [Arabidopsis thaliana]
  misc_feature (6)..(829): Homolog of NCBI NO: 18407974 NR Description: expressed protein [Arabidopsis thaliana]
  misc_feature (8)..(725): Homolog of NCBI NO: 34904204 NR Description: P0492F05.26 [Oryza sativa (japonica
  misc_feature (733)..(829): Homolog of NCBI NO: 34904204 NR Description: P0492F05.26 [Oryza sativa (japonica
  misc_feature (1)..(747): Homolog of NCBI NO: 17065032 NR Description: similar to homeobox protein [Arabidopsis thaliana]
  misc_feature (1)..(829): Homolog of NCBI NO: 30696968 NR Description: expressed protein [Arabidopsis thaliana]
  misc_feature (6)..(829): Homolog of NCBI NO: 18407974 NR Description: expressed protein [Arabidopsis thaliana]
  misc_feature (8)..(725): Homolog of NCBI NO: 34904204 NR Description: P0492F05.26 [Oryza sativa (japonica
  misc_feature (733)..(829): Homolog of NCBI NO: 34904204 NR Description: P0492F05.26 [Oryza sativa (japonica
  misc_feature (1)..(747): Homolog of NCBI NO: 17065032 NR Description: similar to homeobox protein [Arabidopsis thaliana]
  misc_feature (160)..(750): Homolog of NCBI NO: 25404926 NR Description: protein F22C12.12 [imported] - Arabidopsis
  misc_feature (745)..(829): Homolog of NCBI NO: 25404926 NR Description: protein F22C12.12 [imported] - Arabidopsis
  misc_feature (1)..(116): Homolog of NCBI NO: 15234347 NR Description: hypothetical protein [Arabidopsis thaliana]
  misc_feature (1)..(747): Homolog of NCBI NO: 17065032 NR Description: similar to homeobox protein [Arabidopsis thaliana]
  misc_feature (733)..(829): Homolog of NCBI NO: 34904204 NR Description: P0492F05.26 [Oryza sativa (japonica
  misc_feature (8)..(725): Homolog of NCBI NO: 34904204 NR Description: P0492F05.26 [Oryza sativa (japonica
  misc_feature (6)..(829): Homolog of NCBI NO: 18407974 NR Description: expressed protein [Arabidopsis thaliana]
  misc_feature (1)..(829): Homolog of NCBI NO: 30696968 NR Description: expressed protein [Arabidopsis thaliana]

SEQ ID NO: 47946 - protein, 712 aa, Arabidopsis thaliana; identical to SEQ ID NO: 46529
  peptide (1)..(712): Ceres Seq. ID no. 13579250
  misc_feature (436)..(620): Pfam Name: ATPase family associated with various cellular Pfam Description: ATPase family associated with various cellular
  misc_feature (436)..(620): Pfam Name: ATPase family associated with various cellular Pfam Description: ATPase family associated with various cellular
  misc_feature (436)..(620): Pfam Name: ATPase family associated with various cellular Pfam Description: ATPase family associated with various cellular
  misc_feature (323)..(694): Homolog of NCBI NO: 34912822 NR Description: P0501G01.20 [Oryza sativa (japonica
  misc_feature (1)..(331): Homolog of NCBI NO: 34912822 NR Description: P0501G01.20 [Oryza sativa (japonica
  misc_feature (323)..(712): Homolog of NCBI NO: 15234347 NR Description: hypothetical protein [Arabidopsis thaliana]
  misc_feature (628)..(712): Homolog of NCBI NO: 25404926 NR Description: protein F22C12.12 [imported] - Arabidopsis
  misc_feature (43)..(633): Homolog of NCBI NO: 25404926 NR Description: protein F22C12.12 [imported] - Arabidopsis
  misc_feature (323)..(694): Homolog of NCBI NO: 34912822 NR Description: P0501G01.20 [Oryza sativa (japonica
  misc_feature (323)..(712): Homolog of NCBI NO: 15234347 NR Description: hypothetical protein [Arabidopsis thaliana]
  misc_feature (43)..(633): Homolog of NCBI NO: 25404926 NR Description: protein F22C12.12 [imported] - Arabidopsis
  misc_feature (628)..(712): Homolog of NCBI NO: 25404926 NR Description: protein F22C12.12 [imported] - Arabidopsis
  misc_feature (323)..(712): Homolog of NCBI NO: 15234347 NR Description: hypothetical protein [Arabidopsis thaliana]
  misc_feature (1)..(331): Homolog of NCBI NO: 34912822 NR Description: P0501G01.20 [Oryza sativa (japonica
  misc_feature (323)..(694): Homolog of NCBI NO: 34912822 NR Description: P0501G01.20 [Oryza sativa (japonica
  misc_feature (1)..(712): Homolog of NCBI NO: 30696968 NR Description: expressed protein [Arabidopsis thaliana]
  misc_feature (1)..(712): Homolog of NCBI NO: 18407974 NR Description: expressed protein [Arabidopsis thaliana]
  misc_feature (1)..(608): Homolog of NCBI NO: 34904204 NR Description: P0492F05.26 [Oryza sativa (japonica
  misc_feature (616)..(712): Homolog of NCBI NO: 34904204 NR Description: P0492F05.26 [Oryza sativa (japonica
  misc_feature (1)..(630): Homolog of NCBI NO: 17065032 NR Description: similar to homeobox protein [Arabidopsis thaliana]
  misc_feature (1)..(712): Homolog of NCBI NO: 30696968 NR Description: expressed protein [Arabidopsis thaliana]
  misc_feature (1)..(712): Homolog of NCBI NO: 18407974 NR Description: expressed protein [Arabidopsis thaliana]
  misc_feature (1)..(608): Homolog of NCBI NO: 34904204 NR Description: P0492F05.26 [Oryza sativa (japonica
  misc_feature (616)..(712): Homolog of NCBI NO: 34904204 NR Description: P0492F05.26 [Oryza sativa (japonica
  misc_feature (1)..(630): Homolog of NCBI NO: 17065032 NR Description: similar to homeobox protein [Arabidopsis thaliana]
  misc_feature (43)..(633): Homolog of NCBI NO: 25404926 NR Description: protein F22C12.12 [imported] - Arabidopsis
  misc_feature (628)..(712): Homolog of NCBI NO: 25404926 NR Description: protein F22C12.12 [imported] - Arabidopsis
  misc_feature (1)..(331): Homolog of NCBI NO: 34912822 NR Description: P0501G01.20 [Oryza sativa (japonica
  misc_feature (1)..(630): Homolog of NCBI NO: 17065032 NR Description: similar to homeobox protein [Arabidopsis thaliana]
  misc_feature (616)..(712): Homolog of NCBI NO: 34904204 NR Description: P0492F05.26 [Oryza sativa (japonica
  misc_feature (1)..(608): Homolog of NCBI NO: 34904204 NR Description: P0492F05.26 [Oryza sativa (japonica
  misc_feature (1)..(712): Homolog of NCBI NO: 18407974 NR Description: expressed protein [Arabidopsis thaliana]
  misc_feature (1)..(712): Homolog of NCBI NO: 30696968 NR Description: expressed protein [Arabidopsis thaliana]

SEQ ID NO: 47947 - protein, 658 aa, Arabidopsis thaliana; identical to SEQ ID NO: 46530
  peptide (1)..(658): Ceres Seq. ID no. 13579251
  misc_feature (382)..(566): Pfam Name: ATPase family associated with various cellular Pfam Description: ATPase family associated with various cellular
  misc_feature (382)..(566): Pfam Name: ATPase family associated with various cellular Pfam Description: ATPase family associated with various cellular
  misc_feature (382)..(566): Pfam Name: ATPase family associated with various cellular Pfam Description: ATPase family associated with various cellular
  misc_feature (269)..(640): Homolog of NCBI NO: 34912822 NR Description: P0501G01.20 [Oryza sativa (japonica
  misc_feature (1)..(277): Homolog of NCBI NO: 34912822 NR Description: P0501G01.20 [Oryza sativa (japonica
  misc_feature (269)..(658): Homolog of NCBI NO: 15234347 NR Description: hypothetical protein [Arabidopsis thaliana]
  misc_feature (574)..(658): Homolog of NCBI NO: 25404926 NR Description: protein F22C12.12 [imported] - Arabidopsis
  misc_feature (1)..(579): Homolog of NCBI NO: 25404926 NR Description: protein F22C12.12 [imported] - Arabidopsis
  misc_feature (269)..(640): Homolog of NCBI NO: 34912822 NR Description: P0501G01.20 [Oryza sativa (japonica
  misc_feature (269)..(658): Homolog of NCBI NO: 15234347 NR Description: hypothetical protein [Arabidopsis thaliana]
  misc_feature (1)..(579): Homolog of NCBI NO: 25404926 NR Description: protein F22C12.12 [imported] - Arabidopsis
  misc_feature (574)..(658): Homolog of NCBI NO: 25404926 NR Description: protein F22C12.12 [imported] - Arabidopsis
  misc_feature (269)..(658): Homolog of NCBI NO: 15234347 NR Description: hypothetical protein [Arabidopsis thaliana]
  misc_feature (1)..(277): Homolog of NCBI NO: 34912822 NR Description: P0501G01.20 [Oryza sativa (japonica
  misc_feature (269)..(640): Homolog of NCBI NO: 34912822 NR Description: P0501G01.20 [Oryza sativa (japonica
  misc_feature (1)..(658): Homolog of NCBI NO: 30696968 NR Description: expressed protein [Arabidopsis thaliana]
  misc_feature (1)..(658): Homolog of NCBI NO: 18407974 NR Description: expressed protein [Arabidopsis thaliana]
  misc_feature (1)..(554): Homolog of NCBI NO: 34904204 NR Description: P0492F05.26 [Oryza sativa (japonica
  misc_feature (562)..(658): Homolog of NCBI NO: 34904204 NR Description: P0492F05.26 [Oryza sativa (japonica
  misc_feature (1)..(576): Homolog of NCBI NO: 17065032 NR Description: similar to homeobox protein [Arabidopsis thaliana]
  misc_feature (1)..(658): Homolog of NCBI NO: 30696968 NR Description: expressed protein [Arabidopsis thaliana]
  misc_feature (1)..(658): Homolog of NCBI NO: 18407974 NR Description: expressed protein [Arabidopsis thaliana]
  misc_feature (1)..(554): Homolog of NCBI NO: 34904204 NR Description: P0492F05.26 [Oryza sativa (japonica
  misc_feature (562)..(658): Homolog of NCBI NO: 34904204 NR Description: P0492F05.26 [Oryza sativa (japonica
  misc_feature (1)..(576): Homolog of NCBI NO: 17065032 NR Description: similar to homeobox protein [Arabidopsis thaliana]
  misc_feature (1)..(579): Homolog of NCBI NO: 25404926 NR Description: protein F22C12.12 [imported] - Arabidopsis
  misc_feature (574)..(658): Homolog of NCBI NO: 25404926 NR Description: protein F22C12.12 [imported] - Arabidopsis
  misc_feature (1)..(277): Homolog of NCBI NO: 34912822 NR Description: P0501G01.20 [Oryza sativa (japonica
  misc_feature (1)..(576): Homolog of NCBI NO: 17065032 NR Description: similar to homeobox protein [Arabidopsis thaliana]
  misc_feature (562)..(658): Homolog of NCBI NO: 34904204 NR Description: P0492F05.26 [Oryza sativa (japonica
  misc_feature (1)..(554): Homolog of NCBI NO: 34904204 NR Description: P0492F05.26 [Oryza sativa (japonica
  misc_feature (1)..(658): Homolog of NCBI NO: 18407974 NR Description: expressed protein [Arabidopsis thaliana]
  misc_feature (1)..(658): Homolog of NCBI NO: 30696968 NR Description: expressed protein [Arabidopsis thaliana]

SEQ ID NO: 47948 - DNA, 2063 bp, Arabidopsis thaliana
  misc_feature (1)..(2063): Ceres Seq. ID no. 13648772
  misc_feature: MA Experiment ID: 20000315 Result: Down-regulated in Transcription
  misc_feature: MA Experiment 20000315 PARAMETER Experiment Name: At_14day_Shoots-Roots_Sub_P Parameter: Age (day) Value: 14
  misc_feature: MA Experiment 20000315 PARAMETER Experiment Name: At_14day_Shoots-Roots_Sub_P Parameter: Organism Value: A. thaliana
  misc_feature: MA Experiment 20000315 PARAMETER Experiment Name: At_14day_Shoots-Roots_Sub_P Parameter: Plant Line Value: WS
  misc_feature: MA Experiment 20000315 PARAMETER Experiment Name: At_14day_Shoots-Roots_Sub_P Parameter: Tissue Value: Shoots vs. Whole Plant
  misc_feature: MA Experiment ID: 20000327 Result: Up-regulated in Transcription
  misc_feature: MA Experiment 20000327 PARAMETER Experiment Name: At_42deg_Heat_Sub_P Parameter: Age (day) Value: 14
  misc_feature: MA Experiment 20000327 PARAMETER Experiment Name: At_42deg_Heat_Sub_P Parameter: Organism Value: A. thaliana
  misc_feature: MA Experiment 20000327 PARAMETER Experiment Name: At_42deg_Heat_Sub_P Parameter: Plant Line Value: WS
  misc_feature: MA Experiment 20000327 PARAMETER Experiment Name: At_42deg_Heat_Sub_P Parameter: Temperature (deg C) Value: 42 vs. 22
  misc_feature: MA Experiment 20000327 PARAMETER Experiment Name: At_42deg_Heat_Sub_P Parameter: Timepoint (hr) Value: 1
  misc_feature: MA Experiment 20000327 PARAMETER Experiment Name: At_42deg_Heat_Sub_P Parameter: Tissue Value: Aerial
  misc_feature: MA Experiment ID: 20000355 Result: Up-regulated in Transcription
  misc_feature: MA Experiment 20000355 PARAMETER Experiment Name: At_Siliques_Sub_P Parameter: Age (day) Value: 21
  misc_feature: MA Experiment 20000355 PARAMETER Experiment Name: At_Siliques_Sub_P Parameter: Organism Value: A. thaliana
  misc_feature: MA Experiment 20000355 PARAMETER Experiment Name: At_Siliques_Sub_P Parameter: Plant Line Value: WS
  misc_feature: MA Experiment 20000355 PARAMETER Experiment Name: At_Siliques_Sub_P Parameter: Tissue Value: Less Than 5mm Siliques vs. Whole Plant
cttcttcttcctattaactacttcttccttttttctctcttatctttctcttactctcttccctatccgtgaaagatttcatacttgtttatatgcatatatccgtgtgcatatgtgtttgtggttatagagattggagatatacgtatttcagtttgtttgcacatctttctatgaataattaatttgcatgggaaaattattattgttgtatattatagctcaaaaacactttttctcagccttttcatgttattaatcattaattatatttgagaaactaatggagatattagaagaaagtcatgatttgtatttaccctttgttcttggtgttcatctattttcgttttccacgagatcctatatacatagttctatagaatatctaataaggaaaatctaatgttcatgtttcatttttctgtttaattagtgcttaaaattgcaaagcatcgtgcgaactaaccatatgttttaattagcttattatataacttatgtatcaattatggtctatacataattaatatacatgtacattgggtttcaattaagctctaattaactctttaaaattcaaatttttagggttttcaagaaatgatgaacgttaaaccaatggagcagatcatgattcctaataacaacacacatcaaccaaacaccacatccaatgcaaggccaaacaccattctcacatctaacggcgtctcaactgctggagcaaccgtctccggcgtaagcaacaacaataacaatacggcggttgtggcggagaggaaagcaagaccacaagagaaactaaattgtccaagatgcaactcaaccaacacaaagttttgttactacaacaactatagtctcacacaaccaagatacttctgcaaaggttgtcgaaggtattggaccgaaggtggatctcttaggaatgttcctgtgggaggaagctcaagaaagaacaagagatcatcttcatcttcttcatcaaacatccttcagacaataccatcttcacttccagatctaaacccgccaatactcttctcaaaccaaatccataataaatcgaaagggtcatcacaagatctcaacttgttgtctttcccagtcatgcaagatcaacatcatcatcatgtccatatgtctcagtttcttcagatgcctaagatggagggaaatggtaacataactcatcagcagcagccttcatcatcttcttctgtctatggttcctcgtcgtctcctgtttcagctcttgaacttttaagaaccggagttaatgtttcttcaagatcagggattaactcatcgttcatgccttccggttcaatgatggattcaaacactgtgctttacacttcttcagggtttccaacaatggtggattacaagccaagtaatctctccttctctaccgatcatcaagggcttggacacaatagcaacaataggtctgaagctcttcatagtgatcatcaccaacaaggtagagttttgtttccatttggggatcaaatgaaggagctttcatcaagcataacacaagaagttgatcatgatgataatcaacaacagaagagtcatggaaataataataataataataactcaagccctaataatggatattggagtgggatgttcagtactacaggaggaggatcttcatggtgaagcaaaatgatcaaaaggagattatgaaattagctttctaattctctttttatgatctcttgcctcacatgggttactttagttaaagttgtcagaacttagctaacacaacatagtctttttattcttcctttccttttttttttttttttttttttttgttaaaatcaatatttattttctaaatgttttgtagtttggtttgatgataatttgggttggtttttcattttggtttgttgattaattagtatataaatcacggcgttatgtatgggtagaagaatatgtgaatacgaatctctcgagtgtttcatatatggtatatggtatgcactatgtaactatgtattcatcgcttcttctatctgtataagtgttttcat

SEQ ID NO: 47949 - protein, 357 aa, Arabidopsis thaliana
  peptide (1)..(357): Ceres Seq. ID no. 13648773
  misc_feature (63)..(125): Pfam Name: Dof domain, zinc finger Pfam Description: Dof domain, zinc finger
  misc_feature (49)..(357): Homolog of NCBI NO: 18408092 NR Description: Dof zinc finger protein [Arabidopsis thaliana]
  misc_feature (49)..(357): Homolog of NCBI NO: 21537120 NR Description: zinc finger protein, putative [Arabidopsis
  misc_feature (55)..(357): Homolog of NCBI NO: 21593274 NR Description: unknown [Arabidopsis thaliana]
  misc_feature (55)..(357): Homolog of NCBI NO: 18416267 NR Description: Dof zinc finger protein [Arabidopsis thaliana]
  misc_feature (55)..(357): Homolog of NCBI NO: 7487175 NR Description: hypothetical protein T19F6.50 - Arabidopsis
  misc_feature (1)..(281): Homolog of NCBI NO: 30695501 NR Description: Dof zinc finger transcription factor (DAG1)
  misc_feature (1)..(281): Homolog of NCBI NO: 15228621 NR Description: Dof zinc finger transcription factor (DAG1)
  misc_feature (2)..(357): Homolog of NCBI NO: 25352313 NR Description: probable DOF zinc finger protein
  misc_feature (1)..(357): Homolog of NCBI NO: 30690446 NR Description: Dof zinc finger protein [Arabidopsis thaliana]
  misc_feature (1)..(357): Homolog of NCBI NO: 24211633 NR Description: DOF zinc finger protein DAG2 (Dof affecting
MMNVKPMEQIMIPNNNTHQPNTTSNARPNTILTSNGVSTAGATVSGVSNNNNNTAVVAERKARPQEKLNCPRCNSTNTKFCYYNNYSLTQPRYFCKGCRRYWTEGGSLRNVPVGGSSRKNKRSSSSSSSNILQTIPSSLPDLNPPILFSNQIHNKSKGSSQDLNLLSFPVMQDQHHHHVHMSQFLQMPKMEGNGNITHQQQPSSSSSVYGSSSSPVSALELLRTGVNVSSRSGINSSFMPSGSMMDSNTVLYTSSGFPTMVDYKPSNLSFSTDHQGLGHNSNNRSEALHSDHHQQGRVLFPFGDQMKELSSSITQEVDHDDNQQQKSHGNNNNNNNSSPNNGYWSGMFSTTGGGSSW

SEQ ID NO: 47950 - protein, 356 aa, Arabidopsis thaliana
  peptide (1)..(356): Ceres Seq. ID no. 13648774
  misc_feature (62)..(124): Pfam Name: Dof domain, zinc finger Pfam Description: Dof domain, zinc finger
  misc_feature (48)..(356): Homolog of NCBI NO: 18408092 NR Description: Dof zinc finger protein [Arabidopsis thaliana]
  misc_feature (48)..(356): Homolog of NCBI NO: 21537120 NR Description: zinc finger protein, putative [Arabidopsis
  misc_feature (54)..(356): Homolog of NCBI NO: 21593274 NR Description: unknown [Arabidopsis thaliana]
  misc_feature (54)..(356): Homolog of NCBI NO: 18416267 NR Description: Dof zinc finger protein [Arabidopsis thaliana]
  misc_feature (54)..(356): Homolog of NCBI NO: 7487175 NR Description: hypothetical protein T19F6.50 - Arabidopsis
  misc_feature (1)..(280): Homolog of NCBI NO: 30695501 NR Description: Dof zinc finger transcription factor (DAG1)
  misc_feature (1)..(280): Homolog of NCBI NO: 15228621 NR Description: Dof zinc finger transcription factor (DAG1)
  misc_feature (1)..(356): Homolog of NCBI NO: 25352313 NR Description: probable DOF zinc finger protein
  misc_feature (1)..(356): Homolog of NCBI NO: 30690446 NR Description: Dof zinc finger protein [Arabidopsis thaliana]
  misc_feature (1)..(356): Homolog of NCBI NO: 24211633 NR Description: DOF zinc finger protein DAG2 (Dof affecting
MNVKPMEQIMIPNNNTHQPNTTSNARPNTILTSNGVSTAGATVSGVSNNNNNTAVVAERKARPQEKLNCPRCNSTNTKFCYYNNYSLTQPRYFCKGCRRYWTEGGSLRNVPVGGSSRKNKRSSSSSSSNILQTIPSSLPDLNPPILFSNQIHNKSKGSSQDLNLLSFPVMQDQHHHHVHMSQFLQMPKMEGNGNITHQQQPSSSSSVYGSSSSPVSALELLRTGVNVSSRSGINSSFMPSGSMMDSNTVLYTSSGFPTMVDYKPSNLSFSTDHQGLGHNSNNRSEALHSDHHQQGRVLFPFGDQMKELSSSITQEVDHDDNQQQKSHGNNNNNNNSSPNNGYWSGMFSTTGGGSSW

SEQ ID NO: 47951 - protein, 351 aa, Arabidopsis thaliana
  peptide (1)..(351): Ceres Seq. ID no. 13648775
  misc_feature (57)..(119): Pfam Name: Dof domain, zinc finger Pfam Description: Dof domain, zinc finger
  misc_feature (43)..(351): Homolog of NCBI NO: 18408092 NR Description: Dof zinc finger protein [Arabidopsis thaliana]
  misc_feature (43)..(351): Homolog of NCBI NO: 21537120 NR Description: zinc finger protein, putative [Arabidopsis
  misc_feature (49)..(351): Homolog of NCBI NO: 21593274 NR Description: unknown [Arabidopsis thaliana]
  misc_feature (49)..(351): Homolog of NCBI NO: 18416267 NR Description: Dof zinc finger protein [Arabidopsis thaliana]
  misc_feature (49)..(351): Homolog of NCBI NO: 7487175 NR Description: hypothetical protein T19F6.50 - Arabidopsis
  misc_feature (1)..(275): Homolog of NCBI NO: 30695501 NR Description: Dof zinc finger transcription factor (DAG1)
  misc_feature (1)..(275): Homolog of NCBI NO: 15228621 NR Description: Dof zinc finger transcription factor (DAG1)
  misc_feature (1)..(351): Homolog of NCBI NO: 25352313 NR Description: probable DOF zinc finger protein
  misc_feature (1)..(351): Homolog of NCBI NO: 30690446 NR Description: Dof zinc finger protein [Arabidopsis thaliana]
  misc_feature (1)..(351): Homolog of NCBI NO: 24211633 NR Description: DOF zinc finger protein DAG2 (Dof affecting
MEQIMIPNNNTHQPNTTSNARPNTILTSNGVSTAGATVSGVSNNNNNTAVVAERKARPQEKLNCPRCNSTNTKFCYYNNYSLTQPRYFCKGCRRYWTEGGSLRNVPVGGSSRKNKRSSSSSSSNILQTIPSSLPDLNPPILFSNQIHNKSKGSSQDLNLLSFPVMQDQHHHHVHMSQFLQMPKMEGNGNITHQQQPSSSSSVYGSSSSPVSALELLRTGVNVSSRSGINSSFMPSGSMMDSNTVLYTSSGFPTMVDYKPSNLSFSTDHQGLGHNSNNRSEALHSDHHQQGRVLFPFGDQMKELSSSITQEVDHDDNQQQKSHGNNNNNNNSSPNNGYWSGMFSTTGGGSSW

SEQ ID NO: 47952 - DNA, 2417 bp, Arabidopsis thaliana
  misc_feature (1)..(2417): Ceres Seq. ID no. 12658953
  misc_feature: MA Experiment ID: 20000173 Result: Down-regulated in Transcription
  misc_feature: MA Experiment 20000173 PARAMETER Experiment Name: At_42deg_Heat_P Parameter: Age (day) Value: 14
  misc_feature: MA Experiment 20000173 PARAMETER Experiment Name: At_42deg_Heat_P Parameter: Organism Value: A. thaliana
  misc_feature: MA Experiment 20000173 PARAMETER Experiment Name: At_42deg_Heat_P Parameter: Plant Line Value: WS
  misc_feature: MA Experiment 20000173 PARAMETER Experiment Name: At_42deg_Heat_P Parameter: Temperature (deg C) Value: 42 vs. 22
  misc_feature: MA Experiment 20000173 PARAMETER Experiment Name: At_42deg_Heat_P Parameter: Timepoint (hr) Value: 6
  misc_feature: MA Experiment 20000173 PARAMETER Experiment Name: At_42deg_Heat_P Parameter: Tissue Value: Aerial
  misc_feature: MA Experiment ID: 20000184 Result: Down-regulated in Transcription
  misc_feature: MA Experiment 20000184 PARAMETER Experiment Name: At_Shoots__P Parameter: Age (day) Value: 7
  misc_feature: MA Experiment 20000184 PARAMETER Experiment Name: At_Shoots__P Parameter: Tissue Value: Shoots vs. Whole Plant
  misc_feature: MA Experiment ID: 20000286 Result: Up-regulated in Transcription
  misc_feature: MA Experiment 20000286 PARAMETER Experiment Name: At_Open_Flower_P Parameter: Age (day) Value: 21
  misc_feature: MA Experiment 20000286 PARAMETER Experiment Name: At_Open_Flower_P Parameter: Plant Line Value: WS
  misc_feature: MA Experiment 20000286 PARAMETER Experiment Name: At_Open_Flower_P Parameter: Tissue Value: Half Open vs. Whole Plant
  misc_feature: MA Experiment ID: 20000794 Result: Up-regulated in Transcription
  misc_feature: MA Experiment 20000794 PARAMETER Experiment Name: At_Petals_P Parameter: Age (day) Value: 23-25 days
  misc_feature: MA Experiment 20000794 PARAMETER Experiment Name: At_Petals_P Parameter: Plant Line Value: WS
  misc_feature: MA Experiment 20000794 PARAMETER Experiment Name: At_Petals_P Parameter: Tissue Value: Petals vs. Whole plant
aataaagctttcatttttcaatctcatcagagagaaattaagctatggcgaagaagattggagtaacgatggaagttgggaacgatggtgttgctgtcatcaccatttctaaccctcctgttaactctttagccagtccaattatttctgggttgaaggagaagtttcgtgacgccaatcaaaggaatgatgttaaggccatcgtgttgatcgggaacaatggaagattttcgggtggttttgatatcaatgtctttcagcaagttcataagactggggatttatcgcttatgcctgaagtatctgttgagcttgtgtgtaacctgatggaagactccaggaagccggttgttgctgcagttgaaggattagctcttggtggtggtttggaacttgcaatggcgtgtcatgccagagttgctgctccgaaagctcaattaggcttaccagaactgactcttggagtgattcctggttttggaggaacccaacgtcttccaaggttagtaggccttgcaaaagcaacggatatgatactgctttctaagtcaatatcctcagaagaggggcacaaactgggtctcattgatgccttggtgccacctggagatgtgttgagcacatccagaaagtgggctctagacattgcagagggacgtaaaccctttctgcagtcactgcacagaaccgacaaaattggttctttatctgaagctcgtgctatattgaagaattcaagacagctagccaagaagattgccccaaatatgcctcagcaccatgcttgcattgaggtgattgaagaaggaatcatccatggaggatacagtggggttctcaaggaagcagaagttttcaagcaactagtactgtcagacactgcaaagggtcttgttcatgttttctttgcacaacgtgcaacatcaaaagtgcctaatgtaactgacgttggattgaaaccaaggccgataaaaaaagttgcagttattggtggcggtctgatgggttcaggcatcgctacggctctacttctaagcaatataagagttgtgctcaaagaaataaactcagaattccttatgaagggaataaaatcagttgaagcaaatatgaaaagcttggtatctagggggaaactgacacaagataaagcaggaaaggccctctctttgttcaagggagtacttgattacacagaattcaatgatgtggacatggtcatagaggcagtgattgaaaacattcaattgaaacaaaacatattcaaagaaatcgaaaaggtttgttcaccccactgcattttggcgagtaatacatctactatcgacctcgatgtaattggtgaaaagactaactcaaaagatcgcattgttggcgcacatttcttcagtccggcccatctgatgccccttctcgagattgttcgttcaaagaatacttctgctcaggtgattctggatctcatggcggttggaaaggccataaagaaagttcccgtggtggttggaaactgcataggctttgcagtgaataggacattctttccttattcacaagctgcacatatgttggccaatctaggtgttgacttgttcagaattgacagcgttattacctctttcggcttgccattgggccctttccagcttggtgatttggctggacacgggattggattagcagttgggccgatatatgccaaggtctatggtgaccgcatgttcagatctccaatgacagagcttcttcttaagagcgggcgaaatggaaaaatcaacggaagaggatactatatatacgaaaagggaagcaaaccaaaacctgatccatcagtgctttcaattgttgagaaatcaaggaaactgaccaatatcatgcctggtgggaagcctatatcagtaactgataaagaaattgtagagatgatcttattccctgttgtcaacgaggcatgccgcgtcctagatgaaggagttgtgatccgagcctcagacttggacattgcgtctgtccttggaatgagttttccttcttaccggggaggaattgttttctgggcagacactgttggaccaaagtacatatatgagaggctcaagaaattgtcggagacttatggcagctttttcaaaccatcgaggtatctggaggaaagagcaatgaatggaatgcttttgagtgaatcgaaatcgtcgaggtccaaattgtgaagcgtttaattaagtatatgcagaaggagaggctgaaggtgttagtcactaaatgaaaataaatcagtctctcttgttgtttcaaagttcaaagttaaaatgctattaaggtgtggttgttgttaacactcttaaaataaacaattttctgctcttaataaatgtttgtagtgacgtcagtttcataaagttatgatttgttctagc

SEQ ID NO: 47953 - protein, 721 aa, Arabidopsis thaliana
  peptide (1)..(721): Ceres Seq. ID no. 12658954
  misc_feature (306)..(490): Pfam Name: 3-hydroxyacyl-CoA dehydrogenase, NAD binding domain Pfam Description: 3-hydroxyacyl-CoA dehydrogenase, NAD binding
  misc_feature (1)..(708): Homolog of NCBI NO: 23103221 NR Description: hypothetical protein [Azotobacter vinelandii]
  misc_feature (9)..(394): Homolog of NCBI NO: 17065148 NR Description: fatty acid multifunctional protein (AtMFP2)
  misc_feature (14)..(708): Homolog of NCBI NO: 17546478 NR Description: PROBABLE TRIFUNCTONAL: ENOYL-COA HYDRATASE AND ISOMERASE AND 3-HYDROXYACYL-COA DEHYDROGENASE OXIDOREDUCTASE
  misc_feature (90)..(712): Homolog of NCBI NO: 551444 NR Description: protein MFP-b [Cucumis sativus]
  misc_feature (9)..(720): Homolog of NCBI NO: 34897626 NR Description: putative tetrafunctional protein for glyoxysomal
  misc_feature (8)..(721): Homolog of NCBI NO: 34922417 NR Description: Glyoxysomal fatty acid beta-oxidation
  misc_feature (9)..(721): Homolog of NCBI NO: 15231317 NR Description: fatty acid multifunctional protein (AtMFP2)
  misc_feature (9)..(712): Homolog of NCBI NO: 34922495 NR Description: Glyoxysomal fatty acid beta-oxidation
  misc_feature (1)..(721): Homolog of NCBI NO: 34895142 NR Description: putative tetrafunctional protein of glyoxysomal
  misc_feature (1)..(721): Homolog of NCBI NO: 39931684 NR Description: Peroxisomal fatty acid beta-oxidation
MAKKIGVTMEVGNDGVAVITISNPPVNSLASPIISGLKEKFRDANQRNDVKAIVLIGNNGRFSGGFDINVFQQVHKTGDLSLMPEVSVELVCNLMEDSRKPVVAAVEGLALGGGLELAMACHARVAAPKAQLGLPELTLGVIPGFGGTQRLPRLVGLAKATDMILLSKSISSEEGHKLGLIDALVPPGDVLSTSRKWALDIAEGRKPFLQSLHRTDKIGSLSEARAILKNSRQLAKKIAPNMPQHHACIEVIEEGIIHGGYSGVLKEAEVFKQLVLSDTAKGLVHVFFAQRATSKVPNVTDVGLKPRPIKKVAVIGGGLMGSGIATALLLSNIRVVLKEINSEFLMKGIKSVEANMKSLVSRGKLTQDKAGKALSLFKGVLDYTEFNDVDMVIEAVIENIQLKQNIFKEIEKVCSPHCILASNTSTIDLDVIGEKTNSKDRIVGAHFFSPAHLMPLLEIVRSKNTSAQVILDLMAVGKAIKKVPVVVGNCIGFAVNRTFFPYSQAAHMLANLGVDLFRIDSVITSFGLPLGPFQLGDLAGHGIGLAVGPIYAKVYGDRMFRSPMTELLLKSGRNGKINGRGYYIYEKGSKPKPDPSVLSIVEKSRKLTNIMPGGKPISVTDKEIVEMILFPVVNEACRVLDEGVVIRASDLDIASVLGMSFPSYRGGIVFWADTVGPKYIYERLKKLSETYGSFFKPSRYLEERAMNGMLLSESKSSRSKL

SEQ ID NO: 47954 - protein, 713 aa, Arabidopsis thaliana
  peptide (1)..(713): Ceres Seq. ID no. 12658955
  misc_feature (298)..(482): Pfam Name: 3-hydroxyacyl-CoA dehydrogenase, NAD binding domain Pfam Description: 3-hydroxyacyl-CoA dehydrogenase, NAD binding
  misc_feature (1)..(700): Homolog of NCBI NO: 23103221 NR Description: hypothetical protein [Azotobacter vinelandii]
  misc_feature (1)..(386): Homolog of NCBI NO: 17065148 NR Description: fatty acid multifunctional protein (AtMFP2)
  misc_feature (6)..(700): Homolog of NCBI NO: 17546478 NR Description: PROBABLE TRIFUNCTONAL: ENOYL-COA HYDRATASE AND ISOMERASE AND 3-HYDROXYACYL-COA DEHYDROGENASE OXIDOREDUCTASE
  misc_feature (82)..(704): Homolog of NCBI NO: 551444 NR Description: protein MFP-b [Cucumis sativus]
  misc_feature (1)..(712): Homolog of NCBI NO: 34897626 NR Description: putative tetrafunctional protein for glyoxysomal
  misc_feature (1)..(713): Homolog of NCBI NO: 34922417 NR Description: Glyoxysomal fatty acid beta-oxidation
  misc_feature (1)..(713): Homolog of NCBI NO: 15231317 NR Description: fatty acid multifunctional protein (AtMFP2)
  misc_feature (1)..(704): Homolog of NCBI NO: 34922495 NR Description: Glyoxysomal fatty acid beta-oxidation
  misc_feature (1)..(713): Homolog of NCBI NO: 34895142 NR Description: putative tetrafunctional protein of glyoxysomal
  misc_feature (1)..(713): Homolog of NCBI NO: 39931684 NR Description: Peroxisomal fatty acid beta-oxidation
MEVGNDGVAVITISNPPVNSLASPIISGLKEKFRDANQRNDVKAIVLIGNNGRFSGGFDINVFQQVHKTGDLSLMPEVSVELVCNLMEDSRKPVVAAVEGLALGGGLELAMACHARVAAPKAQLGLPELTLGVIPGFGGTQRLPRLVGLAKATDMILLSKSISSEEGHKLGLIDALVPPGDVLSTSRKWALDIAEGRKPFLQSLHRTDKIGSLSEARAILKNSRQLAKKIAPNMPQHHACIEVIEEGIIHGGYSGVLKEAEVFKQLVLSDTAKGLVHVFFAQRATSKVPNVTDVGLKPRPIKKVAVIGGGLMGSGIATALLLSNIRVVLKEINSEFLMKGIKSVEANMKSLVSRGKLTQDKAGKALSLFKGVLDYTEFNDVDMVIEAVIENIQLKQNIFKEIEKVCSPHCILASNTSTIDLDVIGEKTNSKDRIVGAHFFSPAHLMPLLEIVRSKNTSAQVILDLMAVGKAIKKVPVVVGNCIGFAVNRTFFPYSQAAHMLANLGVDLFRIDSVITSFGLPLGPFQLGDLAGHGIGLAVGPIYAKVYGDRMFRSPMTELLLKSGRNGKINGRGYYIYEKGSKPKPDPSVLSIVEKSRKLTNIMPGGKPISVTDKEIVEMILFPVVNEACRVLDEGVVIRASDLDIASVLGMSFPSYRGGIVFWADTVGPKYIYERLKKLSETYGSFFKPSRYLEERAMNGMLLSESKSSRSKL

SEQ ID NO: 47955 - protein, 639 aa, Arabidopsis thaliana
  peptide (1)..(639): Ceres Seq. ID no. 12658956
  misc_feature (224)..(408): Pfam Name: 3-hydroxyacyl-CoA dehydrogenase, NAD binding domain Pfam Description: 3-hydroxyacyl-CoA dehydrogenase, NAD binding
  misc_feature (1)..(626): Homolog of NCBI NO: 23103221 NR Description: hypothetical protein [Azotobacter vinelandii]
  misc_feature (1)..(312): Homolog of NCBI NO: 17065148 NR Description: fatty acid multifunctional protein (AtMFP2)
  misc_feature (1)..(626): Homolog of NCBI NO: 17546478 NR Description: PROBABLE TRIFUNCTONAL: ENOYL-COA HYDRATASE AND ISOMERASE AND 3-HYDROXYACYL-COA DEHYDROGENASE OXIDOREDUCTASE
  misc_feature (8)..(630): Homolog of NCBI NO: 551444 NR Description: protein MFP-b [Cucumis sativus]
  misc_feature (1)..(638): Homolog of NCBI NO: 34897626 NR Description: putative tetrafunctional protein for glyoxysomal
  misc_feature (1)..(639): Homolog of NCBI NO: 34922417 NR Description: Glyoxysomal fatty acid beta-oxidation
  misc_feature (1)..(639): Homolog of NCBI NO: 15231317 NR Description: fatty acid multifunctional protein (AtMFP2)
  misc_feature (1)..(630): Homolog of NCBI NO: 34922495 NR Description: Glyoxysomal fatty acid beta-oxidation
  misc_feature (1)..(639): Homolog of NCBI NO: 34895142 NR Description: putative tetrafunctional protein of glyoxysomal
  misc_feature (1)..(639): Homolog of NCBI NO: 39931684 NR Description: Peroxisomal fatty acid beta-oxidation
MPEVSVELVCNLMEDSRKPVVAAVEGLALGGGLELAMACHARVAAPKAQLGLPELTLGVIPGFGGTQRLPRLVGLAKATDMILLSKSISSEEGHKLGLIDALVPPGDVLSTSRKWALDIAEGRKPFLQSLHRTDKIGSLSEARAILKNSRQLAKKIAPNMPQHHACIEVIEEGIIHGGYSGVLKEAEVFKQLVLSDTAKGLVHVFFAQRATSKVPNVTDVGLKPRPIKKVAVIGGGLMGSGIATALLLSNIRVVLKEINSEFLMKGIKSVEANMKSLVSRGKLTQDKAGKALSLFKGVLDYTEFNDVDMVIEAVIENIQLKQNIFKEIEKVCSPHCILASNTSTIDLDVIGEKTNSKDRIVGAHFFSPAHLMPLLEIVRSKNTSAQVILDLMAVGKAIKKVPVVVGNCIGFAVNRTFFPYSQAAHMLANLGVDLFRIDSVITSFGLPLGPFQLGDLAGHGIGLAVGPIYAKVYGDRMFRSPMTELLLKSGRNGKINGRGYYIYEKGSKPKPDPSVLSIVEKSRKLTNIMPGGKPISVTDKEIVEMILFPVVNEACRVLDEGVVIRASDLDIASVLGMSFPSYRGGIVFWADTVGPKYIYERLKKLSETYGSFFKPSRYLEERAMNGMLLSESKSSRSKL

SEQ ID NO: 47956 - DNA, 1614 bp, Arabidopsis thaliana
  misc_feature (1)..(1614): Ceres Seq. ID no. 13649559
  misc_feature: MA Experiment ID: 20000349 Result: Down-regulated in Transcription
  misc_feature: MA Experiment 20000349 PARAMETER Experiment Name: At_100uM_ABA_Sub_P Parameter: Age (day) Value: 14
  misc_feature: MA Experiment 20000349 PARAMETER Experiment Name: At_100uM_ABA_Sub_P Parameter: Organism Value: A. thaliana
  misc_feature: MA Experiment 20000349 PARAMETER Experiment Name: At_100uM_ABA_Sub_P Parameter: Plant Line Value: WS
  misc_feature: MA Experiment 20000349 PARAMETER Experiment Name: At_100uM_ABA_Sub_P Parameter: Timepoint (hr) Value: 6
  misc_feature: MA Experiment 20000349 PARAMETER Experiment Name: At_100uM_ABA_Sub_P Parameter: Tissue Value: Aerial
  misc_feature: MA Experiment 20000349 PARAMETER Experiment Name: At_100uM_ABA_Sub_P Parameter: Treatment Value: 100uM ABA vs. No Treatment
ggcagaagaagctcagatacagaaactgactaccaagaacaaagctttttccttcgagcaaagaaagttcttttttcttttcttttgctcttcgtaacccaaccaacaagactttcataagctattaaatcagaaccctggaagacaaaaaaggggaaaaaccattatccttaaagtaaccaacacttctctctctctttcttcaatggatttgcaactgaaacaatggagaagccagcagcagcaacaacatcagacagagtcagaagaacaaccttctgcagctaagataccaaaacatgtctttgaccagattcattctcacactgcaacttctactgctcttcctctctttacccctgagcctacttcttctaaactctcctctttgtctcctgattcttcctccaggttccccaagatggggagcttctttagctgggcacagtggcaagaacttgaactacaagctctgatctacaggtacatgttggctggtgctgctgttcctcaggagctccttttaccaatcaagaaaagccttctccatctatctccttcctactttcttcaccatcctcttcaacacctacctcattaccaacctgcttggtatttgggaagggcagcgatggatcctgagccaggcagatgcaggagaacggatggtaagaagtggagatgttcaagagacgtcttcgctggccacaagtattgcgagcgccacatgcaccgtggccgcaaccgttcaagaaagcctgtggaaactccaaccaccgtcaatgcaactgccacgtccatggcttcatcagtagcagccgcagccaccactacaacagcaacaacaacatctacgtttgcttttggtggtggtggtggtagtgaggaagtggttggtcaaggaggatctttcttcttctctggctcttctaactcttcatctgaacttctccaccttagtcaaagttgttcggagatgaagcaagaaagcaacaacatgaacaacaagaggccatacgagtcccacatcggattcagtaacaacagatcagatggaggacacatcctgaggcccttctttgacgattggcctcgttcttcgctccaagaagctgacaatagttcaagccccatgagctcagccacttgtctctccatctccatgcccgggaactcttcctcagacgtctctctgaagctgtccacaggcaacgaagagggagcccggagcaacaacaatgggagagatcagcaaaacatgagctggtggagcggtggaggttccaaccaccatcatcacaacatgggcggaccattggccgaagccctgagatcttcttcctcatcttccccaaccagtgttctccatcagcttggtgtctcgacacaagcctttcattgaccagtgtaaaaccaacacaacaatgcggtttttactgtgtttttggtttttatccaaatttcctgtataaagaggggaggcttttgttgtcctcttccctttttcttttaagatttcccttgtatctgtagcctttctctgcagattttatatcctcaaagatttgtttttggaaattcatgtctaaataggatctacgatgaagcttaggc

SEQ ID NO: 47957 - protein, 398 aa, Arabidopsis thaliana
  peptide (1)..(398): Ceres Seq. ID no. 13649560
  misc_feature (77)..(216): Homolog of NCBI NO: 6573149 NR Description: growth-regulating factor 1 [Oryza sativa]
  misc_feature (77)..(256): Homolog of NCBI NO: 38345778 NR Description: OSJNBa0083N12.16 [Oryza sativa (japonica
  misc_feature (288)..(342): Homolog of NCBI NO: 18390099 NR Description: putative growth-regulating factor 1 [Sorghum
  misc_feature (77)..(204): Homolog of NCBI NO: 18390099 NR Description: putative growth-regulating factor 1 [Sorghum
  misc_feature (11)..(398): Homolog of NCBI NO: 21539886 NR Description: transcription activator [Arabidopsis thaliana]
  misc_feature (1)..(184): Homolog of NCBI NO: 27808514 NR Description: At3g52910 [Arabidopsis thaliana]
  misc_feature (1)..(352): Homolog of NCBI NO: 21539886 NR Description: transcription activator [Arabidopsis thaliana]
  misc_feature (1)..(352): Homolog of NCBI NO: 15231708 NR Description: expressed protein [Arabidopsis thaliana]
  misc_feature (1)..(398): Homolog of NCBI NO: 26449924 NR Description: unknown protein [Arabidopsis thaliana]
  misc_feature (1)..(398): Homolog of NCBI NO: 15227652 NR Description: transcription activator (GRL3) [Arabidopsis
MDLQLKQWRSQQQQQHQTESEEQPSAAKIPKHVFDQIHSHTATSTALPLFTPEPTSSKLSSLSPDSSSRFPKMGSFFSWAQWQELELQALIYRYMLAGAAVPQELLLPIKKSLLHLSPSYFLHHPLQHLPHYQPAWYLGRAAMDPEPGRCRRTDGKKWRCSRDVFAGHKYCERHMHRGRNRSRKPVETPTTVNATATSMASSVAAAATTTTATTTSTFAFGGGGGSEEVVGQGGSFFFSGSSNSSSELLHLSQSCSEMKQESNNMNNKRPYESHIGFSNNRSDGGHILRPFFDDWPRSSLQEADNSSSPMSSATCLSISMPGNSSSDVSLKLSTGNEEGARSNNNGRDQQNMSWWSGGGSNHHHHNMGGPLAEALRSSSSSSPTSVLHQLGVSTQAFH

SEQ ID NO: 47958 - protein, 326 aa, Arabidopsis thaliana
  peptide (1)..(326): Ceres Seq. ID no. 13649561
  misc_feature (5)..(144): Homolog of NCBI NO: 6573149 NR Description: growth-regulating factor 1 [Oryza sativa]
  misc_feature (5)..(184): Homolog of NCBI NO: 38345778 NR Description: OSJNBa0083N12.16 [Oryza sativa (japonica
  misc_feature (216)..(270): Homolog of NCBI NO: 18390099 NR Description: putative growth-regulating factor 1 [Sorghum
  misc_feature (5)..(132): Homolog of NCBI NO: 18390099 NR Description: putative growth-regulating factor 1 [Sorghum
  misc_feature (1)..(326): Homolog of NCBI NO: 21539886 NR Description: transcription activator [Arabidopsis thaliana]
  misc_feature (1)..(112): Homolog of NCBI NO: 27808514 NR Description: At3g52910 [Arabidopsis thaliana]
  misc_feature (1)..(280): Homolog of NCBI NO: 21539886 NR Description: transcription activator [Arabidopsis thaliana]
  misc_feature (1)..(280): Homolog of NCBI NO: 15231708 NR Description: expressed protein [Arabidopsis thaliana]
  misc_feature (1)..(326): Homolog of NCBI NO: 26449924 NR Description: unknown protein [Arabidopsis thaliana]
  misc_feature (1)..(326): Homolog of NCBI NO: 15227652 NR Description: transcription activator (GRL3) [Arabidopsis
MGSFFSWAQWQELELQALIYRYMLAGAAVPQELLLPIKKSLLHLSPSYFLHHPLQHLPHYQPAWYLGRAAMDPEPGRCRRTDGKKWRCSRDVFAGHKYCERHMHRGRNRSRKPVETPTTVNATATSMASSVAAAATTTTATTTSTFAFGGGGGSEEVVGQGGSFFFSGSSNSSSELLHLSQSCSEMKQESNNMNNKRPYESHIGFSNNRSDGGHILRPFFDDWPRSSLQEADNSSSPMSSATCLSISMPGNSSSDVSLKLSTGNEEGARSNNNGRDQQNMSWWSGGGSNHHHHNMGGPLAEALRSSSSSSPTSVLHQLGVSTQAFH

SEQ ID NO: 47959 - protein, 304 aa, Arabidopsis thaliana
  peptide (1)..(304): Ceres Seq. ID no. 13649562
  misc_feature (1)..(122): Homolog of NCBI NO: 6573149 NR Description: growth-regulating factor 1 [Oryza sativa]
  misc_feature (1)..(162): Homolog of NCBI NO: 38345778 NR Description: OSJNBa0083N12.16 [Oryza sativa (japonica
  misc_feature (194)..(248): Homolog of NCBI NO: 18390099 NR Description: putative growth-regulating factor 1 [Sorghum
  misc_feature (1)..(110): Homolog of NCBI NO: 18390099 NR Description: putative growth-regulating factor 1 [Sorghum
  misc_feature (1)..(304): Homolog of NCBI NO: 21539886 NR Description: transcription activator [Arabidopsis thaliana]
  misc_feature (1)..(90): Homolog of NCBI NO: 27808514 NR Description: At3g52910 [Arabidopsis thaliana]
  misc_feature (1)..(258): Homolog of NCBI NO: 21539886 NR Description: transcription activator [Arabidopsis thaliana]
  misc_feature (1)..(258): Homolog of NCBI NO: 15231708 NR Description: expressed protein [Arabidopsis thaliana]
  misc_feature (1)..(304): Homolog of NCBI NO: 26449924 NR Description: unknown protein [Arabidopsis thaliana]
  misc_feature (1)..(304): Homolog of NCBI NO: 15227652 NR Description: transcription activator (GRL3) [Arabidopsis
MLAGAAVPQELLLPIKKSLLHLSPSYFLHHPLQHLPHYQPAWYLGRAAMDPEPGRCRRTDGKKWRCSRDVFAGHKYCERHMHRGRNRSRKPVETPTTVNATATSMASSVAAAATTTTATTTSTFAFGGGGGSEEVVGQGGSFFFSGSSNSSSELLHLSQSCSEMKQESNNMNNKRPYESHIGFSNNRSDGGHILRPFFDDWPRSSLQEADNSSSPMSSATCLSISMPGNSSSDVSLKLSTGNEEGARSNNNGRDQQNMSWWSGGGSNHHHHNMGGPLAEALRSSSSSSPTSVLHQLGVSTQAFH

SEQ ID NO: 47960 - DNA, 638 bp, Arabidopsis thaliana
  misc_feature (1)..(638): Ceres Seq. ID no. 13648784
  misc_feature: MA Experiment ID: 20000173 Result: Up-regulated in Transcription
  misc_feature: MA Experiment 20000173 PARAMETER Experiment Name: At_42deg_Heat_P Parameter: Age (day) Value: 14
  misc_feature: MA Experiment 20000173 PARAMETER Experiment Name: At_42deg_Heat_P Parameter: Organism Value: A. thaliana
  misc_feature: MA Experiment 20000173 PARAMETER Experiment Name: At_42deg_Heat_P Parameter: Plant Line Value: WS
  misc_feature: MA Experiment 20000173 PARAMETER Experiment Name: At_42deg_Heat_P Parameter: Temperature (deg C) Value: 42 vs. 22
  misc_feature: MA Experiment 20000173 PARAMETER Experiment Name: At_42deg_Heat_P Parameter: Timepoint (hr) Value: 6
  misc_feature: MA Experiment 20000173 PARAMETER Experiment Name: At_42deg_Heat_P Parameter: Tissue Value: Aerial
  misc_feature: MA Experiment ID: 20000227 Result: Down-regulated in Transcription
  misc_feature: MA Experiment 20000227 PARAMETER Experiment Name: At_Root-Tips-vs-Tops_P Parameter: Tissue Value: Root Tips vs. Root Tops
  misc_feature: MA Experiment ID: 20000234 Result: Down-regulated in Transcription
  misc_feature: MA Experiment 20000234 PARAMETER Experiment Name: At_Siliques_P Parameter: Age (day) Value: 21
  misc_feature: MA Experiment 20000234 PARAMETER Experiment Name: At_Siliques_P Parameter: Organism Value: A. thaliana
  misc_feature: MA Experiment 20000234 PARAMETER Experiment Name: At_Siliques_P Parameter: Plant Line Value: WS
  misc_feature: MA Experiment 20000234 PARAMETER Experiment Name: At_Siliques_P Parameter: Tissue Value: Less Than 5mm Siliques vs. Whole Plant
  misc_feature: MA Experiment ID: 20000264 Result: Down-regulated in Transcription
  misc_feature: MA Experiment 20000264 PARAMETER Experiment Name: At_Open_Flower_P Parameter: Age (day) Value: 21
  misc_feature: MA Experiment 20000264 PARAMETER Experiment Name: At_Open_Flower_P Parameter: Plant Line Value: WS
  misc_feature: MA Experiment 20000264 PARAMETER Experiment Name: At_Open_Flower_P Parameter: Tissue Value: Open Flower vs. Whole Plant
  misc_feature: MA Experiment ID: 20000265 Result: Down-regulated in Transcription
  misc_feature: MA Experiment 20000265 PARAMETER Experiment Name: At_Open_Flower_P Parameter: Age (day) Value: 21
  misc_feature: MA Experiment 20000265 PARAMETER Experiment Name: At_Open_Flower_P Parameter: Plant Line Value: WS
  misc_feature: MA Experiment 20000265 PARAMETER Experiment Name: At_Open_Flower_P Parameter: Tissue Value: Closed Flower vs. Whole Plant
  misc_feature: MA Experiment ID: 20000495 Result: Down-regulated in Transcription
  misc_feature: MA Experiment 20000495 PARAMETER Experiment Name: At_Guard_Cells_P Parameter: Harvest Date Value: 8/2/2002
  misc_feature: MA Experiment 20000495 PARAMETER Experiment Name: At_Guard_Cells_P Parameter: Organism Value: A. thaliana
  misc_feature: MA Experiment 20000495 PARAMETER Experiment Name: At_Guard_Cells_P Parameter: Tissue Value: Guard Cells vs. Leaves
  misc_feature: MA Experiment ID: 20000496 Result: Down-regulated in Transcription
  misc_feature: MA Experiment 20000496 PARAMETER Experiment Name: At_Guard_Cells_P Parameter: Harvest Date Value: 7/19/2002
  misc_feature: MA Experiment 20000496 PARAMETER Experiment Name: At_Guard_Cells_P Parameter: Organism Value: Canola
  misc_feature: MA Experiment 20000496 PARAMETER Experiment Name: At_Guard_Cells_P Parameter: Tissue Value: Guard Cells vs. Leaves
  misc_feature: MA Experiment ID: 20000794 Result: Down-regulated in Transcription
  misc_feature: MA Experiment 20000794 PARAMETER Experiment Name: At_Petals_P Parameter: Age (day) Value: 23-25 days
  misc_feature: MA Experiment 20000794 PARAMETER Experiment Name: At_Petals_P Parameter: Plant Line Value: WS
  misc_feature: MA Experiment 20000794 PARAMETER Experiment Name: At_Petals_P Parameter: Tissue Value: Petals vs. Whole plant
  misc_feature: MA Experiment ID: 20001560 Result: Down-regulated in Transcription
  misc_feature: MA Experiment 20001560 PARAMETER Experiment Name: At_Drought_Soil_Dry_P Parameter: Age (day) Value: 28
  misc_feature: MA Experiment 20001560 PARAMETER Experiment Name: At_Drought_Soil_Dry_P Parameter: Organism Value: A. thaliana
  misc_feature: MA Experiment 20001560 PARAMETER Experiment Name: At_Drought_Soil_Dry_P Parameter: Plant Line Value: WS
  misc_feature: MA Experiment 20001560 PARAMETER Experiment Name: At_Drought_Soil_Dry_P Parameter: Post Timepoint (hr) Value: None
  misc_feature: MA Experiment 20001560 PARAMETER Experiment Name: At_Drought_Soil_Dry_P Parameter: Post-Treatment Value: None
  misc_feature: MA Experiment 20001560 PARAMETER Experiment Name: At_Drought_Soil_Dry_P Parameter: Timepoint (day) Value: 14
  misc_feature: MA Experiment 20001560 PARAMETER Experiment Name: At_Drought_Soil_Dry_P Parameter: Treatment Value: Drought vs. No Drought
taagtcttggttcttcttctctctaatacgagaagaaaaaggcgaaaacctcgccaatccgattacgcgaaaaatcaaaggtttttggatatggcgtcgaagcggatcttgaaggaattgaaggatctccagaaggatccacctacatcatgtagcgcaggtcctgttgctgaagacatgtttcactggcaggcaacgataatgggtccttcagagagtccttatgctggaggtgttttccttgtaaccatccatttccctccggattacccattcaagcctcctaaggtgattccaatattttgagaattgttatcaagtggcctttaggaccaaggtgttccatcccaacattaacagcaacggtagcatttgcctcgacatcttgaaggagcagtggagtcctgcgctcaccatttccaaggtgctgctatcgatctgttctttgttaaccgatccaaacccggatgatcctttggtgcccgagatagctcacatgtacaagactgacaagaacaagtacgagtccactgcacgaagctggactcagaagtatgccatggggctaatggaaaatcccacctactaaattatctctttatgaagaaaaaaatctgccttaatttctatgtatgatt

SEQ ID NO: 47961 - protein, 71 aa, Arabidopsis thaliana
  peptide (1)..(71): Ceres Seq. ID no. 13648785
  misc_feature (1)..(67): Homolog of NCBI NO: 456568 NR Description: ubiquitin conjugating enzyme
  misc_feature (1)..(67): Homolog of NCBI NO: 18408001 NR Description: ubiquitin-conjugating enzyme [Arabidopsis
  misc_feature (1)..(67): Homolog of NCBI NO: 19347859 NR Description: putative E2, ubiquitin-conjugating enzyme UBC9
  misc_feature (1)..(67): Homolog of NCBI NO: 5762457 NR Description: ubiquitin-conjugating enzyme UBC2
  misc_feature (1)..(67): Homolog of NCBI NO: 40287554 NR Description: ubiquitin-conjugating enzyme 8 [Capsicum annuum]
  misc_feature (1)..(67): Homolog of NCBI NO: 30687803 NR Description: ubiquitin-conjugating enzyme 9 (UBC9)
  misc_feature (1)..(67): Homolog of NCBI NO: 21554343 NR Description: E2, ubiquitin-conjugating enzyme 10 (UBC10)
  misc_feature (1)..(67): Homolog of NCBI NO: 18417097 NR Description: ubiquitin-conjugating enzyme 9 (UBC9)
  misc_feature (1)..(67): Homolog of NCBI NO: 11762186 NR Description: AT4g27960 [Arabidopsis thaliana]
  misc_feature (1)..(67): Homolog of NCBI NO: 18423494 NR Description: ubiquitin-conjugating enzyme 10 (UBC10)
MASKRILKELKDLQKDPPTSCSAGPVAEDMFHWQATIMGPSESPYAGGVFLVTIHFPPDYPFKPPKVIPIF

SEQ ID NO: 47962 - protein, 42 aa, Arabidopsis thaliana
  peptide (1)..(42): Ceres Seq. ID no. 13648786
  misc_feature (1)..(38): Homolog of NCBI NO: 456568 NR Description: ubiquitin conjugating enzyme
  misc_feature (1)..(38): Homolog of NCBI NO: 18408001 NR Description: ubiquitin-conjugating enzyme [Arabidopsis
  misc_feature (1)..(38): Homolog of NCBI NO: 19347859 NR Description: putative E2, ubiquitin-conjugating enzyme UBC9
  misc_feature (1)..(38): Homolog of NCBI NO: 5762457 NR Description: ubiquitin-conjugating enzyme UBC2
  misc_feature (1)..(38): Homolog of NCBI NO: 40287554 NR Description: ubiquitin-conjugating enzyme 8 [Capsicum annuum]
  misc_feature (1)..(38): Homolog of NCBI NO: 30687803 NR Description: ubiquitin-conjugating enzyme 9 (UBC9)
  misc_feature (1)..(38): Homolog of NCBI NO: 21554343 NR Description: E2, ubiquitin-conjugating enzyme 10 (UBC10)
  misc_feature (1)..(38): Homolog of NCBI NO: 18417097 NR Description: ubiquitin-conjugating enzyme 9 (UBC9)
  misc_feature (1)..(38): Homolog of NCBI NO: 11762186 NR Description: AT4g27960 [Arabidopsis thaliana]
  misc_feature (1)..(38): Homolog of NCBI NO: 18423494 NR Description: ubiquitin-conjugating enzyme 10 (UBC10)
MFHWQATIMGPSESPYAGGVFLVTIHFPPDYPFKPPKVIPIF

SEQ ID NO: 47963 - protein, 36 aa, Arabidopsis thaliana
  peptide (1)..(36): Ceres Seq. ID no. 13648787
KSWFFFSLIREEKGENLANPITRKIKGFWIWRRSGS

SEQ ID NO: 47964 - DNA, 1338 bp, Arabidopsis thaliana
  misc_feature (1)..(1338): Ceres Seq. ID no. 13649184
  misc_feature: MA Experiment ID: 20000169 Result: Down-regulated in Transcription
  misc_feature: MA Experiment 20000169 PARAMETER Experiment Name: At_100uM_ABA_P Parameter: Age (day) Value: 14
  misc_feature: MA Experiment 20000169 PARAMETER Experiment Name: At_100uM_ABA_P Parameter: Organism Value: A. thaliana
  misc_feature: MA Experiment 20000169 PARAMETER Experiment Name: At_100uM_ABA_P Parameter: Plant Line Value: WS
  misc_feature: MA Experiment 20000169 PARAMETER Experiment Name: At_100uM_ABA_P Parameter: Timepoint (hr) Value: 6
  misc_feature: MA Experiment 20000169 PARAMETER Experiment Name: At_100uM_ABA_P Parameter: Tissue Value: Aerial
  misc_feature: MA Experiment 20000169 PARAMETER Experiment Name: At_100uM_ABA_P Parameter: Treatment Value: 100uM ABA vs. No Treatment
  misc_feature: MA Experiment ID: 20000180 Result: Down-regulated in Transcription
  misc_feature: MA Experiment 20000180 PARAMETER Experiment Name: At_Germinating_Seeds_P Parameter: Age (hr) Value: 24 vs. 0
  misc_feature: MA Experiment 20000180 PARAMETER Experiment Name: At_Germinating_Seeds_P Parameter: Tissue Value: Germinating Seeds
  misc_feature: MA Experiment ID: 20000437 Result: Down-regulated in Transcription
  misc_feature: MA Experiment 20000437 PARAMETER Experiment Name: At_Drought_P Parameter: Age (day) Value: 8
  misc_feature: MA Experiment 20000437 PARAMETER Experiment Name: At_Drought_P Parameter: Organism Value: A. thaliana
  misc_feature: MA Experiment 20000437 PARAMETER Experiment Name: At_Drought_P Parameter: Plant Line Value: WS
  misc_feature: MA Experiment 20000437 PARAMETER Experiment Name: At_Drought_P Parameter: Timepoint (hr) Value: 24
  misc_feature: MA Experiment 20000437 PARAMETER Experiment Name: At_Drought_P Parameter: Tissue Value: Whole Plant
  misc_feature: MA Experiment 20000437 PARAMETER Experiment Name: At_Drought_P Parameter: Treatment Value: Drought vs. No Drought
  misc_feature: MA Experiment ID: 20000794 Result: Down-regulated in Transcription
  misc_feature: MA Experiment 20000794 PARAMETER Experiment Name: At_Petals_P Parameter: Age (day) Value: 23-25 days
  misc_feature: MA Experiment 20000794 PARAMETER Experiment Name: At_Petals_P Parameter: Plant Line Value: WS
  misc_feature: MA Experiment 20000794 PARAMETER Experiment Name: At_Petals_P Parameter: Tissue Value: Petals vs. Whole plant
  misc_feature: MA Experiment ID: 20001248 Result: Up-regulated in Transcription
  misc_feature: MA Experiment 20001248 PARAMETER Experiment Name: At_Far-red-induction_P Parameter: Age (day) Value: 7
  misc_feature: MA Experiment 20001248 PARAMETER Experiment Name: At_Far-red-induction_P Parameter: Light Value: Far-red vs. White
  misc_feature: MA Experiment 20001248 PARAMETER Experiment Name: At_Far-red-induction_P Parameter: Organism Value: A. thaliana
  misc_feature: MA Experiment 20001248 PARAMETER Experiment Name: At_Far-red-induction_P Parameter: Plant Line Value: Columbia
  misc_feature: MA Experiment 20001248 PARAMETER Experiment Name: At_Far-red-induction_P Parameter: Timepoint (hr) Value: 4
  misc_feature: MA Experiment 20001248 PARAMETER Experiment Name: At_Far-red-induction_P Parameter: Tissue Value: Whole Plant
  misc_feature: MA Experiment ID: 20001557 Result: Up-regulated in Transcription
  misc_feature: MA Experiment 20001557 PARAMETER Experiment Name: At_Drought_Soil_Dry_P Parameter: Age (day) Value: 27
  misc_feature: MA Experiment 20001557 PARAMETER Experiment Name: At_Drought_Soil_Dry_P Parameter: Organism Value: A. thaliana
  misc_feature: MA Experiment 20001557 PARAMETER Experiment Name: At_Drought_Soil_Dry_P Parameter: Plant Line Value: WS
  misc_feature: MA Experiment 20001557 PARAMETER Experiment Name: At_Drought_Soil_Dry_P Parameter: Post Timepoint (hr) Value: 3
  misc_feature: MA Experiment 20001557 PARAMETER Experiment Name: At_Drought_Soil_Dry_P Parameter: Post-Treatment Value: Re-Water vs. No Drought
  misc_feature: MA Experiment 20001557 PARAMETER Experiment Name: At_Drought_Soil_Dry_P Parameter: Timepoint (day) Value: 13
  misc_feature: MA Experiment 20001557 PARAMETER Experiment Name: At_Drought_Soil_Dry_P Parameter: Treatment Value: Drought vs. No Drought
  misc_feature: MA Experiment ID: 20001558 Result: Up-regulated in Transcription
  misc_feature: MA Experiment 20001558 PARAMETER Experiment Name: At_Drought_Soil_Dry_P Parameter: Age (day) Value: 27
  misc_feature: MA Experiment 20001558 PARAMETER Experiment Name: At_Drought_Soil_Dry_P Parameter: Organism Value: A. thaliana
  misc_feature: MA Experiment 20001558 PARAMETER Experiment Name: At_Drought_Soil_Dry_P Parameter: Plant Line Value: WS
  misc_feature: MA Experiment 20001558 PARAMETER Experiment Name: At_Drought_Soil_Dry_P Parameter: Post Timepoint (hr) Value: 6
  misc_feature: MA Experiment 20001558 PARAMETER Experiment Name: At_Drought_Soil_Dry_P Parameter: Post-Treatment Value: Re-Water vs. No Drought
  misc_feature: MA Experiment 20001558 PARAMETER Experiment Name: At_Drought_Soil_Dry_P Parameter: Timepoint (day) Value: 13
  misc_feature: MA Experiment 20001558 PARAMETER Experiment Name: At_Drought_Soil_Dry_P Parameter: Treatment Value: Drought vs. No Drought
  misc_feature: MA Experiment ID: 20001560 Result: Up-regulated in Transcription
  misc_feature: MA Experiment 20001560 PARAMETER Experiment Name: At_Drought_Soil_Dry_P Parameter: Age (day) Value: 28
  misc_feature: MA Experiment 20001560 PARAMETER Experiment Name: At_Drought_Soil_Dry_P Parameter: Organism Value: A. thaliana
  misc_feature: MA Experiment 20001560 PARAMETER Experiment Name: At_Drought_Soil_Dry_P Parameter: Plant Line Value: WS
  misc_feature: MA Experiment 20001560 PARAMETER Experiment Name: At_Drought_Soil_Dry_P Parameter: Post Timepoint (hr) Value: None
  misc_feature: MA Experiment 20001560 PARAMETER Experiment Name: At_Drought_Soil_Dry_P Parameter: Post-Treatment Value: None
  misc_feature: MA Experiment 20001560 PARAMETER Experiment Name: At_Drought_Soil_Dry_P Parameter: Timepoint (day) Value: 14
  misc_feature: MA Experiment 20001560 PARAMETER Experiment Name: At_Drought_Soil_Dry_P Parameter: Treatment Value: Drought vs. No Drought
  misc_feature: MA Experiment ID: 20001757 Result: Up-regulated in Transcription
  misc_feature: MA Experiment 20001757 PARAMETER Experiment Name: At_50mM_NH4NO3_L-to-H_P Parameter: Timepoint (hr) Value: 6
  misc_feature: MA Experiment 20001757 PARAMETER Experiment Name: At_50mM_NH4NO3_L-to-H_P Parameter: Tissue Value: Leaf
  misc_feature: MA Experiment 20001757 PARAMETER Experiment Name: At_50mM_NH4NO3_L-to-H_P Parameter: Treatment Value: 50mM NH4NO3 vs 100mM Mannitol
atgcagacaccaaacaacaacggttcaacagattcagtgttaccaccaacatcagccggaacaacaccaccaccaccgttgcagcaatcaacaccaccaccgcagcagcaacaacaacaacagtggcaacaacaacaacaatggatggctgcgatgcagcaataccctgcagctgctatggctatgatgcaacaacaacagatgatgatgtatcctcaccctcaatacgctccttacaatcaagctgcttatcaacagcatcctcagtttcaatacgctgcttatcaacagcagcagcagcaacatcaccagagtcagcagcagccacgcggtggatctggtggtgatgatgtcaagactctttgggttggtgatcttcttcattggatggatgagacttatctccatacctgtttctctcacaccaatgaggtttcttctgtgaaagttatacgcaacaagcaaacttgtcaatctgaaggatatgggtttgttgagtttctttcacgttcagcagctgaggaagctcttcagagctttagcggtgttacaatgccgaacgcggaacagcctttccgtttaaactgggcatctttcagtactggtgagaaaagagcatcagagaatggtcctgacctatccatatttgttggagatttggctccagatgtgagtgatgctgtcttgcttgagacttttgctggtagatatccatctgtcaaaggtgctaaagttgtgattgattccaacactgggcgttccaaaggttacgggtttgttaggtttggtgatgagaatgagcgatcaagagctatgacagaaatgaatggtgctttctgttcaagcaggcaaatgcgtgttggtatcgcaaccccgaaaagggctgctgcttacggccaacaaaatggttcacaagctcttacacttgctggtggacatggagggaatggttcaatgtctgatggagaatcaaataactcaacaatatttgttggcggtcttgatgctgatgttactgaagaagacctcatgcaacctttttccgattttggggaggttgtttcagtgaagatcccagtagggaaaggatgtggctttgtccaatttgctaacaggcaaagtgctgaggaagccatcgggaacttgaacgggacagtcattgggaagaacactgtccgcctttcatggggaagaagccccaacaaacagtggagaagtgactctggcaaccaatggaatggaggatattcaagaggtcaaggatacaacaatggatatgccaatcaggactcaaacatgtacgctactgcagcggctgcagtcccgggagcttcttga

SEQ ID NO: 47965 - protein, 445 aa, Arabidopsis thaliana
  peptide (1)..(445): Ceres Seq. ID no. 13649185
  misc_feature (121)..(192): Pfam Name: RNA recognition motif. (a.k.a. RRM, RBD, or RNP domain) Pfam Description: RNA recognition motif. (a.k.a. RRM, RBD, or RNP
  misc_feature (35)..(445): Homolog of NCBI NO: 40804404 NR Description: DNA-binding protein [Lycopersicon esculentum]
  misc_feature (35)..(445): Homolog of NCBI NO: 7489112 NR Description: DNA binding protein ACBF - common tobacco
  misc_feature (28)..(445): Homolog of NCBI NO: 9663769 NR Description: RNA Binding Protein 47 [Nicotiana plumbaginifolia]
  misc_feature (35)..(445): Homolog of NCBI NO: 7489196 NR Description: RNA binding protein homolog - common tobacco
  misc_feature (1)..(403): Homolog of NCBI NO: 9294614 NR Description: DNA/RNA binding protein-like [Arabidopsis
  misc_feature (52)..(434): Homolog of NCBI NO: 21618243 NR Description: nuclear acid binding protein, putative
  misc_feature (1)..(434): Homolog of NCBI NO: 15230291 NR Description: RNA-binding protein, putative [Arabidopsis
  misc_feature (306)..(445): Homolog of NCBI NO: 25386576 NR Description: probable RNA binding protein [imported] -
  misc_feature (1)..(307): Homolog of NCBI NO: 25386576 NR Description: probable RNA binding protein [imported] -
  misc_feature (1)..(445): Homolog of NCBI NO: 15222783 NR Description: RNA binding protein 47 (RBP47), putative
MQTPNNNGSTDSVLPPTSAGTTPPPPLQQSTPPPQQQQQQQWQQQQQWMAAMQQYPAAAMAMMQQQQMMMYPHPQYAPYNQAAYQQHPQFQYAAYQQQQQQHHQSQQQPRGGSGGDDVKTLWVGDLLHWMDETYLHTCFSHTNEVSSVKVIRNKQTCQSEGYGFVEFLSRSAAEEALQSFSGVTMPNAEQPFRLNWASFSTGEKRASENGPDLSIFVGDLAPDVSDAVLLETFAGRYPSVKGAKVVIDSNTGRSKGYGFVRFGDENERSRAMTEMNGAFCSSRQMRVGIATPKRAAAYGQQNGSQALTLAGGHGGNGSMSDGESNNSTIFVGGLDADVTEEDLMQPFSDFGEVVSVKIPVGKGCGFVQFANRQSAEEAIGNLNGTVIGKNTVRLSWGRSPNKQWRSDSGNQWNGGYSRGQGYNNGYANQDSNMYATAAAAVPGAS

SEQ ID NO: 47966 - protein, 397 aa, Arabidopsis thaliana
  peptide (1)..(397): Ceres Seq. ID no. 13649186
  misc_feature (73)..(144): Pfam Name: RNA recognition motif. (a.k.a. RRM, RBD, or RNP domain) Pfam Description: RNA recognition motif. (a.k.a. RRM, RBD, or RNP
  misc_feature (1)..(397): Homolog of NCBI NO: 40804404 NR Description: DNA-binding protein [Lycopersicon esculentum]
  misc_feature (1)..(397): Homolog of NCBI NO: 7489112 NR Description: DNA binding protein ACBF - common tobacco
  misc_feature (1)..(397): Homolog of NCBI NO: 9663769 NR Description: RNA Binding Protein 47 [Nicotiana plumbaginifolia]
  misc_feature (1)..(397): Homolog of NCBI NO: 7489196 NR Description: RNA binding protein homolog - common tobacco
  misc_feature (1)..(355): Homolog of NCBI NO: 9294614 NR Description: DNA/RNA binding protein-like [Arabidopsis
  misc_feature (4)..(386): Homolog of NCBI NO: 21618243 NR Description: nuclear acid binding protein, putative
  misc_feature (1)..(386): Homolog of NCBI NO: 15230291 NR Description: RNA-binding protein, putative [Arabidopsis
  misc_feature (258)..(397): Homolog of NCBI NO: 25386576 NR Description: probable RNA binding protein [imported] -
  misc_feature (1)..(259): Homolog of NCBI NO: 25386576 NR Description: probable RNA binding protein [imported] -
  misc_feature (1)..(397): Homolog of NCBI NO: 15222783 NR Description: RNA binding protein 47 (RBP47), putative
MAAMQQYPAAAMAMMQQQQMMMYPHPQYAPYNQAAYQQHPQFQYAAYQQQQQQHHQSQQQPRGGSGGDDVKTLWVGDLLHWMDETYLHTCFSHTNEVSSVKVIRNKQTCQSEGYGFVEFLSRSAAEEALQSFSGVTMPNAEQPFRLNWASFSTGEKRASENGPDLSIFVGDLAPDVSDAVLLETFAGRYPSVKGAKVVIDSNTGRSKGYGFVRFGDENERSRAMTEMNGAFCSSRQMRVGIATPKRAAAYGQQNGSQALTLAGGHGGNGSMSDGESNNSTIFVGGLDADVTEEDLMQPFSDFGEVVSVKIPVGKGCGFVQFANRQSAEEAIGNLNGTVIGKNTVRLSWGRSPNKQWRSDSGNQWNGGYSRGQGYNNGYANQDSNMYATAAAAVPGAS

SEQ ID NO: 47967 - protein, 394 aa, Arabidopsis thaliana
  peptide (1)..(394): Ceres Seq. ID no. 13649187
  misc_feature (70)..(141): Pfam Name: RNA recognition motif. (a.k.a. RRM, RBD, or RNP domain) Pfam Description: RNA recognition motif. (a.k.a. RRM, RBD, or RNP
  misc_feature (1)..(394): Homolog of NCBI NO: 40804404 NR Description: DNA-binding protein [Lycopersicon esculentum]
  misc_feature (1)..(394): Homolog of NCBI NO: 7489112 NR Description: DNA binding protein ACBF - common tobacco
  misc_feature (1)..(394): Homolog of NCBI NO: 9663769 NR Description: RNA Binding Protein 47 [Nicotiana plumbaginifolia]
  misc_feature (1)..(394): Homolog of NCBI NO: 7489196 NR Description: RNA binding protein homolog - common tobacco
  misc_feature (1)..(352): Homolog of NCBI NO: 9294614 NR Description: DNA/RNA binding protein-like [Arabidopsis
  misc_feature (1)..(383): Homolog of NCBI NO: 21618243 NR Description: nuclear acid binding protein, putative
  misc_feature (1)..(383): Homolog of NCBI NO: 15230291 NR Description: RNA-binding protein, putative [Arabidopsis
  misc_feature (255)..(394): Homolog of NCBI NO: 25386576 NR Description: probable RNA binding protein [imported] -
  misc_feature (1)..(256): Homolog of NCBI NO: 25386576 NR Description: probable RNA binding protein [imported] -
  misc_feature (1)..(394): Homolog of NCBI NO: 15222783 NR Description: RNA binding protein 47 (RBP47), putative
MQQYPAAAMAMMQQQQMMMYPHPQYAPYNQAAYQQHPQFQYAAYQQQQQQHHQSQQQPRGGSGGDDVKTLWVGDLLHWMDETYLHTCFSHTNEVSSVKVIRNKQTCQSEGYGFVEFLSRSAAEEALQSFSGVTMPNAEQPFRLNWASFSTGEKRASENGPDLSIFVGDLAPDVSDAVLLETFAGRYPSVKGAKVVIDSNTGRSKGYGFVRFGDENERSRAMTEMNGAFCSSRQMRVGIATPKRAAAYGQQNGSQALTLAGGHGGNGSMSDGESNNSTIFVGGLDADVTEEDLMQPFSDFGEVVSVKIPVGKGCGFVQFANRQSAEEAIGNLNGTVIGKNTVRLSWGRSPNKQWRSDSGNQWNGGYSRGQGYNNGYANQDSNMYATAAAAVPGAS

SEQ ID NO: 47968 - DNA, 2828 bp, Arabidopsis thaliana; identical to SEQ ID NO: 44938
  misc_feature (1)..(2828): Ceres Seq. ID no. 13646314
  misc_feature: MA Experiment ID: 20000234 Result: Up-regulated in Transcription
  misc_feature: MA Experiment 20000234 PARAMETER Experiment Name: At_Siliques_P Parameter: Age (day) Value: 21
  misc_feature: MA Experiment 20000234 PARAMETER Experiment Name: At_Siliques_P Parameter: Organism Value: A. thaliana
  misc_feature: MA Experiment 20000234 PARAMETER Experiment Name: At_Siliques_P Parameter: Plant Line Value: WS
  misc_feature: MA Experiment 20000234 PARAMETER Experiment Name: At_Siliques_P Parameter: Tissue Value: Less Than 5mm Siliques vs. Whole Plant

SEQ ID NO: 47969 - protein, 814 aa, Arabidopsis thaliana; identical to SEQ ID NO: 44939
  peptide (1)..(814): Ceres Seq. ID no. 13646315
  misc_feature (256)..(373): Pfam Name: ABC1 family Pfam Description: ABC1 family
  misc_feature (256)..(373): Pfam Name: ABC1 family Pfam Description: ABC1 family
  misc_feature (256)..(373): Pfam Name: ABC1 family Pfam Description: ABC1 family
  misc_feature (119)..(395): Homolog of NCBI NO: 38344898 NR Description: OSJNBb0079B02.1 [Oryza sativa (japonica
  misc_feature (146)..(603): Homolog of NCBI NO: 23042448 NR Description: hypothetical protein [Trichodesmium erythraeum
  misc_feature (146)..(629): Homolog of NCBI NO: 16329739 NR Description: ABC1-like [Synechocystis sp. PCC 6803]
  misc_feature (145)..(682): Homolog of NCBI NO: 18412437 NR Description: expressed protein [Arabidopsis thaliana]
  misc_feature (146)..(603): Homolog of NCBI NO: 16331408 NR Description: ABC1-like [Synechocystis sp. PCC 6803]
  misc_feature (119)..(395): Homolog of NCBI NO: 38344898 NR Description: OSJNBb0079B02.1 [Oryza sativa (japonica
  misc_feature (146)..(629): Homolog of NCBI NO: 16329739 NR Description: ABC1-like [Synechocystis sp. PCC 6803]
  misc_feature (146)..(603): Homolog of NCBI NO: 16331408 NR Description: ABC1-like [Synechocystis sp. PCC 6803]
  misc_feature (145)..(682): Homolog of NCBI NO: 18412437 NR Description: expressed protein [Arabidopsis thaliana]
  misc_feature (146)..(629): Homolog of NCBI NO: 16329739 NR Description: ABC1-like [Synechocystis sp. PCC 6803]
  misc_feature (146)..(603): Homolog of NCBI NO: 23042448 NR Description: hypothetical protein [Trichodesmium erythraeum
  misc_feature (119)..(395): Homolog of NCBI NO: 38344898 NR Description: OSJNBb0079B02.1 [Oryza sativa (japonica
  misc_feature (1)..(361): Homolog of NCBI NO: 18404977 NR Description: ABC transporter -related [Arabidopsis thaliana]
  misc_feature (75)..(704): Homolog of NCBI NO: 15451577 NR Description: Putative ABC transporter [Oryza sativa]
  misc_feature (144)..(619): Homolog of NCBI NO: 23129126 NR Description: hypothetical protein [Nostoc punctiforme]
  misc_feature (143)..(669): Homolog of NCBI NO: 17232452 NR Description: hypothetical protein [Nostoc sp. PCC 7120]
  misc_feature (146)..(608): Homolog of NCBI NO: 22298493 NR Description: ORF_ID:tll0950~hypothetical protein
  misc_feature (1)..(361): Homolog of NCBI NO: 18404977 NR Description: ABC transporter -related [Arabidopsis thaliana]
  misc_feature (75)..(704): Homolog of NCBI NO: 15451577 NR Description: Putative ABC transporter [Oryza sativa]
  misc_feature (144)..(619): Homolog of NCBI NO: 23129126 NR Description: hypothetical protein [Nostoc punctiforme]
  misc_feature (143)..(669): Homolog of NCBI NO: 17232452 NR Description: hypothetical protein [Nostoc sp. PCC 7120]
  misc_feature (146)..(608): Homolog of NCBI NO: 22298493 NR Description: ORF_ID:tll0950~hypothetical protein
  misc_feature (146)..(603): Homolog of NCBI NO: 16331408 NR Description: ABC1-like [Synechocystis sp. PCC 6803]
  misc_feature (145)..(682): Homolog of NCBI NO: 18412437 NR Description: expressed protein [Arabidopsis thaliana]
  misc_feature (146)..(603): Homolog of NCBI NO: 23042448 NR Description: hypothetical protein [Trichodesmium erythraeum
  misc_feature (146)..(608): Homolog of NCBI NO: 22298493 NR Description: ORF_ID:tll0950~hypothetical protein
  misc_feature (143)..(669): Homolog of NCBI NO: 17232452 NR Description: hypothetical protein [Nostoc sp. PCC 7120]
  misc_feature (144)..(619): Homolog of NCBI NO: 23129126 NR Description: hypothetical protein [Nostoc punctiforme]
  misc_feature (75)..(704): Homolog of NCBI NO: 15451577 NR Description: Putative ABC transporter [Oryza sativa]
  misc_feature (1)..(361): Homolog of NCBI NO: 18404977 NR Description: ABC transporter -related [Arabidopsis thaliana]

SEQ ID NO: 47970 - protein, 697 aa, Arabidopsis thaliana; identical to SEQ ID NO: 44940
  peptide (1)..(697): Ceres Seq. ID no. 13646316
  misc_feature (139)..(256): Pfam Name: ABC1 family Pfam Description: ABC1 family
  misc_feature (139)..(256): Pfam Name: ABC1 family Pfam Description: ABC1 family
  misc_feature (139)..(256): Pfam Name: ABC1 family Pfam Description: ABC1 family
  misc_feature (2)..(278): Homolog of NCBI NO: 38344898 NR Description: OSJNBb0079B02.1 [Oryza sativa (japonica
  misc_feature (29)..(486): Homolog of NCBI NO: 23042448 NR Description: hypothetical protein [Trichodesmium erythraeum
  misc_feature (29)..(512): Homolog of NCBI NO: 16329739 NR Description: ABC1-like [Synechocystis sp. PCC 6803]
  misc_feature (28)..(565): Homolog of NCBI NO: 18412437 NR Description: expressed protein [Arabidopsis thaliana]
  misc_feature (29)..(486): Homolog of NCBI NO: 16331408 NR Description: ABC1-like [Synechocystis sp. PCC 6803]
  misc_feature (2)..(278): Homolog of NCBI NO: 38344898 NR Description: OSJNBb0079B02.1 [Oryza sativa (japonica
  misc_feature (29)..(512): Homolog of NCBI NO: 16329739 NR Description: ABC1-like [Synechocystis sp. PCC 6803]
  misc_feature (29)..(486): Homolog of NCBI NO: 16331408 NR Description: ABC1-like [Synechocystis sp. PCC 6803]
  misc_feature (28)..(565): Homolog of NCBI NO: 18412437 NR Description: expressed protein [Arabidopsis thaliana]
  misc_feature (29)..(512): Homolog of NCBI NO: 16329739 NR Description: ABC1-like [Synechocystis sp. PCC 6803]
  misc_feature (29)..(486): Homolog of NCBI NO: 23042448 NR Description: hypothetical protein [Trichodesmium erythraeum
  misc_feature (2)..(278): Homolog of NCBI NO: 38344898 NR Description: OSJNBb0079B02.1 [Oryza sativa (japonica
  misc_feature (1)..(244): Homolog of NCBI NO: 18404977 NR Description: ABC transporter -related [Arabidopsis thaliana]
  misc_feature (1)..(587): Homolog of NCBI NO: 15451577 NR Description: Putative ABC transporter [Oryza sativa]
  misc_feature (27)..(502): Homolog of NCBI NO: 23129126 NR Description: hypothetical protein [Nostoc punctiforme]
  misc_feature (26)..(552): Homolog of NCBI NO: 17232452 NR Description: hypothetical protein [Nostoc sp. PCC 7120]
  misc_feature (29)..(491): Homolog of NCBI NO: 22298493 NR Description: ORF_ID:tll0950~hypothetical protein
  misc_feature (1)..(244): Homolog of NCBI NO: 18404977 NR Description: ABC transporter -related [Arabidopsis thaliana]
  misc_feature (1)..(587): Homolog of NCBI NO: 15451577 NR Description: Putative ABC transporter [Oryza sativa]
  misc_feature (27)..(502): Homolog of NCBI NO: 23129126 NR Description: hypothetical protein [Nostoc punctiforme]
  misc_feature (26)..(552): Homolog of NCBI NO: 17232452 NR Description: hypothetical protein [Nostoc sp. PCC 7120]
  misc_feature (29)..(491): Homolog of NCBI NO: 22298493 NR Description: ORF_ID:tll0950~hypothetical protein
  misc_feature (29)..(486): Homolog of NCBI NO: 16331408 NR Description: ABC1-like [Synechocystis sp. PCC 6803]
  misc_feature (28)..(565): Homolog of NCBI NO: 18412437 NR Description: expressed protein [Arabidopsis thaliana]
  misc_feature (29)..(486): Homolog of NCBI NO: 23042448 NR Description: hypothetical protein [Trichodesmium erythraeum
  misc_feature (29)..(491): Homolog of NCBI NO: 22298493 NR Description: ORF_ID:tll0950~hypothetical protein
  misc_feature (26)..(552): Homolog of NCBI NO: 17232452 NR Description: hypothetical protein [Nostoc sp. PCC 7120]
  misc_feature (27)..(502): Homolog of NCBI NO: 23129126 NR Description: hypothetical protein [Nostoc punctiforme]
  misc_feature (1)..(587): Homolog of NCBI NO: 15451577 NR Description: Putative ABC transporter [Oryza sativa]
  misc_feature (1)..(244): Homolog of NCBI NO: 18404977 NR Description: ABC transporter -related [Arabidopsis thaliana]

SEQ ID NO: 47971 - protein, 678 aa, Arabidopsis thaliana; identical to SEQ ID NO: 44941
  peptide (1)..(678): Ceres Seq. ID no. 13646317
  misc_feature (120)..(237): Pfam Name: ABC1 family Pfam Description: ABC1 family
  misc_feature (120)..(237): Pfam Name: ABC1 family Pfam Description: ABC1 family
  misc_feature (120)..(237): Pfam Name: ABC1 family Pfam Description: ABC1 family
  misc_feature (1)..(259): Homolog of NCBI NO: 38344898 NR Description: OSJNBb0079B02.1 [Oryza sativa (japonica
  misc_feature (10)..(467): Homolog of NCBI NO: 23042448 NR Description: hypothetical protein [Trichodesmium erythraeum
  misc_feature (10)..(493): Homolog of NCBI NO: 16329739 NR Description: ABC1-like [Synechocystis sp. PCC 6803]
  misc_feature (9)..(546): Homolog of NCBI NO: 18412437 NR Description: expressed protein [Arabidopsis thaliana]
  misc_feature (10)..(467): Homolog of NCBI NO: 16331408 NR Description: ABC1-like [Synechocystis sp. PCC 6803]
  misc_feature (1)..(259): Homolog of NCBI NO: 38344898 NR Description: OSJNBb0079B02.1 [Oryza sativa (japonica
  misc_feature (10)..(493): Homolog of NCBI NO: 16329739 NR Description: ABC1-like [Synechocystis sp. PCC 6803]
  misc_feature (10)..(467): Homolog of NCBI NO: 16331408 NR Description: ABC1-like [Synechocystis sp. PCC 6803]
  misc_feature (9)..(546): Homolog of NCBI NO: 18412437 NR Description: expressed protein [Arabidopsis thaliana]
  misc_feature (10)..(493): Homolog of NCBI NO: 16329739 NR Description: ABC1-like [Synechocystis sp. PCC 6803]
  misc_feature (10)..(467): Homolog of NCBI NO: 23042448 NR Description: hypothetical protein [Trichodesmium erythraeum
  misc_feature (1)..(259): Homolog of NCBI NO: 38344898 NR Description: OSJNBb0079B02.1 [Oryza sativa (japonica
  misc_feature (1)..(225): Homolog of NCBI NO: 18404977 NR Description: ABC transporter -related [Arabidopsis thaliana]
  misc_feature (1)..(568): Homolog of NCBI NO: 15451577 NR Description: Putative ABC transporter [Oryza sativa]
  misc_feature (8)..(483): Homolog of NCBI NO: 23129126 NR Description: hypothetical protein [Nostoc punctiforme]
  misc_feature (7)..(533): Homolog of NCBI NO: 17232452 NR Description: hypothetical protein [Nostoc sp. PCC 7120]
  misc_feature (10)..(472): Homolog of NCBI NO: 22298493 NR Description: ORF_ID:tll0950~hypothetical protein
  misc_feature (1)..(225): Homolog of NCBI NO: 18404977 NR Description: ABC transporter -related [Arabidopsis thaliana]
  misc_feature (1)..(568): Homolog of NCBI NO: 15451577 NR Description: Putative ABC transporter [Oryza sativa]
  misc_feature (8)..(483): Homolog of NCBI NO: 23129126 NR Description: hypothetical protein [Nostoc punctiforme]
  misc_feature (7)..(533): Homolog of NCBI NO: 17232452 NR Description: hypothetical protein [Nostoc sp. PCC 7120]
  misc_feature (10)..(472): Homolog of NCBI NO: 22298493 NR Description: ORF_ID:tll0950~hypothetical protein
  misc_feature (10)..(467): Homolog of NCBI NO: 16331408 NR Description: ABC1-like [Synechocystis sp. PCC 6803]
  misc_feature (9)..(546): Homolog of NCBI NO: 18412437 NR Description: expressed protein [Arabidopsis thaliana]
  misc_feature (10)..(467): Homolog of NCBI NO: 23042448 NR Description: hypothetical protein [Trichodesmium erythraeum
  misc_feature (10)..(472): Homolog of NCBI NO: 22298493 NR Description: ORF_ID:tll0950~hypothetical protein
  misc_feature (7)..(533): Homolog of NCBI NO: 17232452 NR Description: hypothetical protein [Nostoc sp. PCC 7120]
  misc_feature (8)..(483): Homolog of NCBI NO: 23129126 NR Description: hypothetical protein [Nostoc punctiforme]
  misc_feature (1)..(568): Homolog of NCBI NO: 15451577 NR Description: Putative ABC transporter [Oryza sativa]
  misc_feature (1)..(225): Homolog of NCBI NO: 18404977 NR Description: ABC transporter -related [Arabidopsis thaliana]

SEQ ID NO: 47972 - DNA, 1266 bp, Arabidopsis thaliana
  misc_feature (1)..(1266): Ceres Seq. ID no. 13649024
  misc_feature: MA Experiment ID: 20000182 Result: Down-regulated in Transcription
  misc_feature: MA Experiment 20000182 PARAMETER Experiment Name: At_2mM_SA_P Parameter: Age (day) Value: 14
  misc_feature: MA Experiment 20000182 PARAMETER Experiment Name: At_2mM_SA_P Parameter: Organism Value: A. thaliana
  misc_feature: MA Experiment 20000182 PARAMETER Experiment Name: At_2mM_SA_P Parameter: Plant Line Value: WS
  misc_feature: MA Experiment 20000182 PARAMETER Experiment Name: At_2mM_SA_P Parameter: Timepoint (hr) Value: 6
  misc_feature: MA Experiment 20000182 PARAMETER Experiment Name: At_2mM_SA_P Parameter: Tissue Value: Aerial
  misc_feature: MA Experiment 20000182 PARAMETER Experiment Name: At_2mM_SA_P Parameter: Treatment Value: 2mM SA vs. No Treatment
  misc_feature: MA Experiment ID: 20000184 Result: Down-regulated in Transcription
  misc_feature: MA Experiment 20000184 PARAMETER Experiment Name: At_Shoots__P Parameter: Age (day) Value: 7
  misc_feature: MA Experiment 20000184 PARAMETER Experiment Name: At_Shoots__P Parameter: Tissue Value: Shoots vs. Whole Plant
  misc_feature: MA Experiment ID: 20000264 Result: Down-regulated in Transcription
  misc_feature: MA Experiment 20000264 PARAMETER Experiment Name: At_Open_Flower_P Parameter: Age (day) Value: 21
  misc_feature: MA Experiment 20000264 PARAMETER Experiment Name: At_Open_Flower_P Parameter: Plant Line Value: WS
  misc_feature: MA Experiment 20000264 PARAMETER Experiment Name: At_Open_Flower_P Parameter: Tissue Value: Open Flower vs. Whole Plant
  misc_feature: MA Experiment ID: 20000451 Result: Down-regulated in Transcription
  misc_feature: MA Experiment 20000451 PARAMETER Experiment Name: At_CS6879_Shoots-Roots_P Parameter: Age (day) Value: 14
  misc_feature: MA Experiment 20000451 PARAMETER Experiment Name: At_CS6879_Shoots-Roots_P Parameter: Organism Value: A. thaliana
  misc_feature: MA Experiment 20000451 PARAMETER Experiment Name: At_CS6879_Shoots-Roots_P Parameter: Plant Line Value: CS6879 vs. WS
  misc_feature: MA Experiment 20000451 PARAMETER Experiment Name: At_CS6879_Shoots-Roots_P Parameter: Tissue Value: Roots
  misc_feature: MA Experiment ID: 20000573 Result: Down-regulated in Transcription
  misc_feature: MA Experiment 20000573 PARAMETER Experiment Name: At_100uM_ABA_Mutants__P Parameter: Organism Value: A. thaliana
  misc_feature: MA Experiment 20000573 PARAMETER Experiment Name: At_100uM_ABA_Mutants__P Parameter: Plant Line Value: CS22 vs. Ler wt
  misc_feature: MA Experiment 20000573 PARAMETER Experiment Name: At_100uM_ABA_Mutants__P Parameter: Timepoint (hr) Value: N/A
  misc_feature: MA Experiment 20000573 PARAMETER Experiment Name: At_100uM_ABA_Mutants__P Parameter: Tissue Value: Whole Plant
  misc_feature: MA Experiment 20000573 PARAMETER Experiment Name: At_100uM_ABA_Mutants__P Parameter: Treatment Value: None
  misc_feature: MA Experiment ID: 20000794 Result: Down-regulated in Transcription
  misc_feature: MA Experiment 20000794 PARAMETER Experiment Name: At_Petals_P Parameter: Age (day) Value: 23-25 days
  misc_feature: MA Experiment 20000794 PARAMETER Experiment Name: At_Petals_P Parameter: Plant Line Value: WS
  misc_feature: MA Experiment 20000794 PARAMETER Experiment Name: At_Petals_P Parameter: Tissue Value: Petals vs. Whole plant
  misc_feature: MA Experiment ID: 20001557 Result: Down-regulated in Transcription
  misc_feature: MA Experiment 20001557 PARAMETER Experiment Name: At_Drought_Soil_Dry_P Parameter: Age (day) Value: 27
  misc_feature: MA Experiment 20001557 PARAMETER Experiment Name: At_Drought_Soil_Dry_P Parameter: Organism Value: A. thaliana
  misc_feature: MA Experiment 20001557 PARAMETER Experiment Name: At_Drought_Soil_Dry_P Parameter: Plant Line Value: WS
  misc_feature: MA Experiment 20001557 PARAMETER Experiment Name: At_Drought_Soil_Dry_P Parameter: Post Timepoint (hr) Value: 3
  misc_feature: MA Experiment 20001557 PARAMETER Experiment Name: At_Drought_Soil_Dry_P Parameter: Post-Treatment Value: Re-Water vs. No Drought
  misc_feature: MA Experiment 20001557 PARAMETER Experiment Name: At_Drought_Soil_Dry_P Parameter: Timepoint (day) Value: 13
  misc_feature: MA Experiment 20001557 PARAMETER Experiment Name: At_Drought_Soil_Dry_P Parameter: Treatment Value: Drought vs. No Drought
  misc_feature: MA Experiment ID: 20001757 Result: Up-regulated in Transcription
  misc_feature: MA Experiment 20001757 PARAMETER Experiment Name: At_50mM_NH4NO3_L-to-H_P Parameter: Timepoint (hr) Value: 6
  misc_feature: MA Experiment 20001757 PARAMETER Experiment Name: At_50mM_NH4NO3_L-to-H_P Parameter: Tissue Value: Leaf
  misc_feature: MA Experiment 20001757 PARAMETER Experiment Name: At_50mM_NH4NO3_L-to-H_P Parameter: Treatment Value: 50mM NH4NO3 vs 100mM Mannitol
  misc_feature: MA Experiment ID: 20001910 Result: Down-regulated in Transcription
  misc_feature: MA Experiment 20001910 PARAMETER Experiment Name: At_Drought_Reproduction_P Parameter: Age (day) Value: 37
  misc_feature: MA Experiment 20001910 PARAMETER Experiment Name: At_Drought_Reproduction_P Parameter: Organism Value: A. thaliana
  misc_feature: MA Experiment 20001910 PARAMETER Experiment Name: At_Drought_Reproduction_P Parameter: Plant Line Value: WS
  misc_feature: MA Experiment 20001910 PARAMETER Experiment Name: At_Drought_Reproduction_P Parameter: Timepoint (day) Value: 7
  misc_feature: MA Experiment 20001910 PARAMETER Experiment Name: At_Drought_Reproduction_P Parameter: Tissue Value: Flowers
  misc_feature: MA Experiment 20001910 PARAMETER Experiment Name: At_Drought_Reproduction_P Parameter: Treatment Value: Drought vs. No Drought
gattaagttccttttatcctttccctctcaaacccctaaatcaaccaatcaaagtttcacagaattatcttctattattcaggtatgaaaataatctcattatccatatccataggtatcgcaataattgccgttctggcatctaaaactctctttaaaacacatcctgaagcttttggtatcaaagcaatatcatattcattcaagaaatccttatgtgatcaccatcaccatcatcatcatcatcatcatcaccaccaccggcataaaccttcggataccaaaagaaaggtatcaatatgcgacgatttccctaaaaatatacctccattggacaccgacacaacatcctatctctgcgtggataagaacggttgctgcaatttcacgacggtgcaatcggccgtggacgcagtggggaatttcagtcaaagaaggaacgtgatttggataaactccggcatgtactatgaaaaagtggtgattccgaagactaaaccaaacataacgttgcaaggacaaggcttcgacattacagccattgcgtggaacgacactgcctactcagctaatggcacattttattgtgccacggtccaagtctttggttctcagttcgtcgctaagaacatcagtttcatgaacgtggcaccgataccaaagccaggagacgtaggagctcaggcggtggcaataagaatcgccggagatgaatcagcgtttgtgggatgcggtttcttcggagcacaagacactcttcatgacgatagaggtcgtcattacttcaaggattgttacattcaaggatccattgatttcatcttcggcaacgctaagtctctctatcaggactgtcgaataatatcaatggctaatcaattgagcccaggttcaaaagcagttaacggagccgtgactgcaaatgggcgtagctccaaggacgagaacagtggcttctccttcgtcaactgcacaatcggtggaactggtcacgtgtggctaggtcgtgcatggcggccttactcacgtgtggttttcgtttccactactatgaccgatgttatcgcacccgaaggctggaacaacttcaacgatccctctagggacgcgactatattttatggagagtataattgttcgggtccaggagcagatatgtcaaagagagcaccatatgttcaaaaacttaatgagactcaagttgctctattaattaacacgtcttttattgatggagatcaatggttacagttttctgacctttaa

SEQ ID NO: 47973 - protein, 393 aa, Arabidopsis thaliana
  peptide (1)..(393): Ceres Seq. ID no. 13649025
  misc_feature (93)..(385): Pfam Name: Pectinesterase Pfam Description: Pectinesterase
  misc_feature (91)..(388): Homolog of NCBI NO: 9758778 NR Description: pectin methylesterase-like [Arabidopsis thaliana]
  misc_feature (91)..(388): Homolog of NCBI NO: 15238111 NR Description: pectinesterase family [Arabidopsis thaliana]
  misc_feature (91)..(388): Homolog of NCBI NO: 38345478 NR Description: OSJNBa0010H02.16 [Oryza sativa (japonica
  misc_feature (100)..(389): Homolog of NCBI NO: 15241163 NR Description: pectinesterase family [Arabidopsis thaliana]
  misc_feature (89)..(389): Homolog of NCBI NO: 34909402 NR Description: putative pectin methylesterase
  misc_feature (71)..(388): Homolog of NCBI NO: 15228022 NR Description: pectinesterase family [Arabidopsis thaliana]
  misc_feature (3)..(393): Homolog of NCBI NO: 27754550 NR Description: putative pectinesterase family protein
  misc_feature (3)..(393): Homolog of NCBI NO: 15228023 NR Description: pectinesterase family [Arabidopsis thaliana]
  misc_feature (1)..(393): Homolog of NCBI NO: 25325338 NR Description: hypothetical protein [imported] - Arabidopsis
  misc_feature (1)..(393): Homolog of NCBI NO: 15220471 NR Description: pectinesterase family [Arabidopsis thaliana]
MKIISLSISIGIAIIAVLASKTLFKTHPEAFGIKAISYSFKKSLCDHHHHHHHHHHHHHRHKPSDTKRKVSICDDFPKNIPPLDTDTTSYLCVDKNGCCNFTTVQSAVDAVGNFSQRRNVIWINSGMYYEKVVIPKTKPNITLQGQGFDITAIAWNDTAYSANGTFYCATVQVFGSQFVAKNISFMNVAPIPKPGDVGAQAVAIRIAGDESAFVGCGFFGAQDTLHDDRGRHYFKDCYIQGSIDFIFGNAKSLYQDCRIISMANQLSPGSKAVNGAVTANGRSSKDENSGFSFVNCTIGGTGHVWLGRAWRPYSRVVFVSTTMTDVIAPEGWNNFNDPSRDATIFYGEYNCSGPGADMSKRAPYVQKLNETQVALLINTSFIDGDQWLQFSDL

SEQ ID NO: 47974 - protein, 267 aa, Arabidopsis thaliana
  peptide (1)..(267): Ceres Seq. ID no. 13649026
  misc_feature (1)..(259): Pfam Name: Pectinesterase Pfam Description: Pectinesterase
  misc_feature (1)..(262): Homolog of NCBI NO: 9758778 NR Description: pectin methylesterase-like [Arabidopsis thaliana]
  misc_feature (1)..(262): Homolog of NCBI NO: 15238111 NR Description: pectinesterase family [Arabidopsis thaliana]
  misc_feature (1)..(262): Homolog of NCBI NO: 38345478 NR Description: OSJNBa0010H02.16 [Oryza sativa (japonica
  misc_feature (1)..(263): Homolog of NCBI NO: 15241163 NR Description: pectinesterase family [Arabidopsis thaliana]
  misc_feature (1)..(263): Homolog of NCBI NO: 34909402 NR Description: putative pectin methylesterase
  misc_feature (1)..(262): Homolog of NCBI NO: 15228022 NR Description: pectinesterase family [Arabidopsis thaliana]
  misc_feature (1)..(267): Homolog of NCBI NO: 27754550 NR Description: putative pectinesterase family protein
  misc_feature (1)..(267): Homolog of NCBI NO: 15228023 NR Description: pectinesterase family [Arabidopsis thaliana]
  misc_feature (1)..(267): Homolog of NCBI NO: 25325338 NR Description: hypothetical protein [imported] - Arabidopsis
  misc_feature (1)..(267): Homolog of NCBI NO: 15220471 NR Description: pectinesterase family [Arabidopsis thaliana]
MYYEKVVIPKTKPNITLQGQGFDITAIAWNDTAYSANGTFYCATVQVFGSQFVAKNISFMNVAPIPKPGDVGAQAVAIRIAGDESAFVGCGFFGAQDTLHDDRGRHYFKDCYIQGSIDFIFGNAKSLYQDCRIISMANQLSPGSKAVNGAVTANGRSSKDENSGFSFVNCTIGGTGHVWLGRAWRPYSRVVFVSTTMTDVIAPEGWNNFNDPSRDATIFYGEYNCSGPGADMSKRAPYVQKLNETQVALLINTSFIDGDQWLQFSDL

SEQ ID NO: 47975 - protein, 208 aa, Arabidopsis thaliana
  peptide (1)..(208): Ceres Seq. ID no. 13649027
  misc_feature (1)..(200): Pfam Name: Pectinesterase Pfam Description: Pectinesterase
  misc_feature (1)..(203): Homolog of NCBI NO: 9758778 NR Description: pectin methylesterase-like [Arabidopsis thaliana]
  misc_feature (1)..(203): Homolog of NCBI NO: 15238111 NR Description: pectinesterase family [Arabidopsis thaliana]
  misc_feature (1)..(203): Homolog of NCBI NO: 38345478 NR Description: OSJNBa0010H02.16 [Oryza sativa (japonica
  misc_feature (1)..(204): Homolog of NCBI NO: 15241163 NR Description: pectinesterase family [Arabidopsis thaliana]
  misc_feature (1)..(204): Homolog of NCBI NO: 34909402 NR Description: putative pectin methylesterase
  misc_feature (1)..(203): Homolog of NCBI NO: 15228022 NR Description: pectinesterase family [Arabidopsis thaliana]
  misc_feature (1)..(208): Homolog of NCBI NO: 27754550 NR Description: putative pectinesterase family protein
  misc_feature (1)..(208): Homolog of NCBI NO: 15228023 NR Description: pectinesterase family [Arabidopsis thaliana]
  misc_feature (1)..(208): Homolog of NCBI NO: 25325338 NR Description: hypothetical protein [imported] - Arabidopsis
  misc_feature (1)..(208): Homolog of NCBI NO: 15220471 NR Description: pectinesterase family [Arabidopsis thaliana]
MNVAPIPKPGDVGAQAVAIRIAGDESAFVGCGFFGAQDTLHDDRGRHYFKDCYIQGSIDFIFGNAKSLYQDCRIISMANQLSPGSKAVNGAVTANGRSSKDENSGFSFVNCTIGGTGHVWLGRAWRPYSRVVFVSTTMTDVIAPEGWNNFNDPSRDATIFYGEYNCSGPGADMSKRAPYVQKLNETQVALLINTSFIDGDQWLQFSDL

SEQ ID NO: 47976 - DNA, 3652 bp, Arabidopsis thaliana; identical to SEQ ID NO: 37223
  misc_feature (1)..(3652): Ceres Seq. ID no. 13648943
  misc_feature: MA Experiment ID: 20000179 Result: Up-regulated in Transcription
  misc_feature: MA Experiment 20000179 PARAMETER Experiment Name: At_Germinating_Seeds_P Parameter: Age (hr) Value: 6 vs. 0
  misc_feature: MA Experiment 20000179 PARAMETER Experiment Name: At_Germinating_Seeds_P Parameter: Tissue Value: Germinating Seeds
  misc_feature: MA Experiment ID: 20000180 Result: Up-regulated in Transcription
  misc_feature: MA Experiment 20000180 PARAMETER Experiment Name: At_Germinating_Seeds_P Parameter: Age (hr) Value: 24 vs. 0
  misc_feature: MA Experiment 20000180 PARAMETER Experiment Name: At_Germinating_Seeds_P Parameter: Tissue Value: Germinating Seeds
  misc_feature: MA Experiment ID: 20000235 Result: Up-regulated in Transcription
  misc_feature: MA Experiment 20000235 PARAMETER Experiment Name: At_Siliques_P Parameter: Age (day) Value: 21
  misc_feature: MA Experiment 20000235 PARAMETER Experiment Name: At_Siliques_P Parameter: Organism Value: A. thaliana
  misc_feature: MA Experiment 20000235 PARAMETER Experiment Name: At_Siliques_P Parameter: Plant Line Value: WS
  misc_feature: MA Experiment 20000235 PARAMETER Experiment Name: At_Siliques_P Parameter: Tissue Value: 5-10mm Siliques vs. Whole Plant
  misc_feature: MA Experiment ID: 20001247 Result: Up-regulated in Transcription
  misc_feature: MA Experiment 20001247 PARAMETER Experiment Name: At_Far-red-induction_P Parameter: Age (day) Value: 7
  misc_feature: MA Experiment 20001247 PARAMETER Experiment Name: At_Far-red-induction_P Parameter: Light Value: Far-red vs. White
  misc_feature: MA Experiment 20001247 PARAMETER Experiment Name: At_Far-red-induction_P Parameter: Organism Value: A. thaliana
  misc_feature: MA Experiment 20001247 PARAMETER Experiment Name: At_Far-red-induction_P Parameter: Plant Line Value: Columbia
  misc_feature: MA Experiment 20001247 PARAMETER Experiment Name: At_Far-red-induction_P Parameter: Timepoint (hr) Value: 1
  misc_feature: MA Experiment 20001247 PARAMETER Experiment Name: At_Far-red-induction_P Parameter: Tissue Value: Whole Plant
  misc_feature: MA Experiment ID: 20001557 Result: Up-regulated in Transcription
  misc_feature: MA Experiment 20001557 PARAMETER Experiment Name: At_Drought_Soil_Dry_P Parameter: Age (day) Value: 27
  misc_feature: MA Experiment 20001557 PARAMETER Experiment Name: At_Drought_Soil_Dry_P Parameter: Organism Value: A. thaliana
  misc_feature: MA Experiment 20001557 PARAMETER Experiment Name: At_Drought_Soil_Dry_P Parameter: Plant Line Value: WS
  misc_feature: MA Experiment 20001557 PARAMETER Experiment Name: At_Drought_Soil_Dry_P Parameter: Post Timepoint (hr) Value: 3
  misc_feature: MA Experiment 20001557 PARAMETER Experiment Name: At_Drought_Soil_Dry_P Parameter: Post-Treatment Value: Re-Water vs. No Drought
  misc_feature: MA Experiment 20001557 PARAMETER Experiment Name: At_Drought_Soil_Dry_P Parameter: Timepoint (day) Value: 13
  misc_feature: MA Experiment 20001557 PARAMETER Experiment Name: At_Drought_Soil_Dry_P Parameter: Treatment Value: Drought vs. No Drought
  misc_feature: MA Experiment ID: 20001905 Result: Down-regulated in Transcription
  misc_feature: MA Experiment 20001905 PARAMETER Experiment Name: At_Drought_Reproduction_P Parameter: Age (day) Value: 40
  misc_feature: MA Experiment 20001905 PARAMETER Experiment Name: At_Drought_Reproduction_P Parameter: Organism Value: A. thaliana
  misc_feature: MA Experiment 20001905 PARAMETER Experiment Name: At_Drought_Reproduction_P Parameter: Plant Line Value: WS
  misc_feature: MA Experiment 20001905 PARAMETER Experiment Name: At_Drought_Reproduction_P Parameter: Timepoint (day) Value: 10
  misc_feature: MA Experiment 20001905 PARAMETER Experiment Name: At_Drought_Reproduction_P Parameter: Tissue Value: Rosettes
  misc_feature: MA Experiment 20001905 PARAMETER Experiment Name: At_Drought_Reproduction_P Parameter: Treatment Value: Drought vs. No Drought

SEQ ID NO: 47977 - protein, 1065 aa, Arabidopsis thaliana; identical to SEQ ID NO: 37224
  peptide (1)..(1065): Ceres Seq. ID no. 13648944
  misc_feature (219)..(453): Homolog of NCBI NO: 27372782 NR Description: cellulose synthase-like protein D4 [Populus
  misc_feature (456)..(1048): Homolog of NCBI NO: 27372782 NR Description: cellulose synthase-like protein D4 [Populus
  misc_feature (39)..(85): Homolog of NCBI NO: 15217853 NR Description: cellulose synthase family [Arabidopsis thaliana]
  misc_feature (238)..(453): Homolog of NCBI NO: 15217853 NR Description: cellulose synthase family [Arabidopsis thaliana]
  misc_feature (476)..(1048): Homolog of NCBI NO: 15217853 NR Description: cellulose synthase family [Arabidopsis thaliana]
  misc_feature (220)..(453): Homolog of NCBI NO: 15228448 NR Description: cellulose synthase family [Arabidopsis thaliana]
  misc_feature (417)..(1048): Homolog of NCBI NO: 15228448 NR Description: cellulose synthase family [Arabidopsis thaliana]
  misc_feature (19)..(70): Homolog of NCBI NO: 15237873 NR Description: cellulose synthase family [Arabidopsis thaliana]
  misc_feature (220)..(453): Homolog of NCBI NO: 15237873 NR Description: cellulose synthase family [Arabidopsis thaliana]
  misc_feature (417)..(1048): Homolog of NCBI NO: 15237873 NR Description: cellulose synthase family [Arabidopsis thaliana]
  misc_feature (219)..(453): Homolog of NCBI NO: 27372782 NR Description: cellulose synthase-like protein D4 [Populus
  misc_feature (456)..(1048): Homolog of NCBI NO: 27372782 NR Description: cellulose synthase-like protein D4 [Populus
  misc_feature (39)..(85): Homolog of NCBI NO: 15217853 NR Description: cellulose synthase family [Arabidopsis thaliana]
  misc_feature (238)..(453): Homolog of NCBI NO: 15217853 NR Description: cellulose synthase family [Arabidopsis thaliana]
  misc_feature (476)..(1048): Homolog of NCBI NO: 15217853 NR Description: cellulose synthase family [Arabidopsis thaliana]
  misc_feature (220)..(453): Homolog of NCBI NO: 15228448 NR Description: cellulose synthase family [Arabidopsis thaliana]
  misc_feature (417)..(1048): Homolog of NCBI NO: 15228448 NR Description: cellulose synthase family [Arabidopsis thaliana]
  misc_feature (19)..(70): Homolog of NCBI NO: 15237873 NR Description: cellulose synthase family [Arabidopsis thaliana]
  misc_feature (220)..(453): Homolog of NCBI NO: 15237873 NR Description: cellulose synthase family [Arabidopsis thaliana]
  misc_feature (417)..(1048): Homolog of NCBI NO: 15237873 NR Description: cellulose synthase family [Arabidopsis thaliana]
  misc_feature (219)..(453): Homolog of NCBI NO: 27372782 NR Description: cellulose synthase-like protein D4 [Populus
  misc_feature (456)..(1048): Homolog of NCBI NO: 27372782 NR Description: cellulose synthase-like protein D4 [Populus
  misc_feature (39)..(85): Homolog of NCBI NO: 15217853 NR Description: cellulose synthase family [Arabidopsis thaliana]
  misc_feature (238)..(453): Homolog of NCBI NO: 15217853 NR Description: cellulose synthase family [Arabidopsis thaliana]
  misc_feature (476)..(1048): Homolog of NCBI NO: 15217853 NR Description: cellulose synthase family [Arabidopsis thaliana]
  misc_feature (220)..(453): Homolog of NCBI NO: 15228448 NR Description: cellulose synthase family [Arabidopsis thaliana]
  misc_feature (417)..(1048): Homolog of NCBI NO: 15228448 NR Description: cellulose synthase family [Arabidopsis thaliana]
  misc_feature (19)..(70): Homolog of NCBI NO: 15237873 NR Description: cellulose synthase family [Arabidopsis thaliana]
  misc_feature (220)..(453): Homolog of NCBI NO: 15237873 NR Description: cellulose synthase family [Arabidopsis thaliana]
  misc_feature (417)..(1048): Homolog of NCBI NO: 15237873 NR Description: cellulose synthase family [Arabidopsis thaliana]

SEQ ID NO: 47978 - protein, 1054 aa, Arabidopsis thaliana; identical to SEQ ID NO: 37225
  peptide (1)..(1054): Ceres Seq. ID no. 13648945
  misc_feature (208)..(442): Homolog of NCBI NO: 27372782 NR Description: cellulose synthase-like protein D4 [Populus
  misc_feature (445)..(1037): Homolog of NCBI NO: 27372782 NR Description: cellulose synthase-like protein D4 [Populus
  misc_feature (28)..(74): Homolog of NCBI NO: 15217853 NR Description: cellulose synthase family [Arabidopsis thaliana]
  misc_feature (227)..(442): Homolog of NCBI NO: 15217853 NR Description: cellulose synthase family [Arabidopsis thaliana]
  misc_feature (465)..(1037): Homolog of NCBI NO: 15217853 NR Description: cellulose synthase family [Arabidopsis thaliana]
  misc_feature (209)..(442): Homolog of NCBI NO: 15228448 NR Description: cellulose synthase family [Arabidopsis thaliana]
  misc_feature (406)..(1037): Homolog of NCBI NO: 15228448 NR Description: cellulose synthase family [Arabidopsis thaliana]
  misc_feature (8)..(59): Homolog of NCBI NO: 15237873 NR Description: cellulose synthase family [Arabidopsis thaliana]
  misc_feature (209)..(442): Homolog of NCBI NO: 15237873 NR Description: cellulose synthase family [Arabidopsis thaliana]
  misc_feature (406)..(1037): Homolog of NCBI NO: 15237873 NR Description: cellulose synthase family [Arabidopsis thaliana]
  misc_feature (208)..(442): Homolog of NCBI NO: 27372782 NR Description: cellulose synthase-like protein D4 [Populus
  misc_feature (445)..(1037): Homolog of NCBI NO: 27372782 NR Description: cellulose synthase-like protein D4 [Populus
  misc_feature (28)..(74): Homolog of NCBI NO: 15217853 NR Description: cellulose synthase family [Arabidopsis thaliana]
  misc_feature (227)..(442): Homolog of NCBI NO: 15217853 NR Description: cellulose synthase family [Arabidopsis thaliana]
  misc_feature (465)..(1037): Homolog of NCBI NO: 15217853 NR Description: cellulose synthase family [Arabidopsis thaliana]
  misc_feature (209)..(442): Homolog of NCBI NO: 15228448 NR Description: cellulose synthase family [Arabidopsis thaliana]
  misc_feature (406)..(1037): Homolog of NCBI NO: 15228448 NR Description: cellulose synthase family [Arabidopsis thaliana]
  misc_feature (8)..(59): Homolog of NCBI NO: 15237873 NR Description: cellulose synthase family [Arabidopsis thaliana]
  misc_feature (209)..(442): Homolog of NCBI NO: 15237873 NR Description: cellulose synthase family [Arabidopsis thaliana]
  misc_feature (406)..(1037): Homolog of NCBI NO: 15237873 NR Description: cellulose synthase family [Arabidopsis thaliana]
  misc_feature (208)..(442): Homolog of NCBI NO: 27372782 NR Description: cellulose synthase-like protein D4 [Populus
  misc_feature (445)..(1037): Homolog of NCBI NO: 27372782 NR Description: cellulose synthase-like protein D4 [Populus
  misc_feature (28)..(74): Homolog of NCBI NO: 15217853 NR Description: cellulose synthase family [Arabidopsis thaliana]
  misc_feature (227)..(442): Homolog of NCBI NO: 15217853 NR Description: cellulose synthase family [Arabidopsis thaliana]
  misc_feature (465)..(1037): Homolog of NCBI NO: 15217853 NR Description: cellulose synthase family [Arabidopsis thaliana]
  misc_feature (209)..(442): Homolog of NCBI NO: 15228448 NR Description: cellulose synthase family [Arabidopsis thaliana]
  misc_feature (406)..(1037): Homolog of NCBI NO: 15228448 NR Description: cellulose synthase family [Arabidopsis thaliana]
  misc_feature (8)..(59): Homolog of NCBI NO: 15237873 NR Description: cellulose synthase family [Arabidopsis thaliana]
  misc_feature (209)..(442): Homolog of NCBI NO: 15237873 NR Description: cellulose synthase family [Arabidopsis thaliana]
  misc_feature (406)..(1037): Homolog of NCBI NO: 15237873 NR Description: cellulose synthase family [Arabidopsis thaliana]

SEQ ID NO: 47979 - protein, 959 aa, Arabidopsis thaliana; identical to SEQ ID NO: 37226
  peptide (1)..(959): Ceres Seq. ID no. 13648946
  misc_feature (618)..(944): Homolog of NCBI NO: 28973666 NR Description: unknown protein [Arabidopsis thaliana]
  misc_feature (618)..(944): Homolog of NCBI NO: 15233733 NR Description: cellulose synthase family [Arabidopsis thaliana]
  misc_feature (113)..(347): Homolog of NCBI NO: 27372782 NR Description: cellulose synthase-like protein D4 [Populus
  misc_feature (350)..(942): Homolog of NCBI NO: 27372782 NR Description: cellulose synthase-like protein D4 [Populus
  misc_feature (132)..(347): Homolog of NCBI NO: 15217853 NR Description: cellulose synthase family [Arabidopsis thaliana]
  misc_feature (370)..(942): Homolog of NCBI NO: 15217853 NR Description: cellulose synthase family [Arabidopsis thaliana]
  misc_feature (114)..(347): Homolog of NCBI NO: 15228448 NR Description: cellulose synthase family [Arabidopsis thaliana]
  misc_feature (311)..(942): Homolog of NCBI NO: 15228448 NR Description: cellulose synthase family [Arabidopsis thaliana]
  misc_feature (114)..(347): Homolog of NCBI NO: 15237873 NR Description: cellulose synthase family [Arabidopsis thaliana]
  misc_feature (311)..(942): Homolog of NCBI NO: 15237873 NR Description: cellulose synthase family [Arabidopsis thaliana]
  misc_feature (618)..(944): Homolog of NCBI NO: 28973666 NR Description: unknown protein [Arabidopsis thaliana]
  misc_feature (618)..(944): Homolog of NCBI NO: 15233733 NR Description: cellulose synthase family [Arabidopsis thaliana]
  misc_feature (113)..(347): Homolog of NCBI NO: 27372782 NR Description: cellulose synthase-like protein D4 [Populus
  misc_feature (350)..(942): Homolog of NCBI NO: 27372782 NR Description: cellulose synthase-like protein D4 [Populus
  misc_feature (132)..(347): Homolog of NCBI NO: 15217853 NR Description: cellulose synthase family [Arabidopsis thaliana]
  misc_feature (370)..(942): Homolog of NCBI NO: 15217853 NR Description: cellulose synthase family [Arabidopsis thaliana]
  misc_feature (114)..(347): Homolog of NCBI NO: 15228448 NR Description: cellulose synthase family [Arabidopsis thaliana]
  misc_feature (311)..(942): Homolog of NCBI NO: 15228448 NR Description: cellulose synthase family [Arabidopsis thaliana]
  misc_feature (114)..(347): Homolog of NCBI NO: 15237873 NR Description: cellulose synthase family [Arabidopsis thaliana]
  misc_feature (311)..(942): Homolog of NCBI NO: 15237873 NR Description: cellulose synthase family [Arabidopsis thaliana]
  misc_feature (618)..(944): Homolog of NCBI NO: 28973666 NR Description: unknown protein [Arabidopsis thaliana]
  misc_feature (618)..(944): Homolog of NCBI NO: 15233733 NR Description: cellulose synthase family [Arabidopsis thaliana]
  misc_feature (113)..(347): Homolog of NCBI NO: 27372782 NR Description: cellulose synthase-like protein D4 [Populus
  misc_feature (350)..(942): Homolog of NCBI NO: 27372782 NR Description: cellulose synthase-like protein D4 [Populus
  misc_feature (132)..(347): Homolog of NCBI NO: 15217853 NR Description: cellulose synthase family [Arabidopsis thaliana]
  misc_feature (370)..(942): Homolog of NCBI NO: 15217853 NR Description: cellulose synthase family [Arabidopsis thaliana]
  misc_feature (114)..(347): Homolog of NCBI NO: 15228448 NR Description: cellulose synthase family [Arabidopsis thaliana]
  misc_feature (311)..(942): Homolog of NCBI NO: 15228448 NR Description: cellulose synthase family [Arabidopsis thaliana]
  misc_feature (114)..(347): Homolog of NCBI NO: 15237873 NR Description: cellulose synthase family [Arabidopsis thaliana]
  misc_feature (311)..(942): Homolog of NCBI NO: 15237873 NR Description: cellulose synthase family [Arabidopsis thaliana]

SEQ ID NO: 47980 - DNA, 1050 bp, Arabidopsis thaliana
  misc_feature (1)..(1050): Ceres Seq. ID no. 13649040
  misc_feature: MA Experiment ID: 20000169 Result: Up-regulated in Transcription
  misc_feature: MA Experiment 20000169 PARAMETER Experiment Name: At_100uM_ABA_P Parameter: Age (day) Value: 14
  misc_feature: MA Experiment 20000169 PARAMETER Experiment Name: At_100uM_ABA_P Parameter: Organism Value: A. thaliana
  misc_feature: MA Experiment 20000169 PARAMETER Experiment Name: At_100uM_ABA_P Parameter: Plant Line Value: WS
  misc_feature: MA Experiment 20000169 PARAMETER Experiment Name: At_100uM_ABA_P Parameter: Timepoint (hr) Value: 6
  misc_feature: MA Experiment 20000169 PARAMETER Experiment Name: At_100uM_ABA_P Parameter: Tissue Value: Aerial
  misc_feature: MA Experiment 20000169 PARAMETER Experiment Name: At_100uM_ABA_P Parameter: Treatment Value: 100uM ABA vs. No Treatment
  misc_feature: MA Experiment ID: 20000173 Result: Up-regulated in Transcription
  misc_feature: MA Experiment 20000173 PARAMETER Experiment Name: At_42deg_Heat_P Parameter: Age (day) Value: 14
  misc_feature: MA Experiment 20000173 PARAMETER Experiment Name: At_42deg_Heat_P Parameter: Organism Value: A. thaliana
  misc_feature: MA Experiment 20000173 PARAMETER Experiment Name: At_42deg_Heat_P Parameter: Plant Line Value: WS
  misc_feature: MA Experiment 20000173 PARAMETER Experiment Name: At_42deg_Heat_P Parameter: Temperature (deg C) Value: 42 vs. 22
  misc_feature: MA Experiment 20000173 PARAMETER Experiment Name: At_42deg_Heat_P Parameter: Timepoint (hr) Value: 6
  misc_feature: MA Experiment 20000173 PARAMETER Experiment Name: At_42deg_Heat_P Parameter: Tissue Value: Aerial
  misc_feature: MA Experiment ID: 20000185 Result: Down-regulated in Transcription
  misc_feature: MA Experiment 20000185 PARAMETER Experiment Name: At_Roots__P Parameter: Age (day) Value: 7 vs. 21
  misc_feature: MA Experiment 20000185 PARAMETER Experiment Name: At_Roots__P Parameter: Organism Value: A. thaliana
  misc_feature: MA Experiment 20000185 PARAMETER Experiment Name: At_Roots__P Parameter: Tissue Value: Roots vs. Whole Plant
  misc_feature: MA Experiment ID: 20000234 Result: Down-regulated in Transcription
  misc_feature: MA Experiment 20000234 PARAMETER Experiment Name: At_Siliques_P Parameter: Age (day) Value: 21
  misc_feature: MA Experiment 20000234 PARAMETER Experiment Name: At_Siliques_P Parameter: Organism Value: A. thaliana
  misc_feature: MA Experiment 20000234 PARAMETER Experiment Name: At_Siliques_P Parameter: Plant Line Value: WS
  misc_feature: MA Experiment 20000234 PARAMETER Experiment Name: At_Siliques_P Parameter: Tissue Value: Less Than 5mm Siliques vs. Whole Plant
  misc_feature: MA Experiment ID: 20000264 Result: Down-regulated in Transcription
  misc_feature: MA Experiment 20000264 PARAMETER Experiment Name: At_Open_Flower_P Parameter: Age (day) Value: 21
  misc_feature: MA Experiment 20000264 PARAMETER Experiment Name: At_Open_Flower_P Parameter: Plant Line Value: WS
  misc_feature: MA Experiment 20000264 PARAMETER Experiment Name: At_Open_Flower_P Parameter: Tissue Value: Open Flower vs. Whole Plant
  misc_feature: MA Experiment ID: 20000265 Result: Down-regulated in Transcription
  misc_feature: MA Experiment 20000265 PARAMETER Experiment Name: At_Open_Flower_P Parameter: Age (day) Value: 21
  misc_feature: MA Experiment 20000265 PARAMETER Experiment Name: At_Open_Flower_P Parameter: Plant Line Value: WS
  misc_feature: MA Experiment 20000265 PARAMETER Experiment Name: At_Open_Flower_P Parameter: Tissue Value: Closed Flower vs. Whole Plant
  misc_feature: MA Experiment ID: 20000267 Result: Up-regulated in Transcription
  misc_feature: MA Experiment 20000267 PARAMETER Experiment Name: At_Drought_P Parameter: Age (day) Value: 7
  misc_feature: MA Experiment 20000267 PARAMETER Experiment Name: At_Drought_P Parameter: Organism Value: A. thaliana
  misc_feature: MA Experiment 20000267 PARAMETER Experiment Name: At_Drought_P Parameter: Plant Line Value: WS
  misc_feature: MA Experiment 20000267 PARAMETER Experiment Name: At_Drought_P Parameter: Timepoint (hr) Value: 6
  misc_feature: MA Experiment 20000267 PARAMETER Experiment Name: At_Drought_P Parameter: Tissue Value: Whole Plant
  misc_feature: MA Experiment 20000267 PARAMETER Experiment Name: At_Drought_P Parameter: Treatment Value: Drought vs. No Drought
  misc_feature: MA Experiment ID: 20000268 Result: Down-regulated in Transcription
  misc_feature: MA Experiment 20000268 PARAMETER Experiment Name: At_100mM_NaCl__P Parameter: Age (day) Value: 14
  misc_feature: MA Experiment 20000268 PARAMETER Experiment Name: At_100mM_NaCl__P Parameter: Organism Value: A. thaliana
  misc_feature: MA Experiment 20000268 PARAMETER Experiment Name: At_100mM_NaCl__P Parameter: Plant Line Value: WS
  misc_feature: MA Experiment 20000268 PARAMETER Experiment Name: At_100mM_NaCl__P Parameter: Timepoint (hr) Value: 6
  misc_feature: MA Experiment 20000268 PARAMETER Experiment Name: At_100mM_NaCl__P Parameter: Tissue Value: Whole Plant
  misc_feature: MA Experiment 20000268 PARAMETER Experiment Name: At_100mM_NaCl__P Parameter: Treatment Value: 100mM NaCl vs. No Treatment
  misc_feature: MA Experiment ID: 20000286 Result: Down-regulated in Transcription
  misc_feature: MA Experiment 20000286 PARAMETER Experiment Name: At_Open_Flower_P Parameter: Age (day) Value: 21
  misc_feature: MA Experiment 20000286 PARAMETER Experiment Name: At_Open_Flower_P Parameter: Plant Line Value: WS
  misc_feature: MA Experiment 20000286 PARAMETER Experiment Name: At_Open_Flower_P Parameter: Tissue Value: Half Open vs. Whole Plant
  misc_feature: MA Experiment ID: 20000308 Result: Down-regulated in Transcription
  misc_feature: MA Experiment 20000308 PARAMETER Experiment Name: At_100mM_NaCl__P Parameter: Age (day) Value: 17
  misc_feature: MA Experiment 20000308 PARAMETER Experiment Name: At_100mM_NaCl__P Parameter: Organism Value: A. thaliana
  misc_feature: MA Experiment 20000308 PARAMETER Experiment Name: At_100mM_NaCl__P Parameter: Plant Line Value: WS
  misc_feature: MA Experiment 20000308 PARAMETER Experiment Name: At_100mM_NaCl__P Parameter: Timepoint (hr) Value: 72
  misc_feature: MA Experiment 20000308 PARAMETER Experiment Name: At_100mM_NaCl__P Parameter: Tissue Value: Whole Plant
  misc_feature: MA Experiment 20000308 PARAMETER Experiment Name: At_100mM_NaCl__P Parameter: Treatment Value: 100mM NaCl vs. No Treatment
  misc_feature: MA Experiment ID: 20000436 Result: Up-regulated in Transcription
  misc_feature: MA Experiment 20000436 PARAMETER Experiment Name: At_Drought_P Parameter: Age (day) Value: 7
  misc_feature: MA Experiment 20000436 PARAMETER Experiment Name: At_Drought_P Parameter: Organism Value: A. thaliana
  misc_feature: MA Experiment 20000436 PARAMETER Experiment Name: At_Drought_P Parameter: Plant Line Value: WS
  misc_feature: MA Experiment 20000436 PARAMETER Experiment Name: At_Drought_P Parameter: Timepoint (hr) Value: 12
  misc_feature: MA Experiment 20000436 PARAMETER Experiment Name: At_Drought_P Parameter: Tissue Value: Whole Plant
  misc_feature: MA Experiment 20000436 PARAMETER Experiment Name: At_Drought_P Parameter: Treatment Value: Drought vs. No Drought
  misc_feature: MA Experiment ID: 20000437 Result: Up-regulated in Transcription
  misc_feature: MA Experiment 20000437 PARAMETER Experiment Name: At_Drought_P Parameter: Age (day) Value: 8
  misc_feature: MA Experiment 20000437 PARAMETER Experiment Name: At_Drought_P Parameter: Organism Value: A. thaliana
  misc_feature: MA Experiment 20000437 PARAMETER Experiment Name: At_Drought_P Parameter: Plant Line Value: WS
  misc_feature: MA Experiment 20000437 PARAMETER Experiment Name: At_Drought_P Parameter: Timepoint (hr) Value: 24
  misc_feature: MA Experiment 20000437 PARAMETER Experiment Name: At_Drought_P Parameter: Tissue Value: Whole Plant
  misc_feature: MA Experiment 20000437 PARAMETER Experiment Name: At_Drought_P Parameter: Treatment Value: Drought vs. No Drought
  misc_feature: MA Experiment ID: 20000438 Result: Down-regulated in Transcription
  misc_feature: MA Experiment 20000438 PARAMETER Experiment Name: At_Shoots__P Parameter: Age (day) Value: 14
  misc_feature: MA Experiment 20000438 PARAMETER Experiment Name: At_Shoots__P Parameter: Tissue Value: Shoots vs. Whole Plant
  misc_feature: MA Experiment ID: 20000441 Result: Up-regulated in Transcription
  misc_feature: MA Experiment 20000441 PARAMETER Experiment Name: At_1uM_BR-BRZ__P Parameter: Tissue Value: Shoot Apices
  misc_feature: MA Experiment 20000441 PARAMETER Experiment Name: At_1uM_BR-BRZ__P Parameter: Treatment Value: 1uM BR vs. No Treatment
  misc_feature: MA Experiment ID: 20000443 Result: Up-regulated in Transcription
  misc_feature: MA Experiment 20000443 PARAMETER Experiment Name: At_1uM_BR-BRZ__P Parameter: Tissue Value: Shoot Apices
  misc_feature: MA Experiment 20000443 PARAMETER Experiment Name: At_1uM_BR-BRZ__P Parameter: Treatment Value: 1uM BRZ vs. No Treatment
  misc_feature: MA Experiment ID: 20000452 Result: Down-regulated in Transcription
  misc_feature: MA Experiment 20000452 PARAMETER Experiment Name: At_CS6879_Shoots-Roots_P Parameter: Age (day) Value: 14
  misc_feature: MA Experiment 20000452 PARAMETER Experiment Name: At_CS6879_Shoots-Roots_P Parameter: Organism Value: A. thaliana
  misc_feature: MA Experiment 20000452 PARAMETER Experiment Name: At_CS6879_Shoots-Roots_P Parameter: Plant Line Value: CS6879 vs. WS
  misc_feature: MA Experiment 20000452 PARAMETER Experiment Name: At_CS6879_Shoots-Roots_P Parameter: Tissue Value: Shoots
  misc_feature: MA Experiment ID: 20000453 Result: Up-regulated in Transcription
  misc_feature: MA Experiment 20000453 PARAMETER Experiment Name: At_100uM_ABA_P Parameter: Age (day) Value: 15
  misc_feature: MA Experiment 20000453 PARAMETER Experiment Name: At_100uM_ABA_P Parameter: Organism Value: A. thaliana
  misc_feature: MA Experiment 20000453 PARAMETER Experiment Name: At_100uM_ABA_P Parameter: Plant Line Value: WS
  misc_feature: MA Experiment 20000453 PARAMETER Experiment Name: At_100uM_ABA_P Parameter: Timepoint (hr) Value: 24
  misc_feature: MA Experiment 20000453 PARAMETER Experiment Name: At_100uM_ABA_P Parameter: Tissue Value: Aerial
  misc_feature: MA Experiment 20000453 PARAMETER Experiment Name: At_100uM_ABA_P Parameter: Treatment Value: 100uM ABA vs. No Treatment
  misc_feature: MA Experiment ID: 20000460 Result: Up-regulated in Transcription
  misc_feature: MA Experiment 20000460 PARAMETER Experiment Name: At_10percent_PEG_P Parameter: Age (day) Value: 12
  misc_feature: MA Experiment 20000460 PARAMETER Experiment Name: At_10percent_PEG_P Parameter: Organism Value: A. thaliana
  misc_feature: MA Experiment 20000460 PARAMETER Experiment Name: At_10percent_PEG_P Parameter: Plant Line Value: WS
  misc_feature: MA Experiment 20000460 PARAMETER Experiment Name: At_10percent_PEG_P Parameter: Timepoint (day) Value: 12
  misc_feature: MA Experiment 20000460 PARAMETER Experiment Name: At_10percent_PEG_P Parameter: Tissue Value: Whole Plant
  misc_feature: MA Experiment 20000460 PARAMETER Experiment Name: At_10percent_PEG_P Parameter: Treatment Value: 10percent PEG vs. No Treatment
  misc_feature: MA Experiment ID: 20000527 Result: Up-regulated in Transcription
  misc_feature: MA Experiment 20000527 PARAMETER Experiment Name: At_10percent_PEG_P Parameter: Age (day) Value: 20
  misc_feature: MA Experiment 20000527 PARAMETER Experiment Name: At_10percent_PEG_P Parameter: Organism Value: A. thaliana
  misc_feature: MA Experiment 20000527 PARAMETER Experiment Name: At_10percent_PEG_P Parameter: Plant Line Value: WS
  misc_feature: MA Experiment 20000527 PARAMETER Experiment Name: At_10percent_PEG_P Parameter: Timepoint (day) Value: 20
  misc_feature: MA Experiment 20000527 PARAMETER Experiment Name: At_10percent_PEG_P Parameter: Tissue Value: Whole Plant
  misc_feature: MA Experiment 20000527 PARAMETER Experiment Name: At_10percent_PEG_P Parameter: Treatment Value: 10percent PEG vs. No Treatment
  misc_feature: MA Experiment ID: 20000574 Result: Down-regulated in Transcription
  misc_feature: MA Experiment 20000574 PARAMETER Experiment Name: At_100uM_ABA_Mutants__P Parameter: Organism Value: A. thaliana
  misc_feature: MA Experiment 20000574 PARAMETER Experiment Name: At_100uM_ABA_Mutants__P Parameter: Plant Line Value: CS23 vs. Ler wt
  misc_feature: MA Experiment 20000574 PARAMETER Experiment Name: At_100uM_ABA_Mutants__P Parameter: Timepoint (hr) Value: N/A
  misc_feature: MA Experiment 20000574 PARAMETER Experiment Name: At_100uM_ABA_Mutants__P Parameter: Tissue Value: Whole Plant
  misc_feature: MA Experiment 20000574 PARAMETER Experiment Name: At_100uM_ABA_Mutants__P Parameter: Treatment Value: None
  misc_feature: MA Experiment ID: 20000709 Result: Up-regulated in Transcription
  misc_feature: MA Experiment 20000709 PARAMETER Experiment Name: At_15mM_NH4NO3_L-to-H_P Parameter: Age (hr) Value: 14
  misc_feature: MA Experiment 20000709 PARAMETER Experiment Name: At_15mM_NH4NO3_L-to-H_P Parameter: Organism Value: A. thaliana
  misc_feature: MA Experiment 20000709 PARAMETER Experiment Name: At_15mM_NH4NO3_L-to-H_P Parameter: Plant Line Value: WS
  misc_feature: MA Experiment 20000709 PARAMETER Experiment Name: At_15mM_NH4NO3_L-to-H_P Parameter: Timepoint (hr) Value: 4
  misc_feature: MA Experiment 20000709 PARAMETER Experiment Name: At_15mM_NH4NO3_L-to-H_P Parameter: Tissue Value: Aerial
  misc_feature: MA Experiment 20000709 PARAMETER Experiment Name: At_15mM_NH4NO3_L-to-H_P Parameter: Treatment Value: 15mM NH4NO3 vs. 30mM Mannitol
  misc_feature: MA Experiment ID: 20000794 Result: Down-regulated in Transcription
  misc_feature: MA Experiment 20000794 PARAMETER Experiment Name: At_Petals_P Parameter: Age (day) Value: 23-25 days
  misc_feature: MA Experiment 20000794 PARAMETER Experiment Name: At_Petals_P Parameter: Plant Line Value: WS
  misc_feature: MA Experiment 20000794 PARAMETER Experiment Name: At_Petals_P Parameter: Tissue Value: Petals vs. Whole plant
  misc_feature: MA Experiment ID: 20001248 Result: Up-regulated in Transcription
  misc_feature: MA Experiment 20001248 PARAMETER Experiment Name: At_Far-red-induction_P Parameter: Age (day) Value: 7
  misc_feature: MA Experiment 20001248 PARAMETER Experiment Name: At_Far-red-induction_P Parameter: Light Value: Far-red vs. White
  misc_feature: MA Experiment 20001248 PARAMETER Experiment Name: At_Far-red-induction_P Parameter: Organism Value: A. thaliana
  misc_feature: MA Experiment 20001248 PARAMETER Experiment Name: At_Far-red-induction_P Parameter: Plant Line Value: Columbia
  misc_feature: MA Experiment 20001248 PARAMETER Experiment Name: At_Far-red-induction_P Parameter: Timepoint (hr) Value: 4
  misc_feature: MA Experiment 20001248 PARAMETER Experiment Name: At_Far-red-induction_P Parameter: Tissue Value: Whole Plant
  misc_feature: MA Experiment ID: 20001450 Result: Up-regulated in Transcription
  misc_feature: MA Experiment 20001450 PARAMETER Experiment Name: At_Far-red-induction_P Parameter: Age (day) Value: 7
  misc_feature: MA Experiment 20001450 PARAMETER Experiment Name: At_Far-red-induction_P Parameter: Light Value: Far-red vs. White
  misc_feature: MA Experiment 20001450 PARAMETER Experiment Name: At_Far-red-induction_P Parameter: Organism Value: A. thaliana
  misc_feature: MA Experiment 20001450 PARAMETER Experiment Name: At_Far-red-induction_P Parameter: Plant Line Value: Columbia
  misc_feature: MA Experiment 20001450 PARAMETER Experiment Name: At_Far-red-induction_P Parameter: Timepoint (hr) Value: 8
  misc_feature: MA Experiment 20001450 PARAMETER Experiment Name: At_Far-red-induction_P Parameter: Tissue Value: Whole Plant
  misc_feature: MA Experiment ID: 20001451 Result: Up-regulated in Transcription
  misc_feature: MA Experiment 20001451 PARAMETER Experiment Name: At_Far-red-induction_P Parameter: Age (day) Value: 7
  misc_feature: MA Experiment 20001451 PARAMETER Experiment Name: At_Far-red-induction_P Parameter: Light Value: Far-red vs. White
  misc_feature: MA Experiment 20001451 PARAMETER Experiment Name: At_Far-red-induction_P Parameter: Organism Value: A. thaliana
  misc_feature: MA Experiment 20001451 PARAMETER Experiment Name: At_Far-red-induction_P Parameter: Plant Line Value: Columbia
  misc_feature: MA Experiment 20001451 PARAMETER Experiment Name: At_Far-red-induction_P Parameter: Timepoint (hr) Value: 24
  misc_feature: MA Experiment 20001451 PARAMETER Experiment Name: At_Far-red-induction_P Parameter: Tissue Value: Whole Plant
  misc_feature: MA Experiment ID: 20001458 Result: Up-regulated in Transcription
  misc_feature: MA Experiment 20001458 PARAMETER Experiment Name: At_50mM_NH4NO3_L-to-H_P Parameter: Age (day) Value: Undefined
  misc_feature: MA Experiment 20001458 PARAMETER Experiment Name: At_50mM_NH4NO3_L-to-H_P Parameter: Organism Value: Undefined
  misc_feature: MA Experiment 20001458 PARAMETER Experiment Name: At_50mM_NH4NO3_L-to-H_P Parameter: Plant Line Value: Undefined
  misc_feature: MA Experiment 20001458 PARAMETER Experiment Name: At_50mM_NH4NO3_L-to-H_P Parameter: Timepoint (hr) Value: 2
  misc_feature: MA Experiment 20001458 PARAMETER Experiment Name: At_50mM_NH4NO3_L-to-H_P Parameter: Tissue Value: Siliques
  misc_feature: MA Experiment 20001458 PARAMETER Experiment Name: At_50mM_NH4NO3_L-to-H_P Parameter: Treatment Value: 50mM NH4NO3 vs. 100mM Manitol
  misc_feature: MA Experiment ID: 20001555 Result: Up-regulated in Transcription
  misc_feature: MA Experiment 20001555 PARAMETER Experiment Name: At_Drought_Soil_Dry_P Parameter: Age (day) Value: 24
  misc_feature: MA Experiment 20001555 PARAMETER Experiment Name: At_Drought_Soil_Dry_P Parameter: Organism Value: A. thaliana
  misc_feature: MA Experiment 20001555 PARAMETER Experiment Name: At_Drought_Soil_Dry_P Parameter: Plant Line Value: WS
  misc_feature: MA Experiment 20001555 PARAMETER Experiment Name: At_Drought_Soil_Dry_P Parameter: Post Timepoint (hr) Value: None
  misc_feature: MA Experiment 20001555 PARAMETER Experiment Name: At_Drought_Soil_Dry_P Parameter: Post-Treatment Value: None
  misc_feature: MA Experiment 20001555 PARAMETER Experiment Name: At_Drought_Soil_Dry_P Parameter: Timepoint (day) Value: 10
  misc_feature: MA Experiment 20001555 PARAMETER Experiment Name: At_Drought_Soil_Dry_P Parameter: Treatment Value: Drought vs. No Drought
  misc_feature: MA Experiment ID: 20001556 Result: Up-regulated in Transcription
  misc_feature: MA Experiment 20001556 PARAMETER Experiment Name: At_Drought_Soil_Dry_P Parameter: Age (day) Value: 26
  misc_feature: MA Experiment 20001556 PARAMETER Experiment Name: At_Drought_Soil_Dry_P Parameter: Organism Value: A. thaliana
  misc_feature: MA Experiment 20001556 PARAMETER Experiment Name: At_Drought_Soil_Dry_P Parameter: Plant Line Value: WS
  misc_feature: MA Experiment 20001556 PARAMETER Experiment Name: At_Drought_Soil_Dry_P Parameter: Post Timepoint (hr) Value: None
  misc_feature: MA Experiment 20001556 PARAMETER Experiment Name: At_Drought_Soil_Dry_P Parameter: Post-Treatment Value: None
  misc_feature: MA Experiment 20001556 PARAMETER Experiment Name: At_Drought_Soil_Dry_P Parameter: Timepoint (day) Value: 12
  misc_feature: MA Experiment 20001556 PARAMETER Experiment Name: At_Drought_Soil_Dry_P Parameter: Treatment Value: Drought vs. No Drought
  misc_feature: MA Experiment ID: 20001557 Result: Up-regulated in Transcription
  misc_feature: MA Experiment 20001557 PARAMETER Experiment Name: At_Drought_Soil_Dry_P Parameter: Age (day) Value: 27
  misc_feature: MA Experiment 20001557 PARAMETER Experiment Name: At_Drought_Soil_Dry_P Parameter: Organism Value: A. thaliana
  misc_feature: MA Experiment 20001557 PARAMETER Experiment Name: At_Drought_Soil_Dry_P Parameter: Plant Line Value: WS
  misc_feature: MA Experiment 20001557 PARAMETER Experiment Name: At_Drought_Soil_Dry_P Parameter: Post Timepoint (hr) Value: 3
  misc_feature: MA Experiment 20001557 PARAMETER Experiment Name: At_Drought_Soil_Dry_P Parameter: Post-Treatment Value: Re-Water vs. No Drought
  misc_feature: MA Experiment 20001557 PARAMETER Experiment Name: At_Drought_Soil_Dry_P Parameter: Timepoint (day) Value: 13
  misc_feature: MA Experiment 20001557 PARAMETER Experiment Name: At_Drought_Soil_Dry_P Parameter: Treatment Value: Drought vs. No Drought
  misc_feature: MA Experiment ID: 20001558 Result: Up-regulated in Transcription
  misc_feature: MA Experiment 20001558 PARAMETER Experiment Name: At_Drought_Soil_Dry_P Parameter: Age (day) Value: 27
  misc_feature: MA Experiment 20001558 PARAMETER Experiment Name: At_Drought_Soil_Dry_P Parameter: Organism Value: A. thaliana
  misc_feature: MA Experiment 20001558 PARAMETER Experiment Name: At_Drought_Soil_Dry_P Parameter: Plant Line Value: WS
  misc_feature: MA Experiment 20001558 PARAMETER Experiment Name: At_Drought_Soil_Dry_P Parameter: Post Timepoint (hr) Value: 6
  misc_feature: MA Experiment 20001558 PARAMETER Experiment Name: At_Drought_Soil_Dry_P Parameter: Post-Treatment Value: Re-Water vs. No Drought
  misc_feature: MA Experiment 20001558 PARAMETER Experiment Name: At_Drought_Soil_Dry_P Parameter: Timepoint (day) Value: 13
  misc_feature: MA Experiment 20001558 PARAMETER Experiment Name: At_Drought_Soil_Dry_P Parameter: Treatment Value: Drought vs. No Drought
  misc_feature: MA Experiment ID: 20001560 Result: Up-regulated in Transcription
  misc_feature: MA Experiment 20001560 PARAMETER Experiment Name: At_Drought_Soil_Dry_P Parameter: Age (day) Value: 28
  misc_feature: MA Experiment 20001560 PARAMETER Experiment Name: At_Drought_Soil_Dry_P Parameter: Organism Value: A. thaliana
  misc_feature: MA Experiment 20001560 PARAMETER Experiment Name: At_Drought_Soil_Dry_P Parameter: Plant Line Value: WS
  misc_feature: MA Experiment 20001560 PARAMETER Experiment Name: At_Drought_Soil_Dry_P Parameter: Post Timepoint (hr) Value: None
  misc_feature: MA Experiment 20001560 PARAMETER Experiment Name: At_Drought_Soil_Dry_P Parameter: Post-Treatment Value: None
  misc_feature: MA Experiment 20001560 PARAMETER Experiment Name: At_Drought_Soil_Dry_P Parameter: Timepoint (day) Value: 14
  misc_feature: MA Experiment 20001560 PARAMETER Experiment Name: At_Drought_Soil_Dry_P Parameter: Treatment Value: Drought vs. No Drought
  misc_feature: MA Experiment ID: 20001762 Result: Up-regulated in Transcription
  misc_feature: MA Experiment 20001762 PARAMETER Experiment Name: At_50mM_NH4NO3_L-to-H_P Parameter: Timepoint (hr) Value: 6
  misc_feature: MA Experiment 20001762 PARAMETER Experiment Name: At_50mM_NH4NO3_L-to-H_P Parameter: Tissue Value: Siliques
  misc_feature: MA Experiment 20001762 PARAMETER Experiment Name: At_50mM_NH4NO3_L-to-H_P Parameter: Treatment Value: 50mM NH4NO3 vs 100mM Mannitol
  misc_feature: MA Experiment ID: 20001770 Result: Up-regulated in Transcription
  misc_feature: MA Experiment 20001770 PARAMETER Experiment Name: At_Far-red-enriched-adult_P Parameter: Age (day) Value: 28
  misc_feature: MA Experiment 20001770 PARAMETER Experiment Name: At_Far-red-enriched-adult_P Parameter: Light Value: Far-red enriched vs. White
  misc_feature: MA Experiment 20001770 PARAMETER Experiment Name: At_Far-red-enriched-adult_P Parameter: Organism Value: A. thaliana
  misc_feature: MA Experiment 20001770 PARAMETER Experiment Name: At_Far-red-enriched-adult_P Parameter: Plant Line Value: Columbia
  misc_feature: MA Experiment 20001770 PARAMETER Experiment Name: At_Far-red-enriched-adult_P Parameter: Timepoint (hr) Value: 8
  misc_feature: MA Experiment 20001770 PARAMETER Experiment Name: At_Far-red-enriched-adult_P Parameter: Tissue Value: Aerial
  misc_feature: MA Experiment ID: 20001773 Result: Down-regulated in Transcription
  misc_feature: MA Experiment 20001773 PARAMETER Experiment Name: At_Far-red-enriched-adult_P Parameter: Age (day) Value: 30
  misc_feature: MA Experiment 20001773 PARAMETER Experiment Name: At_Far-red-enriched-adult_P Parameter: Light Value: Far-red enriched vs. White
  misc_feature: MA Experiment 20001773 PARAMETER Experiment Name: At_Far-red-enriched-adult_P Parameter: Organism Value: A. thaliana
  misc_feature: MA Experiment 20001773 PARAMETER Experiment Name: At_Far-red-enriched-adult_P Parameter: Plant Line Value: Columbia
  misc_feature: MA Experiment 20001773 PARAMETER Experiment Name: At_Far-red-enriched-adult_P Parameter: Timepoint (hr) Value: 48
  misc_feature: MA Experiment 20001773 PARAMETER Experiment Name: At_Far-red-enriched-adult_P Parameter: Tissue Value: Aerial
  misc_feature: MA Experiment ID: 20001774 Result: Down-regulated in Transcription
  misc_feature: MA Experiment 20001774 PARAMETER Experiment Name: At_Far-red-enriched-adult_P Parameter: Age (day) Value: 31
  misc_feature: MA Experiment 20001774 PARAMETER Experiment Name: At_Far-red-enriched-adult_P Parameter: Light Value: Far-red enriched vs. White
  misc_feature: MA Experiment 20001774 PARAMETER Experiment Name: At_Far-red-enriched-adult_P Parameter: Organism Value: A. thaliana
  misc_feature: MA Experiment 20001774 PARAMETER Experiment Name: At_Far-red-enriched-adult_P Parameter: Plant Line Value: Columbia
  misc_feature: MA Experiment 20001774 PARAMETER Experiment Name: At_Far-red-enriched-adult_P Parameter: Timepoint (hr) Value: 72
  misc_feature: MA Experiment 20001774 PARAMETER Experiment Name: At_Far-red-enriched-adult_P Parameter: Tissue Value: Aerial
  misc_feature: MA Experiment ID: 20001907 Result: Down-regulated in Transcription
  misc_feature: MA Experiment 20001907 PARAMETER Experiment Name: At_Drought_Reproduction_P Parameter: Age (day) Value: 37
  misc_feature: MA Experiment 20001907 PARAMETER Experiment Name: At_Drought_Reproduction_P Parameter: Organism Value: A. thaliana
  misc_feature: MA Experiment 20001907 PARAMETER Experiment Name: At_Drought_Reproduction_P Parameter: Plant Line Value: WS
  misc_feature: MA Experiment 20001907 PARAMETER Experiment Name: At_Drought_Reproduction_P Parameter: Timepoint (day) Value: 7
  misc_feature: MA Experiment 20001907 PARAMETER Experiment Name: At_Drought_Reproduction_P Parameter: Tissue Value: Siliques
  misc_feature: MA Experiment 20001907 PARAMETER Experiment Name: At_Drought_Reproduction_P Parameter: Treatment Value: Drought vs. No Drought
gacaaaccaatctaactcaatacaagaatatctacaatctctagaaaatggcgatcacttacttgcttcctctgtttctttctcttatcatcacctcctctgtttcagctaatttccaaagagacgttgagatcacttggggtgatggtcgtggacagatcaagaacaatggagagcttctcactttatctctagataaatcctctggttctggattccaatccaaaaacgagtacttgtttggtaaagtctccatgcaaatgaagcttgtccctggaaactccgcaggaacagtcacaacactttacttgaaatcacctggaacaacatgggacgagatagatttcgagtttttagggaattcaagtggagaaccttacacacttcacacaaatgtctacacacaaggcaaaggagacaaagaacaacaattcaaactctggtttgatccaacagctaatttccacacttacactattctctggaacccacaaagaatcattttcaccgtcgatggaactccgatcagagaattcaagaacatggagtctctaggcactctgtttcccaagaacaaaccaatgagaatgtactcgagtctttggaacgctgatgattgggcaacgagaggtggtttggtcaaaaccgattggtctaaagctcctttcactgcttcttaccgtggctttcaacaagaagcttgtgtttggtcaaacggcaagtcttcttgtcctaatgcctcgaaacaggggactactactggctcgtggttgtcacaagagcttgactcaacagctcaacaaaggatgagatgggtgcagaggaactacatgatctataattattgtacggatgcgaagaggttccctcaaggtcttcctaaagagtgcttagctgcatagagagagtaaagagttgagagaggaacaagattttatttttctttgtggttataaaattctattcattttattgtagatcacgtgaattttattgatttgttttgtagtatactctatagttcgttaaagttataatattctctttgtt

SEQ ID NO: 47981 - protein, 284 aa, Arabidopsis thaliana
  peptide (1)..(284): Ceres Seq. ID no. 13649041
  misc_feature (23)..(204): Pfam Name: Glycosyl hydrolases family 16 Pfam Description: Glycosyl hydrolases family 16
  misc_feature (6)..(283): Homolog of NCBI NO: 3901012 NR Description: xyloglucan endotransglycosylase 1 [Fagus
  misc_feature (9)..(281): Homolog of NCBI NO: 29500893 NR Description: putative xyloglucan endotransglycosylase [Cucumis
  misc_feature (9)..(281): Homolog of NCBI NO: 29500891 NR Description: putative xyloglucan endotransglycosylase [Cucumis
  misc_feature (4)..(284): Homolog of NCBI NO: 17064792 NR Description: xyloglucan endo-1, 4-beta-D-glucanase (XTR-6)
  misc_feature (4)..(284): Homolog of NCBI NO: 15235997 NR Description: xyloglucan endotransglycosylase (XTR-6)
  misc_feature (1)..(284): Homolog of NCBI NO: 15242781 NR Description: xyloglucan endotransglycosylase (TCH4)
MAITYLLPLFLSLIITSSVSANFQRDVEITWGDGRGQIKNNGELLTLSLDKSSGSGFQSKNEYLFGKVSMQMKLVPGNSAGTVTTLYLKSPGTTWDEIDFEFLGNSSGEPYTLHTNVYTQGKGDKEQQFKLWFDPTANFHTYTILWNPQRIIFTVDGTPIREFKNMESLGTLFPKNKPMRMYSSLWNADDWATRGGLVKTDWSKAPFTASYRGFQQEACVWSNGKSSCPNASKQGTTTGSWLSQELDSTAQQRMRWVQRNYMIYNYCTDAKRFPQGLPKECLAA

SEQ ID NO: 47982 - protein, 215 aa, Arabidopsis thaliana
  peptide (1)..(215): Ceres Seq. ID no. 13649042
  misc_feature (1)..(135): Pfam Name: Glycosyl hydrolases family 16 Pfam Description: Glycosyl hydrolases family 16
  misc_feature (1)..(214): Homolog of NCBI NO: 3901012 NR Description: xyloglucan endotransglycosylase 1 [Fagus
  misc_feature (1)..(212): Homolog of NCBI NO: 29500893 NR Description: putative xyloglucan endotransglycosylase [Cucumis
  misc_feature (1)..(212): Homolog of NCBI NO: 29500891 NR Description: putative xyloglucan endotransglycosylase [Cucumis
  misc_feature (1)..(215): Homolog of NCBI NO: 17064792 NR Description: xyloglucan endo-1, 4-beta-D-glucanase (XTR-6)
  misc_feature (1)..(215): Homolog of NCBI NO: 15235997 NR Description: xyloglucan endotransglycosylase (XTR-6)
  misc_feature (1)..(215): Homolog of NCBI NO: 15242781 NR Description: xyloglucan endotransglycosylase (TCH4)
MQMKLVPGNSAGTVTTLYLKSPGTTWDEIDFEFLGNSSGEPYTLHTNVYTQGKGDKEQQFKLWFDPTANFHTYTILWNPQRIIFTVDGTPIREFKNMESLGTLFPKNKPMRMYSSLWNADDWATRGGLVKTDWSKAPFTASYRGFQQEACVWSNGKSSCPNASKQGTTTGSWLSQELDSTAQQRMRWVQRNYMIYNYCTDAKRFPQGLPKECLAA

SEQ ID NO: 47983 - protein, 213 aa, Arabidopsis thaliana
  peptide (1)..(213): Ceres Seq. ID no. 13649043
  misc_feature (1)..(133): Pfam Name: Glycosyl hydrolases family 16 Pfam Description: Glycosyl hydrolases family 16
  misc_feature (1)..(212): Homolog of NCBI NO: 3901012 NR Description: xyloglucan endotransglycosylase 1 [Fagus
  misc_feature (1)..(210): Homolog of NCBI NO: 29500893 NR Description: putative xyloglucan endotransglycosylase [Cucumis
  misc_feature (1)..(210): Homolog of NCBI NO: 29500891 NR Description: putative xyloglucan endotransglycosylase [Cucumis
  misc_feature (1)..(213): Homolog of NCBI NO: 17064792 NR Description: xyloglucan endo-1, 4-beta-D-glucanase (XTR-6)
  misc_feature (1)..(213): Homolog of NCBI NO: 15235997 NR Description: xyloglucan endotransglycosylase (XTR-6)
  misc_feature (1)..(213): Homolog of NCBI NO: 15242781 NR Description: xyloglucan endotransglycosylase (TCH4)
MKLVPGNSAGTVTTLYLKSPGTTWDEIDFEFLGNSSGEPYTLHTNVYTQGKGDKEQQFKLWFDPTANFHTYTILWNPQRIIFTVDGTPIREFKNMESLGTLFPKNKPMRMYSSLWNADDWATRGGLVKTDWSKAPFTASYRGFQQEACVWSNGKSSCPNASKQGTTTGSWLSQELDSTAQQRMRWVQRNYMIYNYCTDAKRFPQGLPKECLAA

SEQ ID NO: 47984 - DNA, 1608 bp, Arabidopsis thaliana
  misc_feature (1)..(1608): Ceres Seq. ID no. 13649586
  misc_feature: MA Experiment ID: 20000171 Result: Down-regulated in Transcription
  misc_feature: MA Experiment 20000171 PARAMETER Experiment Name: At_42deg_Heat_P Parameter: Age (day) Value: 14
  misc_feature: MA Experiment 20000171 PARAMETER Experiment Name: At_42deg_Heat_P Parameter: Organism Value: A. thaliana
  misc_feature: MA Experiment 20000171 PARAMETER Experiment Name: At_42deg_Heat_P Parameter: Plant Line Value: WS
  misc_feature: MA Experiment 20000171 PARAMETER Experiment Name: At_42deg_Heat_P Parameter: Temperature (deg C) Value: 42 vs. 22
  misc_feature: MA Experiment 20000171 PARAMETER Experiment Name: At_42deg_Heat_P Parameter: Timepoint (hr) Value: 1
  misc_feature: MA Experiment 20000171 PARAMETER Experiment Name: At_42deg_Heat_P Parameter: Tissue Value: Aerial
  misc_feature: MA Experiment ID: 20000173 Result: Down-regulated in Transcription
  misc_feature: MA Experiment 20000173 PARAMETER Experiment Name: At_42deg_Heat_P Parameter: Age (day) Value: 14
  misc_feature: MA Experiment 20000173 PARAMETER Experiment Name: At_42deg_Heat_P Parameter: Organism Value: A. thaliana
  misc_feature: MA Experiment 20000173 PARAMETER Experiment Name: At_42deg_Heat_P Parameter: Plant Line Value: WS
  misc_feature: MA Experiment 20000173 PARAMETER Experiment Name: At_42deg_Heat_P Parameter: Temperature (deg C) Value: 42 vs. 22
  misc_feature: MA Experiment 20000173 PARAMETER Experiment Name: At_42deg_Heat_P Parameter: Timepoint (hr) Value: 6
  misc_feature: MA Experiment 20000173 PARAMETER Experiment Name: At_42deg_Heat_P Parameter: Tissue Value: Aerial
  misc_feature: MA Experiment ID: 20000182 Result: Up-regulated in Transcription
  misc_feature: MA Experiment 20000182 PARAMETER Experiment Name: At_2mM_SA_P Parameter: Age (day) Value: 14
  misc_feature: MA Experiment 20000182 PARAMETER Experiment Name: At_2mM_SA_P Parameter: Organism Value: A. thaliana
  misc_feature: MA Experiment 20000182 PARAMETER Experiment Name: At_2mM_SA_P Parameter: Plant Line Value: WS
  misc_feature: MA Experiment 20000182 PARAMETER Experiment Name: At_2mM_SA_P Parameter: Timepoint (hr) Value: 6
  misc_feature: MA Experiment 20000182 PARAMETER Experiment Name: At_2mM_SA_P Parameter: Tissue Value: Aerial
  misc_feature: MA Experiment 20000182 PARAMETER Experiment Name: At_2mM_SA_P Parameter: Treatment Value: 2mM SA vs. No Treatment
  misc_feature: MA Experiment ID: 20000185 Result: Up-regulated in Transcription
  misc_feature: MA Experiment 20000185 PARAMETER Experiment Name: At_Roots__P Parameter: Age (day) Value: 7 vs. 21
  misc_feature: MA Experiment 20000185 PARAMETER Experiment Name: At_Roots__P Parameter: Organism Value: A. thaliana
  misc_feature: MA Experiment 20000185 PARAMETER Experiment Name: At_Roots__P Parameter: Tissue Value: Roots vs. Whole Plant
  misc_feature: MA Experiment ID: 20000227 Result: Up-regulated in Transcription
  misc_feature: MA Experiment 20000227 PARAMETER Experiment Name: At_Root-Tips-vs-Tops_P Parameter: Tissue Value: Root Tips vs. Root Tops
  misc_feature: MA Experiment ID: 20000264 Result: Up-regulated in Transcription
  misc_feature: MA Experiment 20000264 PARAMETER Experiment Name: At_Open_Flower_P Parameter: Age (day) Value: 21
  misc_feature: MA Experiment 20000264 PARAMETER Experiment Name: At_Open_Flower_P Parameter: Plant Line Value: WS
  misc_feature: MA Experiment 20000264 PARAMETER Experiment Name: At_Open_Flower_P Parameter: Tissue Value: Open Flower vs. Whole Plant
  misc_feature: MA Experiment ID: 20000265 Result: Up-regulated in Transcription
  misc_feature: MA Experiment 20000265 PARAMETER Experiment Name: At_Open_Flower_P Parameter: Age (day) Value: 21
  misc_feature: MA Experiment 20000265 PARAMETER Experiment Name: At_Open_Flower_P Parameter: Plant Line Value: WS
  misc_feature: MA Experiment 20000265 PARAMETER Experiment Name: At_Open_Flower_P Parameter: Tissue Value: Closed Flower vs. Whole Plant
  misc_feature: MA Experiment ID: 20000269 Result: Up-regulated in Transcription
  misc_feature: MA Experiment 20000269 PARAMETER Experiment Name: At_1mM_KNO3_L-vs-H_Roots_P Parameter: Age (day) Value: 7,10,12
  misc_feature: MA Experiment 20000269 PARAMETER Experiment Name: At_1mM_KNO3_L-vs-H_Roots_P Parameter: Organism Value: A. thaliana
  misc_feature: MA Experiment 20000269 PARAMETER Experiment Name: At_1mM_KNO3_L-vs-H_Roots_P Parameter: Plant Line Value: WS
  misc_feature: MA Experiment 20000269 PARAMETER Experiment Name: At_1mM_KNO3_L-vs-H_Roots_P Parameter: Timepoint (day) Value: 7,10,12
  misc_feature: MA Experiment 20000269 PARAMETER Experiment Name: At_1mM_KNO3_L-vs-H_Roots_P Parameter: Tissue Value: Roots
  misc_feature: MA Experiment 20000269 PARAMETER Experiment Name: At_1mM_KNO3_L-vs-H_Roots_P Parameter: Treatment Value: 1mM KNO3 vs. 50mM KNO3
  misc_feature: MA Experiment ID: 20000286 Result: Up-regulated in Transcription
  misc_feature: MA Experiment 20000286 PARAMETER Experiment Name: At_Open_Flower_P Parameter: Age (day) Value: 21
  misc_feature: MA Experiment 20000286 PARAMETER Experiment Name: At_Open_Flower_P Parameter: Plant Line Value: WS
  misc_feature: MA Experiment 20000286 PARAMETER Experiment Name: At_Open_Flower_P Parameter: Tissue Value: Half Open vs. Whole Plant
  misc_feature: MA Experiment ID: 20000441 Result: Up-regulated in Transcription
  misc_feature: MA Experiment 20000441 PARAMETER Experiment Name: At_1uM_BR-BRZ__P Parameter: Tissue Value: Shoot Apices
  misc_feature: MA Experiment 20000441 PARAMETER Experiment Name: At_1uM_BR-BRZ__P Parameter: Treatment Value: 1uM BR vs. No Treatment
  misc_feature: MA Experiment ID: 20000443 Result: Up-regulated in Transcription
  misc_feature: MA Experiment 20000443 PARAMETER Experiment Name: At_1uM_BR-BRZ__P Parameter: Tissue Value: Shoot Apices
  misc_feature: MA Experiment 20000443 PARAMETER Experiment Name: At_1uM_BR-BRZ__P Parameter: Treatment Value: 1uM BRZ vs. No Treatment
  misc_feature: MA Experiment ID: 20000445 Result: Up-regulated in Transcription
  misc_feature: MA Experiment 20000445 PARAMETER Experiment Name: At_100uM_NAA__P Parameter: Age (day) Value: 14
  misc_feature: MA Experiment 20000445 PARAMETER Experiment Name: At_100uM_NAA__P Parameter: Organism Value: A. thaliana
  misc_feature: MA Experiment 20000445 PARAMETER Experiment Name: At_100uM_NAA__P Parameter: Plant Line Value: WS
  misc_feature: MA Experiment 20000445 PARAMETER Experiment Name: At_100uM_NAA__P Parameter: Timepoint (hr) Value: 6
  misc_feature: MA Experiment 20000445 PARAMETER Experiment Name: At_100uM_NAA__P Parameter: Tissue Value: Aerial
  misc_feature: MA Experiment 20000445 PARAMETER Experiment Name: At_100uM_NAA__P Parameter: Treatment Value: 100uM NAA vs. No Treatment
  misc_feature: MA Experiment ID: 20000456 Result: Up-regulated in Transcription
  misc_feature: MA Experiment 20000456 PARAMETER Experiment Name: At_100uM_BA_P Parameter: Age (day) Value: 14
  misc_feature: MA Experiment 20000456 PARAMETER Experiment Name: At_100uM_BA_P Parameter: Organism Value: A. thaliana
  misc_feature: MA Experiment 20000456 PARAMETER Experiment Name: At_100uM_BA_P Parameter: Plant Line Value: WS
  misc_feature: MA Experiment 20000456 PARAMETER Experiment Name: At_100uM_BA_P Parameter: Timepoint (hr) Value: 6
  misc_feature: MA Experiment 20000456 PARAMETER Experiment Name: At_100uM_BA_P Parameter: Tissue Value: Aerial
  misc_feature: MA Experiment 20000456 PARAMETER Experiment Name: At_100uM_BA_P Parameter: Treatment Value: 100uM BA vs. No Treatment
  misc_feature: MA Experiment ID: 20000527 Result: Down-regulated in Transcription
  misc_feature: MA Experiment 20000527 PARAMETER Experiment Name: At_10percent_PEG_P Parameter: Age (day) Value: 20
  misc_feature: MA Experiment 20000527 PARAMETER Experiment Name: At_10percent_PEG_P Parameter: Organism Value: A. thaliana
  misc_feature: MA Experiment 20000527 PARAMETER Experiment Name: At_10percent_PEG_P Parameter: Plant Line Value: WS
  misc_feature: MA Experiment 20000527 PARAMETER Experiment Name: At_10percent_PEG_P Parameter: Timepoint (day) Value: 20
  misc_feature: MA Experiment 20000527 PARAMETER Experiment Name: At_10percent_PEG_P Parameter: Tissue Value: Whole Plant
  misc_feature: MA Experiment 20000527 PARAMETER Experiment Name: At_10percent_PEG_P Parameter: Treatment Value: 10percent PEG vs. No Treatment
  misc_feature: MA Experiment ID: 20000573 Result: Up-regulated in Transcription
  misc_feature: MA Experiment 20000573 PARAMETER Experiment Name: At_100uM_ABA_Mutants__P Parameter: Organism Value: A. thaliana
  misc_feature: MA Experiment 20000573 PARAMETER Experiment Name: At_100uM_ABA_Mutants__P Parameter: Plant Line Value: CS22 vs. Ler wt
  misc_feature: MA Experiment 20000573 PARAMETER Experiment Name: At_100uM_ABA_Mutants__P Parameter: Timepoint (hr) Value: N/A
  misc_feature: MA Experiment 20000573 PARAMETER Experiment Name: At_100uM_ABA_Mutants__P Parameter: Tissue Value: Whole Plant
  misc_feature: MA Experiment 20000573 PARAMETER Experiment Name: At_100uM_ABA_Mutants__P Parameter: Treatment Value: None
  misc_feature: MA Experiment ID: 20000574 Result: Up-regulated in Transcription
  misc_feature: MA Experiment 20000574 PARAMETER Experiment Name: At_100uM_ABA_Mutants__P Parameter: Organism Value: A. thaliana
  misc_feature: MA Experiment 20000574 PARAMETER Experiment Name: At_100uM_ABA_Mutants__P Parameter: Plant Line Value: CS23 vs. Ler wt
  misc_feature: MA Experiment 20000574 PARAMETER Experiment Name: At_100uM_ABA_Mutants__P Parameter: Timepoint (hr) Value: N/A
  misc_feature: MA Experiment 20000574 PARAMETER Experiment Name: At_100uM_ABA_Mutants__P Parameter: Tissue Value: Whole Plant
  misc_feature: MA Experiment 20000574 PARAMETER Experiment Name: At_100uM_ABA_Mutants__P Parameter: Treatment Value: None
  misc_feature: MA Experiment ID: 20000606 Result: Up-regulated in Transcription
  misc_feature: MA Experiment 20000606 PARAMETER Experiment Name: At_CS8548_Mutant_P Parameter: Age (day) Value: 14
  misc_feature: MA Experiment 20000606 PARAMETER Experiment Name: At_CS8548_Mutant_P Parameter: Plant Line Value: CS8548 vs. wt
  misc_feature: MA Experiment 20000606 PARAMETER Experiment Name: At_CS8548_Mutant_P Parameter: Tissue Value: Whole Plant
  misc_feature: MA Experiment ID: 20000794 Result: Up-regulated in Transcription
  misc_feature: MA Experiment 20000794 PARAMETER Experiment Name: At_Petals_P Parameter: Age (day) Value: 23-25 days
  misc_feature: MA Experiment 20000794 PARAMETER Experiment Name: At_Petals_P Parameter: Plant Line Value: WS
  misc_feature: MA Experiment 20000794 PARAMETER Experiment Name: At_Petals_P Parameter: Tissue Value: Petals vs. Whole plant
  misc_feature: MA Experiment ID: 20001450 Result: Down-regulated in Transcription
  misc_feature: MA Experiment 20001450 PARAMETER Experiment Name: At_Far-red-induction_P Parameter: Age (day) Value: 7
  misc_feature: MA Experiment 20001450 PARAMETER Experiment Name: At_Far-red-induction_P Parameter: Light Value: Far-red vs. White
  misc_feature: MA Experiment 20001450 PARAMETER Experiment Name: At_Far-red-induction_P Parameter: Organism Value: A. thaliana
  misc_feature: MA Experiment 20001450 PARAMETER Experiment Name: At_Far-red-induction_P Parameter: Plant Line Value: Columbia
  misc_feature: MA Experiment 20001450 PARAMETER Experiment Name: At_Far-red-induction_P Parameter: Timepoint (hr) Value: 8
  misc_feature: MA Experiment 20001450 PARAMETER Experiment Name: At_Far-red-induction_P Parameter: Tissue Value: Whole Plant
  misc_feature: MA Experiment ID: 20001451 Result: Down-regulated in Transcription
  misc_feature: MA Experiment 20001451 PARAMETER Experiment Name: At_Far-red-induction_P Parameter: Age (day) Value: 7
  misc_feature: MA Experiment 20001451 PARAMETER Experiment Name: At_Far-red-induction_P Parameter: Light Value: Far-red vs. White
  misc_feature: MA Experiment 20001451 PARAMETER Experiment Name: At_Far-red-induction_P Parameter: Organism Value: A. thaliana
  misc_feature: MA Experiment 20001451 PARAMETER Experiment Name: At_Far-red-induction_P Parameter: Plant Line Value: Columbia
  misc_feature: MA Experiment 20001451 PARAMETER Experiment Name: At_Far-red-induction_P Parameter: Timepoint (hr) Value: 24
  misc_feature: MA Experiment 20001451 PARAMETER Experiment Name: At_Far-red-induction_P Parameter: Tissue Value: Whole Plant
  misc_feature: MA Experiment ID: 20001554 Result: Down-regulated in Transcription
  misc_feature: MA Experiment 20001554 PARAMETER Experiment Name: At_Drought_Soil_Dry_P Parameter: Age (day) Value: 21
  misc_feature: MA Experiment 20001554 PARAMETER Experiment Name: At_Drought_Soil_Dry_P Parameter: Organism Value: A. thaliana
  misc_feature: MA Experiment 20001554 PARAMETER Experiment Name: At_Drought_Soil_Dry_P Parameter: Plant Line Value: WS
  misc_feature: MA Experiment 20001554 PARAMETER Experiment Name: At_Drought_Soil_Dry_P Parameter: Post Timepoint (hr) Value: None
  misc_feature: MA Experiment 20001554 PARAMETER Experiment Name: At_Drought_Soil_Dry_P Parameter: Post-Treatment Value: None
  misc_feature: MA Experiment 20001554 PARAMETER Experiment Name: At_Drought_Soil_Dry_P Parameter: Timepoint (day) Value: 7
  misc_feature: MA Experiment 20001554 PARAMETER Experiment Name: At_Drought_Soil_Dry_P Parameter: Treatment Value: Drought vs. No Drought
  misc_feature: MA Experiment ID: 20001556 Result: Down-regulated in Transcription
  misc_feature: MA Experiment 20001556 PARAMETER Experiment Name: At_Drought_Soil_Dry_P Parameter: Age (day) Value: 26
  misc_feature: MA Experiment 20001556 PARAMETER Experiment Name: At_Drought_Soil_Dry_P Parameter: Organism Value: A. thaliana
  misc_feature: MA Experiment 20001556 PARAMETER Experiment Name: At_Drought_Soil_Dry_P Parameter: Plant Line Value: WS
  misc_feature: MA Experiment 20001556 PARAMETER Experiment Name: At_Drought_Soil_Dry_P Parameter: Post Timepoint (hr) Value: None
  misc_feature: MA Experiment 20001556 PARAMETER Experiment Name: At_Drought_Soil_Dry_P Parameter: Post-Treatment Value: None
  misc_feature: MA Experiment 20001556 PARAMETER Experiment Name: At_Drought_Soil_Dry_P Parameter: Timepoint (day) Value: 12
  misc_feature: MA Experiment 20001556 PARAMETER Experiment Name: At_Drought_Soil_Dry_P Parameter: Treatment Value: Drought vs. No Drought
  misc_feature: MA Experiment ID: 20001757 Result: Down-regulated in Transcription
  misc_feature: MA Experiment 20001757 PARAMETER Experiment Name: At_50mM_NH4NO3_L-to-H_P Parameter: Timepoint (hr) Value: 6
  misc_feature: MA Experiment 20001757 PARAMETER Experiment Name: At_50mM_NH4NO3_L-to-H_P Parameter: Tissue Value: Leaf
  misc_feature: MA Experiment 20001757 PARAMETER Experiment Name: At_50mM_NH4NO3_L-to-H_P Parameter: Treatment Value: 50mM NH4NO3 vs 100mM Mannitol
  misc_feature: MA Experiment ID: 20001910 Result: Down-regulated in Transcription
  misc_feature: MA Experiment 20001910 PARAMETER Experiment Name: At_Drought_Reproduction_P Parameter: Age (day) Value: 37
  misc_feature: MA Experiment 20001910 PARAMETER Experiment Name: At_Drought_Reproduction_P Parameter: Organism Value: A. thaliana
  misc_feature: MA Experiment 20001910 PARAMETER Experiment Name: At_Drought_Reproduction_P Parameter: Plant Line Value: WS
  misc_feature: MA Experiment 20001910 PARAMETER Experiment Name: At_Drought_Reproduction_P Parameter: Timepoint (day) Value: 7
  misc_feature: MA Experiment 20001910 PARAMETER Experiment Name: At_Drought_Reproduction_P Parameter: Tissue Value: Flowers
  misc_feature: MA Experiment 20001910 PARAMETER Experiment Name: At_Drought_Reproduction_P Parameter: Treatment Value: Drought vs. No Drought
gatcatcttccttcttctcttaagcacaaatggcgactctttatagtcaagttccttctgtatcagcagttttctctctttacacatctttttccgcaatcacgatgctttttcgaacaatcctcaacgagattgtgcctaaaagaatcagagagtacatagctatgaaagctgtagacttcttctcttcttactttcaatctgatttcacttttgtgatagagcaacgttgggagtttgttgagaatcagacgttccgtgctgctgaagtttacttacctacctgtctcgccggactttctacaggcaaacttcttgtgggttcaagtaatcttaagaatccagctgctgagccaaaacttggtatccctgtgaacactaagatcattgataactttgaagggattcatctagaatggactcttcactctgttgaaactaagaagtatctacccgaaaaacggtactttcatttgacatgtaagaaggagtttcgtgagaagataatgacggattacttcacttacttagcgaaatcagcggagaagataatgagccatcgcgagaatctcaagatctatacttataaccaagaccggtctaaatgggaatctgctatcttcgagcatcacacgacctttgagacgttagctgttgagccagacctaaagaagactttgattgacgatcttgatgctttctctaaaggaaaagacttcttcaagagcgtaggacgtgcttggaagcgaggatatcttctttacggtccaccgggaaccgggaagtcttctatggtagctgccattgctaatcatatgaagtatcatatctatgatcttcagattcaaagtgttagagatgatggtgagttgcgggagattcttacttcgaccaagaaccggtcgattcttcttattgaagatattgattgtggagctgatgcttctcgtagacgtcagagtaagaagaaggaagaagatggtggagaagatgatggtgagccacaaaagaggaagaagaagtttgaagttgggatatctttgtctggtctattgaactttgttgatggactttggtcaagttgtggagaagagaaaatcataattttcactactaatcacaaggagaagctcgacccggcgttgcttagaccaggacggatggatgttcatattctcatggacaattgtactccctttgtgttcaagaagcttgtggctttgtaccttaaaaccgatgagcatgtcttgtttgatcccattgagaagctcattcttgaagtgagttcgactcccgctgaagtcacgcagcagctcatggcgagtaagaacgctgatatcgcgcttaaaggccttgctgaattcttggagaacaagaagttgaaaaagggagaagattctagtgtggaggaagagggagagattgaagatgctgagactaaagaagcagaaacataagactttattagaagtaactctagtgtttcagctccttttggtaataaatatcattgctttagaccagatgaaacaaaatgtagctaaaactacatgttgatgtatgaacaattaggggacatagagtctcataaatatatctttcttttat

SEQ ID NO: 47985 - protein, 475 aa, Arabidopsis thaliana
  peptide (1)..(475): Ceres Seq. ID no. 13649587
  misc_feature (241)..(440): Pfam Name: ATPase family associated with various cellular Pfam Description: ATPase family associated with various cellular
  misc_feature (336)..(450): Homolog of NCBI NO: 7485704 NR Description: hypothetical protein F18B3.220 - Arabidopsis
  misc_feature (6)..(316): Homolog of NCBI NO: 7485704 NR Description: hypothetical protein F18B3.220 - Arabidopsis
  misc_feature (424)..(464): Homolog of NCBI NO: 30693378 NR Description: AAA-type ATPase family [Arabidopsis thaliana]
  misc_feature (424)..(464): Homolog of NCBI NO: 21592769 NR Description: BCS1 protein-like protein [Arabidopsis thaliana]
  misc_feature (424)..(464): Homolog of NCBI NO: 7485703 NR Description: hypothetical protein F18B3.210 - Arabidopsis
  misc_feature (6)..(472): Homolog of NCBI NO: 21592769 NR Description: BCS1 protein-like protein [Arabidopsis thaliana]
  misc_feature (6)..(472): Homolog of NCBI NO: 30693378 NR Description: AAA-type ATPase family [Arabidopsis thaliana]
  misc_feature (6)..(472): Homolog of NCBI NO: 7485703 NR Description: hypothetical protein F18B3.210 - Arabidopsis
  misc_feature (1)..(475): Homolog of NCBI NO: 39104583 NR Description: unknown protein [Arabidopsis thaliana]
  misc_feature (1)..(475): Homolog of NCBI NO: 15218579 NR Description: AAA-type ATPase family [Arabidopsis thaliana]
MATLYSQVPSVSAVFSLYTSFSAITMLFRTILNEIVPKRIREYIAMKAVDFFSSYFQSDFTFVIEQRWEFVENQTFRAAEVYLPTCLAGLSTGKLLVGSSNLKNPAAEPKLGIPVNTKIIDNFEGIHLEWTLHSVETKKYLPEKRYFHLTCKKEFREKIMTDYFTYLAKSAEKIMSHRENLKIYTYNQDRSKWESAIFEHHTTFETLAVEPDLKKTLIDDLDAFSKGKDFFKSVGRAWKRGYLLYGPPGTGKSSMVAAIANHMKYHIYDLQIQSVRDDGELREILTSTKNRSILLIEDIDCGADASRRRQSKKKEEDGGEDDGEPQKRKKKFEVGISLSGLLNFVDGLWSSCGEEKIIIFTTNHKEKLDPALLRPGRMDVHILMDNCTPFVFKKLVALYLKTDEHVLFDPIEKLILEVSSTPAEVTQQLMASKNADIALKGLAEFLENKKLKKGEDSSVEEEGEIEDAETKEAET

SEQ ID NO: 47986 - protein, 450 aa, Arabidopsis thaliana
  peptide (1)..(450): Ceres Seq. ID no. 13649588
  misc_feature (216)..(415): Pfam Name: ATPase family associated with various cellular Pfam Description: ATPase family associated with various cellular
  misc_feature (311)..(425): Homolog of NCBI NO: 7485704 NR Description: hypothetical protein F18B3.220 - Arabidopsis
  misc_feature (1)..(291): Homolog of NCBI NO: 7485704 NR Description: hypothetical protein F18B3.220 - Arabidopsis
  misc_feature (399)..(439): Homolog of NCBI NO: 21592769 NR Description: BCS1 protein-like protein [Arabidopsis thaliana]
  misc_feature (399)..(439): Homolog of NCBI NO: 30693378 NR Description: AAA-type ATPase family [Arabidopsis thaliana]
  misc_feature (399)..(439): Homolog of NCBI NO: 7485703 NR Description: hypothetical protein F18B3.210 - Arabidopsis
  misc_feature (1)..(447): Homolog of NCBI NO: 30693378 NR Description: AAA-type ATPase family [Arabidopsis thaliana]
  misc_feature (1)..(447): Homolog of NCBI NO: 21592769 NR Description: BCS1 protein-like protein [Arabidopsis thaliana]
  misc_feature (1)..(447): Homolog of NCBI NO: 7485703 NR Description: hypothetical protein F18B3.210 - Arabidopsis
  misc_feature (1)..(450): Homolog of NCBI NO: 39104583 NR Description: unknown protein [Arabidopsis thaliana]
  misc_feature (1)..(450): Homolog of NCBI NO: 15218579 NR Description: AAA-type ATPase family [Arabidopsis thaliana]
MLFRTILNEIVPKRIREYIAMKAVDFFSSYFQSDFTFVIEQRWEFVENQTFRAAEVYLPTCLAGLSTGKLLVGSSNLKNPAAEPKLGIPVNTKIIDNFEGIHLEWTLHSVETKKYLPEKRYFHLTCKKEFREKIMTDYFTYLAKSAEKIMSHRENLKIYTYNQDRSKWESAIFEHHTTFETLAVEPDLKKTLIDDLDAFSKGKDFFKSVGRAWKRGYLLYGPPGTGKSSMVAAIANHMKYHIYDLQIQSVRDDGELREILTSTKNRSILLIEDIDCGADASRRRQSKKKEEDGGEDDGEPQKRKKKFEVGISLSGLLNFVDGLWSSCGEEKIIIFTTNHKEKLDPALLRPGRMDVHILMDNCTPFVFKKLVALYLKTDEHVLFDPIEKLILEVSSTPAEVTQQLMASKNADIALKGLAEFLENKKLKKGEDSSVEEEGEIEDAETKEAET

SEQ ID NO: 47987 - protein, 430 aa, Arabidopsis thaliana
  peptide (1)..(430): Ceres Seq. ID no. 13649589
  misc_feature (196)..(395): Pfam Name: ATPase family associated with various cellular Pfam Description: ATPase family associated with various cellular
  misc_feature (291)..(405): Homolog of NCBI NO: 7485704 NR Description: hypothetical protein F18B3.220 - Arabidopsis
  misc_feature (1)..(271): Homolog of NCBI NO: 7485704 NR Description: hypothetical protein F18B3.220 - Arabidopsis
  misc_feature (379)..(419): Homolog of NCBI NO: 30693378 NR Description: AAA-type ATPase family [Arabidopsis thaliana]
  misc_feature (379)..(419): Homolog of NCBI NO: 21592769 NR Description: BCS1 protein-like protein [Arabidopsis thaliana]
  misc_feature (379)..(419): Homolog of NCBI NO: 7485703 NR Description: hypothetical protein F18B3.210 - Arabidopsis
  misc_feature (1)..(427): Homolog of NCBI NO: 21592769 NR Description: BCS1 protein-like protein [Arabidopsis thaliana]
  misc_feature (1)..(427): Homolog of NCBI NO: 30693378 NR Description: AAA-type ATPase family [Arabidopsis thaliana]
  misc_feature (1)..(427): Homolog of NCBI NO: 7485703 NR Description: hypothetical protein F18B3.210 - Arabidopsis
  misc_feature (1)..(430): Homolog of NCBI NO: 39104583 NR Description: unknown protein [Arabidopsis thaliana]
  misc_feature (1)..(430): Homolog of NCBI NO: 15218579 NR Description: AAA-type ATPase family [Arabidopsis thaliana]
MKAVDFFSSYFQSDFTFVIEQRWEFVENQTFRAAEVYLPTCLAGLSTGKLLVGSSNLKNPAAEPKLGIPVNTKIIDNFEGIHLEWTLHSVETKKYLPEKRYFHLTCKKEFREKIMTDYFTYLAKSAEKIMSHRENLKIYTYNQDRSKWESAIFEHHTTFETLAVEPDLKKTLIDDLDAFSKGKDFFKSVGRAWKRGYLLYGPPGTGKSSMVAAIANHMKYHIYDLQIQSVRDDGELREILTSTKNRSILLIEDIDCGADASRRRQSKKKEEDGGEDDGEPQKRKKKFEVGISLSGLLNFVDGLWSSCGEEKIIIFTTNHKEKLDPALLRPGRMDVHILMDNCTPFVFKKLVALYLKTDEHVLFDPIEKLILEVSSTPAEVTQQLMASKNADIALKGLAEFLENKKLKKGEDSSVEEEGEIEDAETKEAET

SEQ ID NO: 47988 - DNA, 1901 bp, Arabidopsis thaliana
  misc_feature (1)..(1901): Ceres Seq. ID no. 12663273
  misc_feature: MA Experiment ID: 20000794 Result: Up-regulated in Transcription
  misc_feature: MA Experiment 20000794 PARAMETER Experiment Name: At_Petals_P Parameter: Age (day) Value: 23-25 days
  misc_feature: MA Experiment 20000794 PARAMETER Experiment Name: At_Petals_P Parameter: Plant Line Value: WS
  misc_feature: MA Experiment 20000794 PARAMETER Experiment Name: At_Petals_P Parameter: Tissue Value: Petals vs. Whole plant
  misc_feature: MA Experiment ID: 20001247 Result: Up-regulated in Transcription
  misc_feature: MA Experiment 20001247 PARAMETER Experiment Name: At_Far-red-induction_P Parameter: Age (day) Value: 7
  misc_feature: MA Experiment 20001247 PARAMETER Experiment Name: At_Far-red-induction_P Parameter: Light Value: Far-red vs. White
  misc_feature: MA Experiment 20001247 PARAMETER Experiment Name: At_Far-red-induction_P Parameter: Organism Value: A. thaliana
  misc_feature: MA Experiment 20001247 PARAMETER Experiment Name: At_Far-red-induction_P Parameter: Plant Line Value: Columbia
  misc_feature: MA Experiment 20001247 PARAMETER Experiment Name: At_Far-red-induction_P Parameter: Timepoint (hr) Value: 1
  misc_feature: MA Experiment 20001247 PARAMETER Experiment Name: At_Far-red-induction_P Parameter: Tissue Value: Whole Plant
  misc_feature: MA Experiment ID: 20001450 Result: Up-regulated in Transcription
  misc_feature: MA Experiment 20001450 PARAMETER Experiment Name: At_Far-red-induction_P Parameter: Age (day) Value: 7
  misc_feature: MA Experiment 20001450 PARAMETER Experiment Name: At_Far-red-induction_P Parameter: Light Value: Far-red vs. White
  misc_feature: MA Experiment 20001450 PARAMETER Experiment Name: At_Far-red-induction_P Parameter: Organism Value: A. thaliana
  misc_feature: MA Experiment 20001450 PARAMETER Experiment Name: At_Far-red-induction_P Parameter: Plant Line Value: Columbia
  misc_feature: MA Experiment 20001450 PARAMETER Experiment Name: At_Far-red-induction_P Parameter: Timepoint (hr) Value: 8
  misc_feature: MA Experiment 20001450 PARAMETER Experiment Name: At_Far-red-induction_P Parameter: Tissue Value: Whole Plant
  misc_feature: MA Experiment ID: 20001451 Result: Up-regulated in Transcription
  misc_feature: MA Experiment 20001451 PARAMETER Experiment Name: At_Far-red-induction_P Parameter: Age (day) Value: 7
  misc_feature: MA Experiment 20001451 PARAMETER Experiment Name: At_Far-red-induction_P Parameter: Light Value: Far-red vs. White
  misc_feature: MA Experiment 20001451 PARAMETER Experiment Name: At_Far-red-induction_P Parameter: Organism Value: A. thaliana
  misc_feature: MA Experiment 20001451 PARAMETER Experiment Name: At_Far-red-induction_P Parameter: Plant Line Value: Columbia
  misc_feature: MA Experiment 20001451 PARAMETER Experiment Name: At_Far-red-induction_P Parameter: Timepoint (hr) Value: 24
  misc_feature: MA Experiment 20001451 PARAMETER Experiment Name: At_Far-red-induction_P Parameter: Tissue Value: Whole Plant
gttcagctttctctttccaaaatcaaaagctctccgatcagtttctccggcttaggaaattaattgaaggaaggtgatgagaggtactactgagaatacggatctgttcgatcccaaaacccaaatggatcctgacttcactcgtcatggttcttcctccgacggcgattttggattcgcttttaacgacagtaacttctctgatcgtttgcttcggatcgagatcatgggtggaccttcggattctcggtctgaagttgaagggtgtacgagtatcgctgattgggctcgtcatcgcaagagaagaagagaagatatcaagaaggaatctggtgtcacgatttcagacattgtggcatgtcctgaggagcagattttaactgatgaacaacctgacatggatggatgtcctggtggtgagaatcctgatgatgaaggaggagaggcaatggttgaagaagctttatcaggtgatgaagaggaaacgtctagtgagccaaactggggaatggattgttctacagttgttagggttaaagaacttcatattagttctcctattttagctgccaaaagccctttcttttacaagttgttctccaatggaatgagggaatctgagcaaaggcatgtcacccttaggattaatgcatcagaggaagctgctttgatggagcttttaaactttatgtatagcaatgcggtatctgtcaccacagcacctgccttattagatgtgttgatggctgctgataagtttgaagttgcctcttgtatgaggtactgcagtagacttctccgtaatatgcctatgactccagagtctgccctgctctatctcgagcttccctctagtgttctaatggccaaagctgttcagcctttaactgatgctgcaaaacagttccttgcagcccgctacaaggatattaccaagtttcatgaggaggtaatgtctctacctttggctggaattgaggcaattctatcaagcgatgaactccaaattgcatcagaggatgcagtttatgattttatcttgaagtgggcaagggcgcaatacccttgtttggaagagcgaagagagattctcgggtcacgccttgcactctccatccgcttcccattcatgacatgccgaaagctgaagaaagtgctgacttgcagtgactttgagcatgaaatagcatcaaagcttgttctagaagctcttttcttcaaagcagaagccccacacagacaacgtagcctagcctccgaagaatctgcatccctgaaccgccgcctgatagagagggcttacaaatacagacccgtcaaagtggtcgagtttgagcttcctagaccgcagtgtgtagtctacctagacttgaaaagagaagaatgtgggggactgttcccgtcgggtagagtgtattcgcaggcctttcacttgggaggtcaagggtttttcctgtcagctcactgcaacatggaccaacagagctcgttccactgtttcgggctgttcctagggatgcaggagaaagggtcggtgagtttcggagtggactatgaattctcggcaaggtcaaagcccgcagaggatttcataagcaaatacaaagggaactacacattcacaggagggaaagcagtaggttacagaaacctgtttggggtcccatggacgtcttttatagcggaagatagtcaatacttcatcaatggcattctccatctcagagcagagcttaccatcaaaaggcttgaagaagactaataaagcttataaaagtaaggttaaaaacgtttcgacgacaacgttataagaagaatgtaaatgcgttctttttttctatctacccttactcttttggctttggattataagtttaactcttcaatgaaattcttagcgt

SEQ ID NO: 47989 - protein, 561 aa, Arabidopsis thaliana
  peptide (1)..(561): Ceres Seq. ID no. 12663274
  misc_feature (138)..(245): Pfam Name: BTB/POZ domain Pfam Description: BTB/POZ domain
  misc_feature (144)..(381): Homolog of NCBI NO: 21728394 NR Description: actinfilin [Rattus norvegicus]
  misc_feature (144)..(381): Homolog of NCBI NO: 38194229 NR Description: actinfilin [Homo sapiens]
  misc_feature (283)..(527): Homolog of NCBI NO: 27948452 NR Description: GAMYB-binding protein [Hordeum vulgare subsp.
  misc_feature (26)..(556): Homolog of NCBI NO: 15234082 NR Description: hypothetical protein; protein id: At4g01160.1
  misc_feature (17)..(557): Homolog of NCBI NO: 21536778 NR Description: unknown [Arabidopsis thaliana]
  misc_feature (17)..(557): Homolog of NCBI NO: 25352317 NR Description: hypothetical protein At2g46260 [imported] -
  misc_feature (1)..(557): Homolog of NCBI NO: 18407023 NR Description: expressed protein
  misc_feature (17)..(557): Homolog of NCBI NO: 11282344 NR Description: hypothetical protein F2A19.200 - Arabidopsis
  misc_feature (1)..(557): Homolog of NCBI NO: 30695452 NR Description: POZ domain protein family [Arabidopsis thaliana]
  misc_feature (1)..(561): Homolog of NCBI NO: 18412063 NR Description: putative protein
MRGTTENTDLFDPKTQMDPDFTRHGSSSDGDFGFAFNDSNFSDRLLRIEIMGGPSDSRSEVEGCTSIADWARHRKRRREDIKKESGVTISDIVACPEEQILTDEQPDMDGCPGGENPDDEGGEAMVEEALSGDEEETSSEPNWGMDCSTVVRVKELHISSPILAAKSPFFYKLFSNGMRESEQRHVTLRINASEEAALMELLNFMYSNAVSVTTAPALLDVLMAADKFEVASCMRYCSRLLRNMPMTPESALLYLELPSSVLMAKAVQPLTDAAKQFLAARYKDITKFHEEVMSLPLAGIEAILSSDELQIASEDAVYDFILKWARAQYPCLEERREILGSRLALSIRFPFMTCRKLKKVLTCSDFEHEIASKLVLEALFFKAEAPHRQRSLASEESASLNRRLIERAYKYRPVKVVEFELPRPQCVVYLDLKREECGGLFPSGRVYSQAFHLGGQGFFLSAHCNMDQQSSFHCFGLFLGMQEKGSVSFGVDYEFSARSKPAEDFISKYKGNYTFTGGKAVGYRNLFGVPWTSFIAEDSQYFINGILHLRAELTIKRLEED

SEQ ID NO: 47990 - protein, 545 aa, Arabidopsis thaliana
  peptide (1)..(545): Ceres Seq. ID no. 12663275
  misc_feature (122)..(229): Pfam Name: BTB/POZ domain Pfam Description: BTB/POZ domain
  misc_feature (128)..(365): Homolog of NCBI NO: 21728394 NR Description: actinfilin [Rattus norvegicus]
  misc_feature (128)..(365): Homolog of NCBI NO: 38194229 NR Description: actinfilin [Homo sapiens]
  misc_feature (267)..(511): Homolog of NCBI NO: 27948452 NR Description: GAMYB-binding protein [Hordeum vulgare subsp.
  misc_feature (10)..(540): Homolog of NCBI NO: 15234082 NR Description: hypothetical protein; protein id: At4g01160.1
  misc_feature (1)..(541): Homolog of NCBI NO: 21536778 NR Description: unknown [Arabidopsis thaliana]
  misc_feature (1)..(541): Homolog of NCBI NO: 25352317 NR Description: hypothetical protein At2g46260 [imported] -
  misc_feature (1)..(541): Homolog of NCBI NO: 18407023 NR Description: expressed protein
  misc_feature (1)..(541): Homolog of NCBI NO: 11282344 NR Description: hypothetical protein F2A19.200 - Arabidopsis
  misc_feature (1)..(541): Homolog of NCBI NO: 30695452 NR Description: POZ domain protein family [Arabidopsis thaliana]
  misc_feature (1)..(545): Homolog of NCBI NO: 18412063 NR Description: putative protein
MDPDFTRHGSSSDGDFGFAFNDSNFSDRLLRIEIMGGPSDSRSEVEGCTSIADWARHRKRRREDIKKESGVTISDIVACPEEQILTDEQPDMDGCPGGENPDDEGGEAMVEEALSGDEEETSSEPNWGMDCSTVVRVKELHISSPILAAKSPFFYKLFSNGMRESEQRHVTLRINASEEAALMELLNFMYSNAVSVTTAPALLDVLMAADKFEVASCMRYCSRLLRNMPMTPESALLYLELPSSVLMAKAVQPLTDAAKQFLAARYKDITKFHEEVMSLPLAGIEAILSSDELQIASEDAVYDFILKWARAQYPCLEERREILGSRLALSIRFPFMTCRKLKKVLTCSDFEHEIASKLVLEALFFKAEAPHRQRSLASEESASLNRRLIERAYKYRPVKVVEFELPRPQCVVYLDLKREECGGLFPSGRVYSQAFHLGGQGFFLSAHCNMDQQSSFHCFGLFLGMQEKGSVSFGVDYEFSARSKPAEDFISKYKGNYTFTGGKAVGYRNLFGVPWTSFIAEDSQYFINGILHLRAELTIKRLEED

SEQ ID NO: 47991 - protein, 511 aa, Arabidopsis thaliana
  peptide (1)..(511): Ceres Seq. ID no. 12663276
  misc_feature (88)..(195): Pfam Name: BTB/POZ domain Pfam Description: BTB/POZ domain
  misc_feature (94)..(331): Homolog of NCBI NO: 21728394 NR Description: actinfilin [Rattus norvegicus]
  misc_feature (94)..(331): Homolog of NCBI NO: 38194229 NR Description: actinfilin [Homo sapiens]
  misc_feature (233)..(477): Homolog of NCBI NO: 27948452 NR Description: GAMYB-binding protein [Hordeum vulgare subsp.
  misc_feature (1)..(506): Homolog of NCBI NO: 15234082 NR Description: hypothetical protein; protein id: At4g01160.1
  misc_feature (1)..(507): Homolog of NCBI NO: 21536778 NR Description: unknown [Arabidopsis thaliana]
  misc_feature (1)..(507): Homolog of NCBI NO: 25352317 NR Description: hypothetical protein At2g46260 [imported] -
  misc_feature (1)..(507): Homolog of NCBI NO: 18407023 NR Description: expressed protein
  misc_feature (1)..(507): Homolog of NCBI NO: 11282344 NR Description: hypothetical protein F2A19.200 - Arabidopsis
  misc_feature (1)..(507): Homolog of NCBI NO: 30695452 NR Description: POZ domain protein family [Arabidopsis thaliana]
  misc_feature (1)..(511): Homolog of NCBI NO: 18412063 NR Description: putative protein
MGGPSDSRSEVEGCTSIADWARHRKRRREDIKKESGVTISDIVACPEEQILTDEQPDMDGCPGGENPDDEGGEAMVEEALSGDEEETSSEPNWGMDCSTVVRVKELHISSPILAAKSPFFYKLFSNGMRESEQRHVTLRINASEEAALMELLNFMYSNAVSVTTAPALLDVLMAADKFEVASCMRYCSRLLRNMPMTPESALLYLELPSSVLMAKAVQPLTDAAKQFLAARYKDITKFHEEVMSLPLAGIEAILSSDELQIASEDAVYDFILKWARAQYPCLEERREILGSRLALSIRFPFMTCRKLKKVLTCSDFEHEIASKLVLEALFFKAEAPHRQRSLASEESASLNRRLIERAYKYRPVKVVEFELPRPQCVVYLDLKREECGGLFPSGRVYSQAFHLGGQGFFLSAHCNMDQQSSFHCFGLFLGMQEKGSVSFGVDYEFSARSKPAEDFISKYKGNYTFTGGKAVGYRNLFGVPWTSFIAEDSQYFINGILHLRAELTIKRLEED

SEQ ID NO: 47992 - DNA, 1346 bp, Arabidopsis thaliana; identical to SEQ ID NO: 42742
  misc_feature (1)..(1346): Ceres Seq. ID no. 13648951
  misc_feature: MA Experiment ID: 20000180 Result: Up-regulated in Transcription
  misc_feature: MA Experiment 20000180 PARAMETER Experiment Name: At_Germinating_Seeds_P Parameter: Age (hr) Value: 24 vs. 0
  misc_feature: MA Experiment 20000180 PARAMETER Experiment Name: At_Germinating_Seeds_P Parameter: Tissue Value: Germinating Seeds
  misc_feature: MA Experiment ID: 20000184 Result: Down-regulated in Transcription
  misc_feature: MA Experiment 20000184 PARAMETER Experiment Name: At_Shoots__P Parameter: Age (day) Value: 7
  misc_feature: MA Experiment 20000184 PARAMETER Experiment Name: At_Shoots__P Parameter: Tissue Value: Shoots vs. Whole Plant
  misc_feature: MA Experiment ID: 20000185 Result: Up-regulated in Transcription
  misc_feature: MA Experiment 20000185 PARAMETER Experiment Name: At_Roots__P Parameter: Age (day) Value: 7 vs. 21
  misc_feature: MA Experiment 20000185 PARAMETER Experiment Name: At_Roots__P Parameter: Organism Value: A. thaliana
  misc_feature: MA Experiment 20000185 PARAMETER Experiment Name: At_Roots__P Parameter: Tissue Value: Roots vs. Whole Plant
  misc_feature: MA Experiment ID: 20000234 Result: Up-regulated in Transcription
  misc_feature: MA Experiment 20000234 PARAMETER Experiment Name: At_Siliques_P Parameter: Age (day) Value: 21
  misc_feature: MA Experiment 20000234 PARAMETER Experiment Name: At_Siliques_P Parameter: Organism Value: A. thaliana
  misc_feature: MA Experiment 20000234 PARAMETER Experiment Name: At_Siliques_P Parameter: Plant Line Value: WS
  misc_feature: MA Experiment 20000234 PARAMETER Experiment Name: At_Siliques_P Parameter: Tissue Value: Less Than 5mm Siliques vs. Whole Plant
  misc_feature: MA Experiment ID: 20000264 Result: Up-regulated in Transcription
  misc_feature: MA Experiment 20000264 PARAMETER Experiment Name: At_Open_Flower_P Parameter: Age (day) Value: 21
  misc_feature: MA Experiment 20000264 PARAMETER Experiment Name: At_Open_Flower_P Parameter: Plant Line Value: WS
  misc_feature: MA Experiment 20000264 PARAMETER Experiment Name: At_Open_Flower_P Parameter: Tissue Value: Open Flower vs. Whole Plant
  misc_feature: MA Experiment ID: 20000265 Result: Up-regulated in Transcription
  misc_feature: MA Experiment 20000265 PARAMETER Experiment Name: At_Open_Flower_P Parameter: Age (day) Value: 21
  misc_feature: MA Experiment 20000265 PARAMETER Experiment Name: At_Open_Flower_P Parameter: Plant Line Value: WS
  misc_feature: MA Experiment 20000265 PARAMETER Experiment Name: At_Open_Flower_P Parameter: Tissue Value: Closed Flower vs. Whole Plant
  misc_feature: MA Experiment ID: 20000286 Result: Up-regulated in Transcription
  misc_feature: MA Experiment 20000286 PARAMETER Experiment Name: At_Open_Flower_P Parameter: Age (day) Value: 21
  misc_feature: MA Experiment 20000286 PARAMETER Experiment Name: At_Open_Flower_P Parameter: Plant Line Value: WS
  misc_feature: MA Experiment 20000286 PARAMETER Experiment Name: At_Open_Flower_P Parameter: Tissue Value: Half Open vs. Whole Plant
  misc_feature: MA Experiment ID: 20000439 Result: Up-regulated in Transcription
  misc_feature: MA Experiment 20000439 PARAMETER Experiment Name: At_Roots__P Parameter: Age (day) Value: 14 vs. 21
  misc_feature: MA Experiment 20000439 PARAMETER Experiment Name: At_Roots__P Parameter: Organism Value: A. thaliana
  misc_feature: MA Experiment 20000439 PARAMETER Experiment Name: At_Roots__P Parameter: Tissue Value: Roots vs. Whole Plant
  misc_feature: MA Experiment ID: 20000794 Result: Up-regulated in Transcription
  misc_feature: MA Experiment 20000794 PARAMETER Experiment Name: At_Petals_P Parameter: Age (day) Value: 23-25 days
  misc_feature: MA Experiment 20000794 PARAMETER Experiment Name: At_Petals_P Parameter: Plant Line Value: WS
  misc_feature: MA Experiment 20000794 PARAMETER Experiment Name: At_Petals_P Parameter: Tissue Value: Petals vs. Whole plant
  misc_feature: MA Experiment ID: 20001450 Result: Down-regulated in Transcription
  misc_feature: MA Experiment 20001450 PARAMETER Experiment Name: At_Far-red-induction_P Parameter: Age (day) Value: 7
  misc_feature: MA Experiment 20001450 PARAMETER Experiment Name: At_Far-red-induction_P Parameter: Light Value: Far-red vs. White
  misc_feature: MA Experiment 20001450 PARAMETER Experiment Name: At_Far-red-induction_P Parameter: Organism Value: A. thaliana
  misc_feature: MA Experiment 20001450 PARAMETER Experiment Name: At_Far-red-induction_P Parameter: Plant Line Value: Columbia
  misc_feature: MA Experiment 20001450 PARAMETER Experiment Name: At_Far-red-induction_P Parameter: Timepoint (hr) Value: 8
  misc_feature: MA Experiment 20001450 PARAMETER Experiment Name: At_Far-red-induction_P Parameter: Tissue Value: Whole Plant
  misc_feature: MA Experiment ID: 20001451 Result: Down-regulated in Transcription
  misc_feature: MA Experiment 20001451 PARAMETER Experiment Name: At_Far-red-induction_P Parameter: Age (day) Value: 7
  misc_feature: MA Experiment 20001451 PARAMETER Experiment Name: At_Far-red-induction_P Parameter: Light Value: Far-red vs. White
  misc_feature: MA Experiment 20001451 PARAMETER Experiment Name: At_Far-red-induction_P Parameter: Organism Value: A. thaliana
  misc_feature: MA Experiment 20001451 PARAMETER Experiment Name: At_Far-red-induction_P Parameter: Plant Line Value: Columbia
  misc_feature: MA Experiment 20001451 PARAMETER Experiment Name: At_Far-red-induction_P Parameter: Timepoint (hr) Value: 24
  misc_feature: MA Experiment 20001451 PARAMETER Experiment Name: At_Far-red-induction_P Parameter: Tissue Value: Whole Plant

SEQ ID NO: 47993 - protein, 292 aa, Arabidopsis thaliana; identical to SEQ ID NO: 42743
  peptide (1)..(292): Ceres Seq. ID no. 13648952
  misc_feature (1)..(98): Pfam Name: Enoyl-CoA hydratase/isomerase family Pfam Description: Enoyl-CoA hydratase/isomerase family
  misc_feature (1)..(98): Pfam Name: Enoyl-CoA hydratase/isomerase family Pfam Description: Enoyl-CoA hydratase/isomerase family
  misc_feature (1)..(276): Homolog of NCBI NO: 22329062 NR Description: 3-hydroxyisobutyryl-coenzyme A hydrolase
  misc_feature (162)..(273): Homolog of NCBI NO: 30695218 NR Description: enoyl-CoA hydratase/isomerase family [Arabidopsis
  misc_feature (1)..(168): Homolog of NCBI NO: 30695218 NR Description: enoyl-CoA hydratase/isomerase family [Arabidopsis
  misc_feature (1)..(267): Homolog of NCBI NO: 15224539 NR Description: 3-hydroxyisobutyryl-coenzyme A hydrolase
  misc_feature (1)..(277): Homolog of NCBI NO: 37536724 NR Description: putative enoyl-CoA-hydratase
  misc_feature (1)..(276): Homolog of NCBI NO: 22329062 NR Description: 3-hydroxyisobutyryl-coenzyme A hydrolase
  misc_feature (1)..(168): Homolog of NCBI NO: 30695218 NR Description: enoyl-CoA hydratase/isomerase family [Arabidopsis
  misc_feature (1)..(277): Homolog of NCBI NO: 37536724 NR Description: putative enoyl-CoA-hydratase
  misc_feature (1)..(291): Homolog of NCBI NO: 30679729 NR Description: 3-hydroxyisobutyryl-coenzyme A hydrolase
  misc_feature (1)..(291): Homolog of NCBI NO: 6692680 NR Description: F12K11.12 [Arabidopsis thaliana]
  misc_feature (1)..(273): Homolog of NCBI NO: 15239206 NR Description: 3-hydroxyisobutyryl-coenzyme A hydrolase
  misc_feature (1)..(267): Homolog of NCBI NO: 15224549 NR Description: 3-hydroxyisobutyryl-coenzyme A hydrolase
  misc_feature (1)..(273): Homolog of NCBI NO: 6014701 NR Description: enoyl-CoA-hydratase [Avicennia marina]
  misc_feature (1)..(267): Homolog of NCBI NO: 15224539 NR Description: 3-hydroxyisobutyryl-coenzyme A hydrolase
  misc_feature (162)..(273): Homolog of NCBI NO: 30695218 NR Description: enoyl-CoA hydratase/isomerase family [Arabidopsis
  misc_feature (1)..(273): Homolog of NCBI NO: 6014701 NR Description: enoyl-CoA-hydratase [Avicennia marina]
  misc_feature (1)..(267): Homolog of NCBI NO: 15224549 NR Description: 3-hydroxyisobutyryl-coenzyme A hydrolase
  misc_feature (1)..(273): Homolog of NCBI NO: 15239206 NR Description: 3-hydroxyisobutyryl-coenzyme A hydrolase
  misc_feature (1)..(291): Homolog of NCBI NO: 6692680 NR Description: F12K11.12 [Arabidopsis thaliana]
  misc_feature (1)..(291): Homolog of NCBI NO: 30679729 NR Description: 3-hydroxyisobutyryl-coenzyme A hydrolase

SEQ ID NO: 47994 - protein, 269 aa, Arabidopsis thaliana; identical to SEQ ID NO: 42744
  peptide (1)..(269): Ceres Seq. ID no. 13648953
  misc_feature (1)..(75): Pfam Name: Enoyl-CoA hydratase/isomerase family Pfam Description: Enoyl-CoA hydratase/isomerase family
  misc_feature (1)..(75): Pfam Name: Enoyl-CoA hydratase/isomerase family Pfam Description: Enoyl-CoA hydratase/isomerase family
  misc_feature (1)..(253): Homolog of NCBI NO: 22329062 NR Description: 3-hydroxyisobutyryl-coenzyme A hydrolase
  misc_feature (139)..(250): Homolog of NCBI NO: 30695218 NR Description: enoyl-CoA hydratase/isomerase family [Arabidopsis
  misc_feature (1)..(145): Homolog of NCBI NO: 30695218 NR Description: enoyl-CoA hydratase/isomerase family [Arabidopsis
  misc_feature (1)..(244): Homolog of NCBI NO: 15224539 NR Description: 3-hydroxyisobutyryl-coenzyme A hydrolase
  misc_feature (1)..(254): Homolog of NCBI NO: 37536724 NR Description: putative enoyl-CoA-hydratase
  misc_feature (1)..(253): Homolog of NCBI NO: 22329062 NR Description: 3-hydroxyisobutyryl-coenzyme A hydrolase
  misc_feature (1)..(145): Homolog of NCBI NO: 30695218 NR Description: enoyl-CoA hydratase/isomerase family [Arabidopsis
  misc_feature (1)..(254): Homolog of NCBI NO: 37536724 NR Description: putative enoyl-CoA-hydratase
  misc_feature (1)..(268): Homolog of NCBI NO: 30679729 NR Description: 3-hydroxyisobutyryl-coenzyme A hydrolase
  misc_feature (1)..(268): Homolog of NCBI NO: 6692680 NR Description: F12K11.12 [Arabidopsis thaliana]
  misc_feature (1)..(250): Homolog of NCBI NO: 15239206 NR Description: 3-hydroxyisobutyryl-coenzyme A hydrolase
  misc_feature (1)..(244): Homolog of NCBI NO: 15224549 NR Description: 3-hydroxyisobutyryl-coenzyme A hydrolase
  misc_feature (1)..(250): Homolog of NCBI NO: 6014701 NR Description: enoyl-CoA-hydratase [Avicennia marina]
  misc_feature (1)..(244): Homolog of NCBI NO: 15224539 NR Description: 3-hydroxyisobutyryl-coenzyme A hydrolase
  misc_feature (139)..(250): Homolog of NCBI NO: 30695218 NR Description: enoyl-CoA hydratase/isomerase family [Arabidopsis
  misc_feature (1)..(250): Homolog of NCBI NO: 6014701 NR Description: enoyl-CoA-hydratase [Avicennia marina]
  misc_feature (1)..(244): Homolog of NCBI NO: 15224549 NR Description: 3-hydroxyisobutyryl-coenzyme A hydrolase
  misc_feature (1)..(250): Homolog of NCBI NO: 15239206 NR Description: 3-hydroxyisobutyryl-coenzyme A hydrolase
  misc_feature (1)..(268): Homolog of NCBI NO: 6692680 NR Description: F12K11.12 [Arabidopsis thaliana]
  misc_feature (1)..(268): Homolog of NCBI NO: 30679729 NR Description: 3-hydroxyisobutyryl-coenzyme A hydrolase

SEQ ID NO: 47995 - protein, 262 aa, Arabidopsis thaliana; identical to SEQ ID NO: 42745
  peptide (1)..(262): Ceres Seq. ID no. 13648954
  misc_feature (1)..(68): Pfam Name: Enoyl-CoA hydratase/isomerase family Pfam Description: Enoyl-CoA hydratase/isomerase family
  misc_feature (1)..(68): Pfam Name: Enoyl-CoA hydratase/isomerase family Pfam Description: Enoyl-CoA hydratase/isomerase family
  misc_feature (1)..(246): Homolog of NCBI NO: 22329062 NR Description: 3-hydroxyisobutyryl-coenzyme A hydrolase
  misc_feature (132)..(243): Homolog of NCBI NO: 30695218 NR Description: enoyl-CoA hydratase/isomerase family [Arabidopsis
  misc_feature (1)..(138): Homolog of NCBI NO: 30695218 NR Description: enoyl-CoA hydratase/isomerase family [Arabidopsis
  misc_feature (1)..(237): Homolog of NCBI NO: 15224539 NR Description: 3-hydroxyisobutyryl-coenzyme A hydrolase
  misc_feature (1)..(247): Homolog of NCBI NO: 37536724 NR Description: putative enoyl-CoA-hydratase
  misc_feature (1)..(246): Homolog of NCBI NO: 22329062 NR Description: 3-hydroxyisobutyryl-coenzyme A hydrolase
  misc_feature (1)..(138): Homolog of NCBI NO: 30695218 NR Description: enoyl-CoA hydratase/isomerase family [Arabidopsis
  misc_feature (1)..(247): Homolog of NCBI NO: 37536724 NR Description: putative enoyl-CoA-hydratase
  misc_feature (1)..(261): Homolog of NCBI NO: 30679729 NR Description: 3-hydroxyisobutyryl-coenzyme A hydrolase
  misc_feature (1)..(261): Homolog of NCBI NO: 6692680 NR Description: F12K11.12 [Arabidopsis thaliana]
  misc_feature (1)..(243): Homolog of NCBI NO: 15239206 NR Description: 3-hydroxyisobutyryl-coenzyme A hydrolase
  misc_feature (1)..(237): Homolog of NCBI NO: 15224549 NR Description: 3-hydroxyisobutyryl-coenzyme A hydrolase
  misc_feature (1)..(243): Homolog of NCBI NO: 6014701 NR Description: enoyl-CoA-hydratase [Avicennia marina]
  misc_feature (1)..(237): Homolog of NCBI NO: 15224539 NR Description: 3-hydroxyisobutyryl-coenzyme A hydrolase
  misc_feature (132)..(243): Homolog of NCBI NO: 30695218 NR Description: enoyl-CoA hydratase/isomerase family [Arabidopsis
  misc_feature (1)..(243): Homolog of NCBI NO: 6014701 NR Description: enoyl-CoA-hydratase [Avicennia marina]
  misc_feature (1)..(237): Homolog of NCBI NO: 15224549 NR Description: 3-hydroxyisobutyryl-coenzyme A hydrolase
  misc_feature (1)..(243): Homolog of NCBI NO: 15239206 NR Description: 3-hydroxyisobutyryl-coenzyme A hydrolase
  misc_feature (1)..(261): Homolog of NCBI NO: 6692680 NR Description: F12K11.12 [Arabidopsis thaliana]
  misc_feature (1)..(261): Homolog of NCBI NO: 30679729 NR Description: 3-hydroxyisobutyryl-coenzyme A hydrolase

SEQ ID NO: 47996 - DNA, 2438 bp, Arabidopsis thaliana
  misc_feature (1)..(2438): Ceres Seq. ID no. 13593104
  misc_feature: MA Experiment ID: 20000171 Result: Up-regulated in Transcription
  misc_feature: MA Experiment 20000171 PARAMETER Experiment Name: At_42deg_Heat_P Parameter: Age (day) Value: 14
  misc_feature: MA Experiment 20000171 PARAMETER Experiment Name: At_42deg_Heat_P Parameter: Organism Value: A. thaliana
  misc_feature: MA Experiment 20000171 PARAMETER Experiment Name: At_42deg_Heat_P Parameter: Plant Line Value: WS
  misc_feature: MA Experiment 20000171 PARAMETER Experiment Name: At_42deg_Heat_P Parameter: Temperature (deg C) Value: 42 vs. 22
  misc_feature: MA Experiment 20000171 PARAMETER Experiment Name: At_42deg_Heat_P Parameter: Timepoint (hr) Value: 1
  misc_feature: MA Experiment 20000171 PARAMETER Experiment Name: At_42deg_Heat_P Parameter: Tissue Value: Aerial
  misc_feature: MA Experiment ID: 20000173 Result: Up-regulated in Transcription
  misc_feature: MA Experiment 20000173 PARAMETER Experiment Name: At_42deg_Heat_P Parameter: Age (day) Value: 14
  misc_feature: MA Experiment 20000173 PARAMETER Experiment Name: At_42deg_Heat_P Parameter: Organism Value: A. thaliana
  misc_feature: MA Experiment 20000173 PARAMETER Experiment Name: At_42deg_Heat_P Parameter: Plant Line Value: WS
  misc_feature: MA Experiment 20000173 PARAMETER Experiment Name: At_42deg_Heat_P Parameter: Temperature (deg C) Value: 42 vs. 22
  misc_feature: MA Experiment 20000173 PARAMETER Experiment Name: At_42deg_Heat_P Parameter: Timepoint (hr) Value: 6
  misc_feature: MA Experiment 20000173 PARAMETER Experiment Name: At_42deg_Heat_P Parameter: Tissue Value: Aerial
  misc_feature: MA Experiment ID: 20000227 Result: Up-regulated in Transcription
  misc_feature: MA Experiment 20000227 PARAMETER Experiment Name: At_Root-Tips-vs-Tops_P Parameter: Tissue Value: Root Tips vs. Root Tops
  misc_feature: MA Experiment ID: 20000234 Result: Up-regulated in Transcription
  misc_feature: MA Experiment 20000234 PARAMETER Experiment Name: At_Siliques_P Parameter: Age (day) Value: 21
  misc_feature: MA Experiment 20000234 PARAMETER Experiment Name: At_Siliques_P Parameter: Organism Value: A. thaliana
  misc_feature: MA Experiment 20000234 PARAMETER Experiment Name: At_Siliques_P Parameter: Plant Line Value: WS
  misc_feature: MA Experiment 20000234 PARAMETER Experiment Name: At_Siliques_P Parameter: Tissue Value: Less Than 5mm Siliques vs. Whole Plant
  misc_feature: MA Experiment ID: 20000264 Result: Up-regulated in Transcription
  misc_feature: MA Experiment 20000264 PARAMETER Experiment Name: At_Open_Flower_P Parameter: Age (day) Value: 21
  misc_feature: MA Experiment 20000264 PARAMETER Experiment Name: At_Open_Flower_P Parameter: Plant Line Value: WS
  misc_feature: MA Experiment 20000264 PARAMETER Experiment Name: At_Open_Flower_P Parameter: Tissue Value: Open Flower vs. Whole Plant
  misc_feature: MA Experiment ID: 20000286 Result: Up-regulated in Transcription
  misc_feature: MA Experiment 20000286 PARAMETER Experiment Name: At_Open_Flower_P Parameter: Age (day) Value: 21
  misc_feature: MA Experiment 20000286 PARAMETER Experiment Name: At_Open_Flower_P Parameter: Plant Line Value: WS
  misc_feature: MA Experiment 20000286 PARAMETER Experiment Name: At_Open_Flower_P Parameter: Tissue Value: Half Open vs. Whole Plant
  misc_feature: MA Experiment ID: 20000439 Result: Up-regulated in Transcription
  misc_feature: MA Experiment 20000439 PARAMETER Experiment Name: At_Roots__P Parameter: Age (day) Value: 14 vs. 21
  misc_feature: MA Experiment 20000439 PARAMETER Experiment Name: At_Roots__P Parameter: Organism Value: A. thaliana
  misc_feature: MA Experiment 20000439 PARAMETER Experiment Name: At_Roots__P Parameter: Tissue Value: Roots vs. Whole Plant
  misc_feature: MA Experiment ID: 20000443 Result: Up-regulated in Transcription
  misc_feature: MA Experiment 20000443 PARAMETER Experiment Name: At_1uM_BR-BRZ__P Parameter: Tissue Value: Shoot Apices
  misc_feature: MA Experiment 20000443 PARAMETER Experiment Name: At_1uM_BR-BRZ__P Parameter: Treatment Value: 1uM BRZ vs. No Treatment
  misc_feature: MA Experiment ID: 20001248 Result: Down-regulated in Transcription
  misc_feature: MA Experiment 20001248 PARAMETER Experiment Name: At_Far-red-induction_P Parameter: Age (day) Value: 7
  misc_feature: MA Experiment 20001248 PARAMETER Experiment Name: At_Far-red-induction_P Parameter: Light Value: Far-red vs. White
  misc_feature: MA Experiment 20001248 PARAMETER Experiment Name: At_Far-red-induction_P Parameter: Organism Value: A. thaliana
  misc_feature: MA Experiment 20001248 PARAMETER Experiment Name: At_Far-red-induction_P Parameter: Plant Line Value: Columbia
  misc_feature: MA Experiment 20001248 PARAMETER Experiment Name: At_Far-red-induction_P Parameter: Timepoint (hr) Value: 4
  misc_feature: MA Experiment 20001248 PARAMETER Experiment Name: At_Far-red-induction_P Parameter: Tissue Value: Whole Plant
  misc_feature: MA Experiment ID: 20001450 Result: Down-regulated in Transcription
  misc_feature: MA Experiment 20001450 PARAMETER Experiment Name: At_Far-red-induction_P Parameter: Age (day) Value: 7
  misc_feature: MA Experiment 20001450 PARAMETER Experiment Name: At_Far-red-induction_P Parameter: Light Value: Far-red vs. White
  misc_feature: MA Experiment 20001450 PARAMETER Experiment Name: At_Far-red-induction_P Parameter: Organism Value: A. thaliana
  misc_feature: MA Experiment 20001450 PARAMETER Experiment Name: At_Far-red-induction_P Parameter: Plant Line Value: Columbia
  misc_feature: MA Experiment 20001450 PARAMETER Experiment Name: At_Far-red-induction_P Parameter: Timepoint (hr) Value: 8
  misc_feature: MA Experiment 20001450 PARAMETER Experiment Name: At_Far-red-induction_P Parameter: Tissue Value: Whole Plant
  misc_feature: MA Experiment ID: 20001451 Result: Down-regulated in Transcription
  misc_feature: MA Experiment 20001451 PARAMETER Experiment Name: At_Far-red-induction_P Parameter: Age (day) Value: 7
  misc_feature: MA Experiment 20001451 PARAMETER Experiment Name: At_Far-red-induction_P Parameter: Light Value: Far-red vs. White
  misc_feature: MA Experiment 20001451 PARAMETER Experiment Name: At_Far-red-induction_P Parameter: Organism Value: A. thaliana
  misc_feature: MA Experiment 20001451 PARAMETER Experiment Name: At_Far-red-induction_P Parameter: Plant Line Value: Columbia
  misc_feature: MA Experiment 20001451 PARAMETER Experiment Name: At_Far-red-induction_P Parameter: Timepoint (hr) Value: 24
  misc_feature: MA Experiment 20001451 PARAMETER Experiment Name: At_Far-red-induction_P Parameter: Tissue Value: Whole Plant
  misc_feature: MA Experiment ID: 20001555 Result: Up-regulated in Transcription
  misc_feature: MA Experiment 20001555 PARAMETER Experiment Name: At_Drought_Soil_Dry_P Parameter: Age (day) Value: 24
  misc_feature: MA Experiment 20001555 PARAMETER Experiment Name: At_Drought_Soil_Dry_P Parameter: Organism Value: A. thaliana
  misc_feature: MA Experiment 20001555 PARAMETER Experiment Name: At_Drought_Soil_Dry_P Parameter: Plant Line Value: WS
  misc_feature: MA Experiment 20001555 PARAMETER Experiment Name: At_Drought_Soil_Dry_P Parameter: Post Timepoint (hr) Value: None
  misc_feature: MA Experiment 20001555 PARAMETER Experiment Name: At_Drought_Soil_Dry_P Parameter: Post-Treatment Value: None
  misc_feature: MA Experiment 20001555 PARAMETER Experiment Name: At_Drought_Soil_Dry_P Parameter: Timepoint (day) Value: 10
  misc_feature: MA Experiment 20001555 PARAMETER Experiment Name: At_Drought_Soil_Dry_P Parameter: Treatment Value: Drought vs. No Drought
  misc_feature: MA Experiment ID: 20001556 Result: Up-regulated in Transcription
  misc_feature: MA Experiment 20001556 PARAMETER Experiment Name: At_Drought_Soil_Dry_P Parameter: Age (day) Value: 26
  misc_feature: MA Experiment 20001556 PARAMETER Experiment Name: At_Drought_Soil_Dry_P Parameter: Organism Value: A. thaliana
  misc_feature: MA Experiment 20001556 PARAMETER Experiment Name: At_Drought_Soil_Dry_P Parameter: Plant Line Value: WS
  misc_feature: MA Experiment 20001556 PARAMETER Experiment Name: At_Drought_Soil_Dry_P Parameter: Post Timepoint (hr) Value: None
  misc_feature: MA Experiment 20001556 PARAMETER Experiment Name: At_Drought_Soil_Dry_P Parameter: Post-Treatment Value: None
  misc_feature: MA Experiment 20001556 PARAMETER Experiment Name: At_Drought_Soil_Dry_P Parameter: Timepoint (day) Value: 12
  misc_feature: MA Experiment 20001556 PARAMETER Experiment Name: At_Drought_Soil_Dry_P Parameter: Treatment Value: Drought vs. No Drought
  misc_feature: MA Experiment ID: 20001557 Result: Up-regulated in Transcription
  misc_feature: MA Experiment 20001557 PARAMETER Experiment Name: At_Drought_Soil_Dry_P Parameter: Age (day) Value: 27
  misc_feature: MA Experiment 20001557 PARAMETER Experiment Name: At_Drought_Soil_Dry_P Parameter: Organism Value: A. thaliana
  misc_feature: MA Experiment 20001557 PARAMETER Experiment Name: At_Drought_Soil_Dry_P Parameter: Plant Line Value: WS
  misc_feature: MA Experiment 20001557 PARAMETER Experiment Name: At_Drought_Soil_Dry_P Parameter: Post Timepoint (hr) Value: 3
  misc_feature: MA Experiment 20001557 PARAMETER Experiment Name: At_Drought_Soil_Dry_P Parameter: Post-Treatment Value: Re-Water vs. No Drought
  misc_feature: MA Experiment 20001557 PARAMETER Experiment Name: At_Drought_Soil_Dry_P Parameter: Timepoint (day) Value: 13
  misc_feature: MA Experiment 20001557 PARAMETER Experiment Name: At_Drought_Soil_Dry_P Parameter: Treatment Value: Drought vs. No Drought
  misc_feature: MA Experiment ID: 20001559 Result: Up-regulated in Transcription
  misc_feature: MA Experiment 20001559 PARAMETER Experiment Name: At_Drought_Soil_Dry_P Parameter: Age (day) Value: 28
  misc_feature: MA Experiment 20001559 PARAMETER Experiment Name: At_Drought_Soil_Dry_P Parameter: Organism Value: A. thaliana
  misc_feature: MA Experiment 20001559 PARAMETER Experiment Name: At_Drought_Soil_Dry_P Parameter: Plant Line Value: WS
  misc_feature: MA Experiment 20001559 PARAMETER Experiment Name: At_Drought_Soil_Dry_P Parameter: Post Timepoint (hr) Value: 29
  misc_feature: MA Experiment 20001559 PARAMETER Experiment Name: At_Drought_Soil_Dry_P Parameter: Post-Treatment Value: Re-Water vs. No Drought
  misc_feature: MA Experiment 20001559 PARAMETER Experiment Name: At_Drought_Soil_Dry_P Parameter: Timepoint (day) Value: 14
  misc_feature: MA Experiment 20001559 PARAMETER Experiment Name: At_Drought_Soil_Dry_P Parameter: Treatment Value: Drought vs. No Drought
  misc_feature: MA Experiment ID: 20001908 Result: Up-regulated in Transcription
  misc_feature: MA Experiment 20001908 PARAMETER Experiment Name: At_Drought_Reproduction_P Parameter: Age (day) Value: 40
  misc_feature: MA Experiment 20001908 PARAMETER Experiment Name: At_Drought_Reproduction_P Parameter: Organism Value: A. thaliana
  misc_feature: MA Experiment 20001908 PARAMETER Experiment Name: At_Drought_Reproduction_P Parameter: Plant Line Value: WS
  misc_feature: MA Experiment 20001908 PARAMETER Experiment Name: At_Drought_Reproduction_P Parameter: Timepoint (day) Value: 10
  misc_feature: MA Experiment 20001908 PARAMETER Experiment Name: At_Drought_Reproduction_P Parameter: Tissue Value: Siliques
  misc_feature: MA Experiment 20001908 PARAMETER Experiment Name: At_Drought_Reproduction_P Parameter: Treatment Value: Drought vs. No Drought
gatctagaatcttccctcaacctctagaaaacaactttcgtatccttcaaaaaccctaaaccctagcttttgcacagacgcaatttcatcgcatcattttgcaattttcctttactgatctgtcaccacctcttgaatttcgaaaccatggctaccgcagctctcctccgctctattcgacgccgtgaagtcgtttcctctcctttctcagcttacagatgcctttcaagcagtgggaaagcatcattgaacagttcctatctgggtcagaattttagaagcttttccagagcctttagctcgaagcctgctggaaacgatgtcattggtattgatttgggtactactaattcatgtgttgccgtcatggaggggaagaatccgaaagtcattgaaaatgctgaaggtgctcgaaccactccatcagttgtagcattcaacacgaaaggagaacttcttgtgggtacaccagccaagcgacaagctgtcactaatcctacaaacacagtatctggaacgaaacgtttgattgggagaaagttcgacgatccacaaactcagaaagaaatgaagatggtgccttacaagattgtgcgtgcacctaatggcgatgcgtgggttgaagccaatggtcagcagtattctcctagtcagattggagcgtttatcttgacgaagatgaaagagacggccgaagcttaccttggaaaatctgtcacgaaagctgttgtcactgttccagcttactttaatgatgctcagagacaagcaacaaaagatgctggtagaattgctggtcttgatgttgagagaatcataaatgaaccgacggctgctgctctgtcctatggaatgaccaacaaggaggggttgattgctgtgtttgatcttggtggtgggacatttgatgtatctgttttggagatttctaatggggtattcgaggtgaaagccaccaatggtgataccttcttgggaggtgaggatttcgacaatgctctgctagacttcttggttaatgagttcaagaccactgagggaatagacctagccaaagacagacttgctctgcagaggcttagagaagccgctgagaaagcgaagattgaactgtcatctacttctcaaactgaaattaatctcccatttatcacagccgatgcatctggagcaaagcatttcaacatcaccctaacaaggtcaaggtttgaaactcttgtgaatcacttgattgagaggacccgcgatccttgcaagaactgtctcaaggatgctggtataagtgctaaggaagttgatgaggttcttctagttggaggaatgacgcgtgtccccaaggttcagtctattgttgcggagatctttggaaagagtccaagcaaaggtgtcaatcctgatgaggctgttgctatgggagctgcacttcaaggtggtatcctccgcggtgatgtcaaagaattgttgcttctggatgtcacacctctatcgctcggtattgaaacacttggtggtgtctttacgagactgatcacccgaaatacaaccatccccacaaagaagagtcaggtgttctcaactgcagccgataatcagactcaagttgggatcagggtgcttcaaggtgagcgtgaaatggcaacagacaacaagctcttgggagaatttgatctagttggcattccaccatctccaagaggagtccctcagatcgaagtgacatttgacattgatgccaatggcattgtcactgtttccgccaaggacaagacgactggtaaagtacaacagatcacaatccgatcctctggtgggctctcagaggatgatatccagaagatggtgagagaagcagagttgcatgctcagaaagacaaagaaagaaaagaattgatcgacaccaagaacacagctgacacaacaatttacagcatagagaagagtcttggtgaatacagagagaagatcccaagtgaaatcgccaaggagattgaagatgctgtggcagatctaaggagcgcttcctctggggatgatctcaacgagatcaaggccaagattgaggcggcaaacaaagctgtttctaagattggggagcacatgtctggtggttctggtggaggctctgcaccaggaggaggatctgagggaggcagtgatcaagctccagaagcagagtacgaggaagtgaaaaagtgaggagatttggtaaattcttgccacttgggttttaagagattaggtttagatcatggtgggttctatgtccaaggaacttttgccttttagaacaacgagcagtggatatgtttctggaataagcttttgtcagggaactaaacttaatgtttctctgctaaaaaacctttgttatgtaatgtgatggttaaagagaagaagttttcaaaattttgtcactttatactttatagtttattttc

SEQ ID NO: 47997 - protein, 682 aa, Arabidopsis thaliana
  peptide (1)..(682): Ceres Seq. ID no. 13593105
  misc_feature (59)..(653): Pfam Name: Hsp70 protein Pfam Description: Hsp70 protein
  misc_feature (59)..(653): Pfam Name: Hsp70 protein Pfam Description: Hsp70 protein
  misc_feature (59)..(682): Homolog of NCBI NO: 13473986 NR Description: heat shock protein dnaK (70) [Mesorhizobium loti]
  misc_feature (21)..(679): Homolog of NCBI NO: 7441874 NR Description: dnaK-type molecular chaperone F20D10.30 -
  misc_feature (1)..(679): Homolog of NCBI NO: 30691626 NR Description: heat shock protein mtHsc70-1 [Arabidopsis
  misc_feature (46)..(682): Homolog of NCBI NO: 27476086 NR Description: Putative heat shock 70 KD protein, mitochondrial
  misc_feature (1)..(682): Homolog of NCBI NO: 7441881 NR Description: dnaK-type molecular chaperone HSC70-10,
  misc_feature (59)..(682): Homolog of NCBI NO: 13473986 NR Description: heat shock protein dnaK (70) [Mesorhizobium loti]
  misc_feature (1)..(679): Homolog of NCBI NO: 30691626 NR Description: heat shock protein mtHsc70-1 [Arabidopsis
  misc_feature (1)..(682): Homolog of NCBI NO: 7441881 NR Description: dnaK-type molecular chaperone HSC70-10,
  misc_feature (4)..(682): Homolog of NCBI NO: 399940 NR Description: HEAT SHOCK 70 KD PROTEIN, MITOCHONDRIAL PRECURSOR
  misc_feature (4)..(682): Homolog of NCBI NO: 7441844 NR Description: dnaK-type molecular chaperone PHSP1 precursor,
  misc_feature (4)..(682): Homolog of NCBI NO: 585272 NR Description: HEAT SHOCK 70 KD PROTEIN, MITOCHONDRIAL PRECURSOR
  misc_feature (1)..(682): Homolog of NCBI NO: 585273 NR Description: Heat shock 70 kDa protein, mitochondrial
  misc_feature (1)..(682): Homolog of NCBI NO: 7441879 NR Description: dnaK-type molecular chaperone HSC70-11,
  misc_feature (46)..(682): Homolog of NCBI NO: 27476086 NR Description: Putative heat shock 70 KD protein, mitochondrial
  misc_feature (21)..(679): Homolog of NCBI NO: 7441874 NR Description: dnaK-type molecular chaperone F20D10.30 -
  misc_feature (1)..(682): Homolog of NCBI NO: 7441879 NR Description: dnaK-type molecular chaperone HSC70-11,
  misc_feature (1)..(682): Homolog of NCBI NO: 585273 NR Description: Heat shock 70 kDa protein, mitochondrial
  misc_feature (4)..(682): Homolog of NCBI NO: 585272 NR Description: HEAT SHOCK 70 KD PROTEIN, MITOCHONDRIAL PRECURSOR
  misc_feature (4)..(682): Homolog of NCBI NO: 7441844 NR Description: dnaK-type molecular chaperone PHSP1 precursor,
  misc_feature (4)..(682): Homolog of NCBI NO: 399940 NR Description: HEAT SHOCK 70 KD PROTEIN, MITOCHONDRIAL PRECURSOR
MATAALLRSIRRREVVSSPFSAYRCLSSSGKASLNSSYLGQNFRSFSRAFSSKPAGNDVIGIDLGTTNSCVAVMEGKNPKVIENAEGARTTPSVVAFNTKGELLVGTPAKRQAVTNPTNTVSGTKRLIGRKFDDPQTQKEMKMVPYKIVRAPNGDAWVEANGQQYSPSQIGAFILTKMKETAEAYLGKSVTKAVVTVPAYFNDAQRQATKDAGRIAGLDVERIINEPTAAALSYGMTNKEGLIAVFDLGGGTFDVSVLEISNGVFEVKATNGDTFLGGEDFDNALLDFLVNEFKTTEGIDLAKDRLALQRLREAAEKAKIELSSTSQTEINLPFITADASGAKHFNITLTRSRFETLVNHLIERTRDPCKNCLKDAGISAKEVDEVLLVGGMTRVPKVQSIVAEIFGKSPSKGVNPDEAVAMGAALQGGILRGDVKELLLLDVTPLSLGIETLGGVFTRLITRNTTIPTKKSQVFSTAADNQTQVGIRVLQGEREMATDNKLLGEFDLVGIPPSPRGVPQIEVTFDIDANGIVTVSAKDKTTGKVQQITIRSSGGLSEDDIQKMVREAELHAQKDKERKELIDTKNTADTTIYSIEKSLGEYREKIPSEIAKEIEDAVADLRSASSGDDLNEIKAKIEAANKAVSKIGEHMSGGSGGGSAPGGGSEGGSDQAPEAEYEEVKK

SEQ ID NO: 47998 - protein, 609 aa, Arabidopsis thaliana
  peptide (1)..(609): Ceres Seq. ID no. 13593106
  misc_feature (1)..(580): Pfam Name: Hsp70 protein Pfam Description: Hsp70 protein
  misc_feature (1)..(580): Pfam Name: Hsp70 protein Pfam Description: Hsp70 protein
  misc_feature (1)..(609): Homolog of NCBI NO: 13473986 NR Description: heat shock protein dnaK (70) [Mesorhizobium loti]
  misc_feature (1)..(606): Homolog of NCBI NO: 7441874 NR Description: dnaK-type molecular chaperone F20D10.30 -
  misc_feature (1)..(606): Homolog of NCBI NO: 30691626 NR Description: heat shock protein mtHsc70-1 [Arabidopsis
  misc_feature (1)..(609): Homolog of NCBI NO: 27476086 NR Description: Putative heat shock 70 KD protein, mitochondrial
  misc_feature (1)..(609): Homolog of NCBI NO: 7441881 NR Description: dnaK-type molecular chaperone HSC70-10,
  misc_feature (1)..(609): Homolog of NCBI NO: 13473986 NR Description: heat shock protein dnaK (70) [Mesorhizobium loti]
  misc_feature (1)..(606): Homolog of NCBI NO: 30691626 NR Description: heat shock protein mtHsc70-1 [Arabidopsis
  misc_feature (1)..(609): Homolog of NCBI NO: 7441881 NR Description: dnaK-type molecular chaperone HSC70-10,
  misc_feature (1)..(609): Homolog of NCBI NO: 399940 NR Description: HEAT SHOCK 70 KD PROTEIN, MITOCHONDRIAL PRECURSOR
  misc_feature (1)..(609): Homolog of NCBI NO: 7441844 NR Description: dnaK-type molecular chaperone PHSP1 precursor,
  misc_feature (1)..(609): Homolog of NCBI NO: 585272 NR Description: HEAT SHOCK 70 KD PROTEIN, MITOCHONDRIAL PRECURSOR
  misc_feature (1)..(609): Homolog of NCBI NO: 585273 NR Description: Heat shock 70 kDa protein, mitochondrial
  misc_feature (1)..(609): Homolog of NCBI NO: 7441879 NR Description: dnaK-type molecular chaperone HSC70-11,
  misc_feature (1)..(609): Homolog of NCBI NO: 27476086 NR Description: Putative heat shock 70 KD protein, mitochondrial
  misc_feature (1)..(606): Homolog of NCBI NO: 7441874 NR Description: dnaK-type molecular chaperone F20D10.30 -
  misc_feature (1)..(609): Homolog of NCBI NO: 7441879 NR Description: dnaK-type molecular chaperone HSC70-11,
  misc_feature (1)..(609): Homolog of NCBI NO: 585273 NR Description: Heat shock 70 kDa protein, mitochondrial
  misc_feature (1)..(609): Homolog of NCBI NO: 585272 NR Description: HEAT SHOCK 70 KD PROTEIN, MITOCHONDRIAL PRECURSOR
  misc_feature (1)..(609): Homolog of NCBI NO: 7441844 NR Description: dnaK-type molecular chaperone PHSP1 precursor,
  misc_feature (1)..(609): Homolog of NCBI NO: 399940 NR Description: HEAT SHOCK 70 KD PROTEIN, MITOCHONDRIAL PRECURSOR
MEGKNPKVIENAEGARTTPSVVAFNTKGELLVGTPAKRQAVTNPTNTVSGTKRLIGRKFDDPQTQKEMKMVPYKIVRAPNGDAWVEANGQQYSPSQIGAFILTKMKETAEAYLGKSVTKAVVTVPAYFNDAQRQATKDAGRIAGLDVERIINEPTAAALSYGMTNKEGLIAVFDLGGGTFDVSVLEISNGVFEVKATNGDTFLGGEDFDNALLDFLVNEFKTTEGIDLAKDRLALQRLREAAEKAKIELSSTSQTEINLPFITADASGAKHFNITLTRSRFETLVNHLIERTRDPCKNCLKDAGISAKEVDEVLLVGGMTRVPKVQSIVAEIFGKSPSKGVNPDEAVAMGAALQGGILRGDVKELLLLDVTPLSLGIETLGGVFTRLITRNTTIPTKKSQVFSTAADNQTQVGIRVLQGEREMATDNKLLGEFDLVGIPPSPRGVPQIEVTFDIDANGIVTVSAKDKTTGKVQQITIRSSGGLSEDDIQKMVREAELHAQKDKERKELIDTKNTADTTIYSIEKSLGEYREKIPSEIAKEIEDAVADLRSASSGDDLNEIKAKIEAANKAVSKIGEHMSGGSGGGSAPGGGSEGGSDQAPEAEYEEVKK

SEQ ID NO: 47999 - protein, 542 aa, Arabidopsis thaliana
  peptide (1)..(542): Ceres Seq. ID no. 13593107
  misc_feature (1)..(513): Pfam Name: Hsp70 protein Pfam Description: Hsp70 protein
  misc_feature (1)..(513): Pfam Name: Hsp70 protein Pfam Description: Hsp70 protein
  misc_feature (1)..(542): Homolog of NCBI NO: 13473986 NR Description: heat shock protein dnaK (70) [Mesorhizobium loti]
  misc_feature (1)..(539): Homolog of NCBI NO: 7441874 NR Description: dnaK-type molecular chaperone F20D10.30 -
  misc_feature (1)..(539): Homolog of NCBI NO: 30691626 NR Description: heat shock protein mtHsc70-1 [Arabidopsis
  misc_feature (1)..(542): Homolog of NCBI NO: 27476086 NR Description: Putative heat shock 70 KD protein, mitochondrial
  misc_feature (1)..(542): Homolog of NCBI NO: 7441881 NR Description: dnaK-type molecular chaperone HSC70-10,
  misc_feature (1)..(542): Homolog of NCBI NO: 13473986 NR Description: heat shock protein dnaK (70) [Mesorhizobium loti]
  misc_feature (1)..(539): Homolog of NCBI NO: 30691626 NR Description: heat shock protein mtHsc70-1 [Arabidopsis
  misc_feature (1)..(542): Homolog of NCBI NO: 7441881 NR Description: dnaK-type molecular chaperone HSC70-10,
  misc_feature (1)..(542): Homolog of NCBI NO: 399940 NR Description: HEAT SHOCK 70 KD PROTEIN, MITOCHONDRIAL PRECURSOR
  misc_feature (1)..(542): Homolog of NCBI NO: 7441844 NR Description: dnaK-type molecular chaperone PHSP1 precursor,
  misc_feature (1)..(542): Homolog of NCBI NO: 585272 NR Description: HEAT SHOCK 70 KD PROTEIN, MITOCHONDRIAL PRECURSOR
  misc_feature (1)..(542): Homolog of NCBI NO: 585273 NR Description: Heat shock 70 kDa protein, mitochondrial
  misc_feature (1)..(542): Homolog of NCBI NO: 7441879 NR Description: dnaK-type molecular chaperone HSC70-11,
  misc_feature (1)..(542): Homolog of NCBI NO: 27476086 NR Description: Putative heat shock 70 KD protein, mitochondrial
  misc_feature (1)..(539): Homolog of NCBI NO: 7441874 NR Description: dnaK-type molecular chaperone F20D10.30 -
  misc_feature (1)..(542): Homolog of NCBI NO: 7441879 NR Description: dnaK-type molecular chaperone HSC70-11,
  misc_feature (1)..(542): Homolog of NCBI NO: 585273 NR Description: Heat shock 70 kDa protein, mitochondrial
  misc_feature (1)..(542): Homolog of NCBI NO: 585272 NR Description: HEAT SHOCK 70 KD PROTEIN, MITOCHONDRIAL PRECURSOR
  misc_feature (1)..(542): Homolog of NCBI NO: 7441844 NR Description: dnaK-type molecular chaperone PHSP1 precursor,
  misc_feature (1)..(542): Homolog of NCBI NO: 399940 NR Description: HEAT SHOCK 70 KD PROTEIN, MITOCHONDRIAL PRECURSOR
MKMVPYKIVRAPNGDAWVEANGQQYSPSQIGAFILTKMKETAEAYLGKSVTKAVVTVPAYFNDAQRQATKDAGRIAGLDVERIINEPTAAALSYGMTNKEGLIAVFDLGGGTFDVSVLEISNGVFEVKATNGDTFLGGEDFDNALLDFLVNEFKTTEGIDLAKDRLALQRLREAAEKAKIELSSTSQTEINLPFITADASGAKHFNITLTRSRFETLVNHLIERTRDPCKNCLKDAGISAKEVDEVLLVGGMTRVPKVQSIVAEIFGKSPSKGVNPDEAVAMGAALQGGILRGDVKELLLLDVTPLSLGIETLGGVFTRLITRNTTIPTKKSQVFSTAADNQTQVGIRVLQGEREMATDNKLLGEFDLVGIPPSPRGVPQIEVTFDIDANGIVTVSAKDKTTGKVQQITIRSSGGLSEDDIQKMVREAELHAQKDKERKELIDTKNTADTTIYSIEKSLGEYREKIPSEIAKEIEDAVADLRSASSGDDLNEIKAKIEAANKAVSKIGEHMSGGSGGGSAPGGGSEGGSDQAPEAEYEEVKK

SEQ ID NO: 48000 - DNA, 1542 bp, Arabidopsis thaliana
  misc_feature (1)..(1542): Ceres Seq. ID no. 12665720
  misc_feature: MA Experiment ID: 20000171 Result: Down-regulated in Transcription
  misc_feature: MA Experiment 20000171 PARAMETER Experiment Name: At_42deg_Heat_P Parameter: Age (day) Value: 14
  misc_feature: MA Experiment 20000171 PARAMETER Experiment Name: At_42deg_Heat_P Parameter: Organism Value: A. thaliana
  misc_feature: MA Experiment 20000171 PARAMETER Experiment Name: At_42deg_Heat_P Parameter: Plant Line Value: WS
  misc_feature: MA Experiment 20000171 PARAMETER Experiment Name: At_42deg_Heat_P Parameter: Temperature (deg C) Value: 42 vs. 22
  misc_feature: MA Experiment 20000171 PARAMETER Experiment Name: At_42deg_Heat_P Parameter: Timepoint (hr) Value: 1
  misc_feature: MA Experiment 20000171 PARAMETER Experiment Name: At_42deg_Heat_P Parameter: Tissue Value: Aerial
  misc_feature: MA Experiment ID: 20000173 Result: Down-regulated in Transcription
  misc_feature: MA Experiment 20000173 PARAMETER Experiment Name: At_42deg_Heat_P Parameter: Age (day) Value: 14
  misc_feature: MA Experiment 20000173 PARAMETER Experiment Name: At_42deg_Heat_P Parameter: Organism Value: A. thaliana
  misc_feature: MA Experiment 20000173 PARAMETER Experiment Name: At_42deg_Heat_P Parameter: Plant Line Value: WS
  misc_feature: MA Experiment 20000173 PARAMETER Experiment Name: At_42deg_Heat_P Parameter: Temperature (deg C) Value: 42 vs. 22
  misc_feature: MA Experiment 20000173 PARAMETER Experiment Name: At_42deg_Heat_P Parameter: Timepoint (hr) Value: 6
  misc_feature: MA Experiment 20000173 PARAMETER Experiment Name: At_42deg_Heat_P Parameter: Tissue Value: Aerial
  misc_feature: MA Experiment ID: 20000182 Result: Up-regulated in Transcription
  misc_feature: MA Experiment 20000182 PARAMETER Experiment Name: At_2mM_SA_P Parameter: Age (day) Value: 14
  misc_feature: MA Experiment 20000182 PARAMETER Experiment Name: At_2mM_SA_P Parameter: Organism Value: A. thaliana
  misc_feature: MA Experiment 20000182 PARAMETER Experiment Name: At_2mM_SA_P Parameter: Plant Line Value: WS
  misc_feature: MA Experiment 20000182 PARAMETER Experiment Name: At_2mM_SA_P Parameter: Timepoint (hr) Value: 6
  misc_feature: MA Experiment 20000182 PARAMETER Experiment Name: At_2mM_SA_P Parameter: Tissue Value: Aerial
  misc_feature: MA Experiment 20000182 PARAMETER Experiment Name: At_2mM_SA_P Parameter: Treatment Value: 2mM SA vs. No Treatment
  misc_feature: MA Experiment ID: 20000527 Result: Down-regulated in Transcription
  misc_feature: MA Experiment 20000527 PARAMETER Experiment Name: At_10percent_PEG_P Parameter: Age (day) Value: 20
  misc_feature: MA Experiment 20000527 PARAMETER Experiment Name: At_10percent_PEG_P Parameter: Organism Value: A. thaliana
  misc_feature: MA Experiment 20000527 PARAMETER Experiment Name: At_10percent_PEG_P Parameter: Plant Line Value: WS
  misc_feature: MA Experiment 20000527 PARAMETER Experiment Name: At_10percent_PEG_P Parameter: Timepoint (day) Value: 20
  misc_feature: MA Experiment 20000527 PARAMETER Experiment Name: At_10percent_PEG_P Parameter: Tissue Value: Whole Plant
  misc_feature: MA Experiment 20000527 PARAMETER Experiment Name: At_10percent_PEG_P Parameter: Treatment Value: 10percent PEG vs. No Treatment
  misc_feature: MA Experiment ID: 20001560 Result: Down-regulated in Transcription
  misc_feature: MA Experiment 20001560 PARAMETER Experiment Name: At_Drought_Soil_Dry_P Parameter: Age (day) Value: 28
  misc_feature: MA Experiment 20001560 PARAMETER Experiment Name: At_Drought_Soil_Dry_P Parameter: Organism Value: A. thaliana
  misc_feature: MA Experiment 20001560 PARAMETER Experiment Name: At_Drought_Soil_Dry_P Parameter: Plant Line Value: WS
  misc_feature: MA Experiment 20001560 PARAMETER Experiment Name: At_Drought_Soil_Dry_P Parameter: Post Timepoint (hr) Value: None
  misc_feature: MA Experiment 20001560 PARAMETER Experiment Name: At_Drought_Soil_Dry_P Parameter: Post-Treatment Value: None
  misc_feature: MA Experiment 20001560 PARAMETER Experiment Name: At_Drought_Soil_Dry_P Parameter: Timepoint (day) Value: 14
  misc_feature: MA Experiment 20001560 PARAMETER Experiment Name: At_Drought_Soil_Dry_P Parameter: Treatment Value: Drought vs. No Drought
atggcaggagggtcgtttggtccgaccggtgtggctaaggagagagcagaacaataccaagggaaagtcactagttatgttataatcgcttgccttgttgcagctattggtggatccatctttggatatgacattggaatctcaggaggagttacatcgatggatgagtttcttgaggagtttttccacacggtttatgagaagaagaagcaagctcatgaaagtaattactgcaaatatgataatcaaggcttagctgctttcacttcttcactctacttagctggtttggtttcgactctcgtggcttcacccatcactaggaactacggtaggcgtgcgagtattgtttgtggtggaatcagctttcttattggatctggtttgaatgctggagctgtgaacttagctatgcttcttgccggacggatcatgcttggtgttggtattggatttggaaatcaggcggttcctttgtatttatcagaagtggcaccaactcatctacgaggtggtttaaacatgatgtttcagctagctacaactatcgggatctttacagcgaacatggttaattacggtactcaacagcttaagccttggggatggagactctctcttggtttagctgcttttccagctctgcttatgacgcttggcgggtatttcttacccgagacaccaaacagtttggtcgaaagaggattaacagagagaggtcgacgagtcttagtgaagctaagaggaacagaaaacgtcaacgccgagcttcaagacatggtagatgcgagtgagcttgcgaattccatcaaacatccattcagaaacatcttgcagaaacgacacaggcctcagctagttatggctatttgcatgccaatgtttcagatactcacagggataaactccattctcttctacgcacctgttctgttccagacaatggggtttggaggaaacgcatctctctattcatcagctttaacaggagctgttcttgtcctatcaacatttatttccataggattagtagacagattgggacgaagagctcttctcataactggaggaatacaaatgataatctgtcaagtcatagtagcagtgatcttaggagtgaaatttggagacaaccaagagctatcaaaagggtactcagtgatcgtagtcatcttcatctgcctctttgttgtagcgttcggatggtcatggggtcctctaggttggaccatacctagcgaaatctttccgttagagactcgttcagcggggcagagtatcacagtagctgtaaatctcctcttcactttcatcatagctcaagctttccttggtctcctctgtgcattcaagtttggaatcttcctcttctttgctggttgggtgacagtaatgactatctttgtgtatttcctgttgcctgaaaccaaaggagttccaatagaagagatgacactcttatggagtaaacattggttctggaaaaaagtattacctgatgcaacaaatcttgaagatgagagcaagaatgtatctgtttaa

SEQ ID NO: 48001 - protein, 513 aa, Arabidopsis thaliana
  peptide (1)..(513): Ceres Seq. ID no. 12665721
  misc_feature (30)..(488): Pfam Name: Sugar (and other) transporter Pfam Description: Sugar (and other) transporter
  misc_feature (17)..(501): Homolog of NCBI NO: 30349804 NR Description: monosaccharide-H+ symporter [Datisca glomerata]
  misc_feature (1)..(500): Homolog of NCBI NO: 26453114 NR Description: unknown protein [Arabidopsis thaliana]
  misc_feature (1)..(500): Homolog of NCBI NO: 15223861 NR Description: sugar carrier protein, putative; protein id:
  misc_feature (1)..(509): Homolog of NCBI NO: 7446723 NR Description: probable monosaccharide transport protein Mst-1 -
  misc_feature (1)..(510): Homolog of NCBI NO: 7446737 NR Description: hexose transport protein - tomato
  misc_feature (1)..(505): Homolog of NCBI NO: 15240313 NR Description: hexose transporter - like protein
  misc_feature (1)..(510): Homolog of NCBI NO: 5734440 NR Description: hexose transporter [Lycopersicon esculentum]
  misc_feature (1)..(506): Homolog of NCBI NO: 347855 NR Description: glucose transporter [Saccharum hybrid cultivar
  misc_feature (1)..(513): Homolog of NCBI NO: 1723182 NR Description: Sugar carrier protein A
  misc_feature (1)..(513): Homolog of NCBI NO: 15235215 NR Description: putative hexose transporter; protein id:
MAGGSFGPTGVAKERAEQYQGKVTSYVIIACLVAAIGGSIFGYDIGISGGVTSMDEFLEEFFHTVYEKKKQAHESNYCKYDNQGLAAFTSSLYLAGLVSTLVASPITRNYGRRASIVCGGISFLIGSGLNAGAVNLAMLLAGRIMLGVGIGFGNQAVPLYLSEVAPTHLRGGLNMMFQLATTIGIFTANMVNYGTQQLKPWGWRLSLGLAAFPALLMTLGGYFLPETPNSLVERGLTERGRRVLVKLRGTENVNAELQDMVDASELANSIKHPFRNILQKRHRPQLVMAICMPMFQILTGINSILFYAPVLFQTMGFGGNASLYSSALTGAVLVLSTFISIGLVDRLGRRALLITGGIQMIICQVIVAVILGVKFGDNQELSKGYSVIVVIFICLFVVAFGWSWGPLGWTIPSEIFPLETRSAGQSITVAVNLLFTFIIAQAFLGLLCAFKFGIFLFFAGWVTVMTIFVYFLLPETKGVPIEEMTLLWSKHWFWKKVLPDATNLEDESKNVSV

SEQ ID NO: 48002 - protein, 460 aa, Arabidopsis thaliana
  peptide (1)..(460): Ceres Seq. ID no. 12665722
  misc_feature (1)..(435): Pfam Name: Sugar (and other) transporter Pfam Description: Sugar (and other) transporter
  misc_feature (1)..(448): Homolog of NCBI NO: 30349804 NR Description: monosaccharide-H+ symporter [Datisca glomerata]
  misc_feature (1)..(447): Homolog of NCBI NO: 26453114 NR Description: unknown protein [Arabidopsis thaliana]
  misc_feature (1)..(447): Homolog of NCBI NO: 15223861 NR Description: sugar carrier protein, putative; protein id:
  misc_feature (1)..(456): Homolog of NCBI NO: 7446723 NR Description: probable monosaccharide transport protein Mst-1 -
  misc_feature (1)..(457): Homolog of NCBI NO: 7446737 NR Description: hexose transport protein - tomato
  misc_feature (1)..(452): Homolog of NCBI NO: 15240313 NR Description: hexose transporter - like protein
  misc_feature (1)..(457): Homolog of NCBI NO: 5734440 NR Description: hexose transporter [Lycopersicon esculentum]
  misc_feature (1)..(453): Homolog of NCBI NO: 347855 NR Description: glucose transporter [Saccharum hybrid cultivar
  misc_feature (1)..(460): Homolog of NCBI NO: 1723182 NR Description: Sugar carrier protein A
  misc_feature (1)..(460): Homolog of NCBI NO: 15235215 NR Description: putative hexose transporter; protein id:
MDEFLEEFFHTVYEKKKQAHESNYCKYDNQGLAAFTSSLYLAGLVSTLVASPITRNYGRRASIVCGGISFLIGSGLNAGAVNLAMLLAGRIMLGVGIGFGNQAVPLYLSEVAPTHLRGGLNMMFQLATTIGIFTANMVNYGTQQLKPWGWRLSLGLAAFPALLMTLGGYFLPETPNSLVERGLTERGRRVLVKLRGTENVNAELQDMVDASELANSIKHPFRNILQKRHRPQLVMAICMPMFQILTGINSILFYAPVLFQTMGFGGNASLYSSALTGAVLVLSTFISIGLVDRLGRRALLITGGIQMIICQVIVAVILGVKFGDNQELSKGYSVIVVIFICLFVVAFGWSWGPLGWTIPSEIFPLETRSAGQSITVAVNLLFTFIIAQAFLGLLCAFKFGIFLFFAGWVTVMTIFVYFLLPETKGVPIEEMTLLWSKHWFWKKVLPDATNLEDESKNVSV

SEQ ID NO: 48003 - protein, 376 aa, Arabidopsis thaliana
  peptide (1)..(376): Ceres Seq. ID no. 12665723
  misc_feature (1)..(351): Pfam Name: Sugar (and other) transporter Pfam Description: Sugar (and other) transporter
  misc_feature (1)..(364): Homolog of NCBI NO: 30349804 NR Description: monosaccharide-H+ symporter [Datisca glomerata]
  misc_feature (1)..(363): Homolog of NCBI NO: 26453114 NR Description: unknown protein [Arabidopsis thaliana]
  misc_feature (1)..(363): Homolog of NCBI NO: 15223861 NR Description: sugar carrier protein, putative; protein id:
  misc_feature (1)..(372): Homolog of NCBI NO: 7446723 NR Description: probable monosaccharide transport protein Mst-1 -
  misc_feature (1)..(373): Homolog of NCBI NO: 7446737 NR Description: hexose transport protein - tomato
  misc_feature (1)..(368): Homolog of NCBI NO: 15240313 NR Description: hexose transporter - like protein
  misc_feature (1)..(373): Homolog of NCBI NO: 5734440 NR Description: hexose transporter [Lycopersicon esculentum]
  misc_feature (1)..(369): Homolog of NCBI NO: 347855 NR Description: glucose transporter [Saccharum hybrid cultivar
  misc_feature (1)..(376): Homolog of NCBI NO: 1723182 NR Description: Sugar carrier protein A
  misc_feature (1)..(376): Homolog of NCBI NO: 15235215 NR Description: putative hexose transporter; protein id:
MLLAGRIMLGVGIGFGNQAVPLYLSEVAPTHLRGGLNMMFQLATTIGIFTANMVNYGTQQLKPWGWRLSLGLAAFPALLMTLGGYFLPETPNSLVERGLTERGRRVLVKLRGTENVNAELQDMVDASELANSIKHPFRNILQKRHRPQLVMAICMPMFQILTGINSILFYAPVLFQTMGFGGNASLYSSALTGAVLVLSTFISIGLVDRLGRRALLITGGIQMIICQVIVAVILGVKFGDNQELSKGYSVIVVIFICLFVVAFGWSWGPLGWTIPSEIFPLETRSAGQSITVAVNLLFTFIIAQAFLGLLCAFKFGIFLFFAGWVTVMTIFVYFLLPETKGVPIEEMTLLWSKHWFWKKVLPDATNLEDESKNVSV

SEQ ID NO: 48004 - DNA, 1953 bp, Arabidopsis thaliana
  misc_feature (1)..(1953): Ceres Seq. ID no. 12729258
  misc_feature: MA Experiment ID: 20000173 Result: Down-regulated in Transcription
  misc_feature: MA Experiment 20000173 PARAMETER Experiment Name: At_42deg_Heat_P Parameter: Age (day) Value: 14
  misc_feature: MA Experiment 20000173 PARAMETER Experiment Name: At_42deg_Heat_P Parameter: Organism Value: A. thaliana
  misc_feature: MA Experiment 20000173 PARAMETER Experiment Name: At_42deg_Heat_P Parameter: Plant Line Value: WS
  misc_feature: MA Experiment 20000173 PARAMETER Experiment Name: At_42deg_Heat_P Parameter: Temperature (deg C) Value: 42 vs. 22
  misc_feature: MA Experiment 20000173 PARAMETER Experiment Name: At_42deg_Heat_P Parameter: Timepoint (hr) Value: 6
  misc_feature: MA Experiment 20000173 PARAMETER Experiment Name: At_42deg_Heat_P Parameter: Tissue Value: Aerial
  misc_feature: MA Experiment ID: 20000185 Result: Down-regulated in Transcription
  misc_feature: MA Experiment 20000185 PARAMETER Experiment Name: At_Roots__P Parameter: Age (day) Value: 7 vs. 21
  misc_feature: MA Experiment 20000185 PARAMETER Experiment Name: At_Roots__P Parameter: Organism Value: A. thaliana
  misc_feature: MA Experiment 20000185 PARAMETER Experiment Name: At_Roots__P Parameter: Tissue Value: Roots vs. Whole Plant
  misc_feature: MA Experiment ID: 20000439 Result: Down-regulated in Transcription
  misc_feature: MA Experiment 20000439 PARAMETER Experiment Name: At_Roots__P Parameter: Age (day) Value: 14 vs. 21
  misc_feature: MA Experiment 20000439 PARAMETER Experiment Name: At_Roots__P Parameter: Organism Value: A. thaliana
  misc_feature: MA Experiment 20000439 PARAMETER Experiment Name: At_Roots__P Parameter: Tissue Value: Roots vs. Whole Plant
  misc_feature: MA Experiment ID: 20001905 Result: Down-regulated in Transcription
  misc_feature: MA Experiment 20001905 PARAMETER Experiment Name: At_Drought_Reproduction_P Parameter: Age (day) Value: 40
  misc_feature: MA Experiment 20001905 PARAMETER Experiment Name: At_Drought_Reproduction_P Parameter: Organism Value: A. thaliana
  misc_feature: MA Experiment 20001905 PARAMETER Experiment Name: At_Drought_Reproduction_P Parameter: Plant Line Value: WS
  misc_feature: MA Experiment 20001905 PARAMETER Experiment Name: At_Drought_Reproduction_P Parameter: Timepoint (day) Value: 10
  misc_feature: MA Experiment 20001905 PARAMETER Experiment Name: At_Drought_Reproduction_P Parameter: Tissue Value: Rosettes
  misc_feature: MA Experiment 20001905 PARAMETER Experiment Name: At_Drought_Reproduction_P Parameter: Treatment Value: Drought vs. No Drought
atggcctcttctcattctcttctcttttcttcttccttcctctctaaaccctcttctttcacttcttctctgagacggtttgtttaccttcccactcgccaattttggccaaggcagcgacatggtttctctaccgtcttcgccgtcgccaccgagccagctatctccagcagcggtcctaagaaagcagagccatcgacggtcgtgcttcctagtaatgaatcatctgataagcttctcaaaattcgacacacgtgtgcgcatgtaatggcaatggcagttcagaaactcttcccggatgcaaaagtgacgataggtccttggattgataatggtttctactatgattttgatatggagcctttaacagataaagaccttaagaggatcaagaaagagatggatcgtatcattagtcggaatttaccacttttaagagaagaagtatctagagaagaagcgaagaaaaggatcatggcgataaatgagccttataagatggagattttggatggtattaaggaagaacccatcaccgtttatcatatcggtaatgaatggtgggatctttgtgcgggtcctcatgtcgagaccacagggaagataaacaagaaagcagttgaactagaatctgttgctggtgcatactggagaggagatgaaaagaggcaaatgcttcagaggatatacggaacagcttgggagagcgaagagcaactgaaagcatatcttcattttaaagaagaagctaaacgcagggatcatagacgcatcggccaagaccttgatctgttttctatccaggatgaagctggaggagggttagtgttttggcatccgaaaggtgcaattgttagaaacataattgaagaatcgtggaagaaaatgcatgttgaacatggttatgatttgatctatactcctcatgttgccaaagctgacctgtggaagatcagtggtcacttggacttctacagagagaatatgtatgatcaaatggagatcgaggatgagctttatcaactccgaccaatgaattgcccttaccacatcttgctttaccaaagaaagcgtcaatcatatcgagatttgcccataagagttgcagagctcggtacagtttacagatatgagttgtctggtagcttgcacggtctcttccgtgtcagagggttcacacaggacgatgcacacatattttgtttagaggatcagatcaaagatgagatcagaggtgttctagatctcacagaagagatattgtcgaggtttggattcaacaagtatgaggttaacttatcaactagacctgaaaaatcagttggaggtgatgatatatgggagaaggcgacctgtgcccttagagatgctttagatgataagggatggagctatgaggttgacgaaggaggtggcgccttttacggcccaaagatcgaccttaagattgaagatgcattgggtagaaaatggcagtgctcaactattcaggtcgacttcaatcttcctcagagatttgacattacctatgtagacacaaactcagataagaaacgtcctataatgatccacagagcggttttaggatcattagaaagatttttcggtgttctcatagaacactacgcaggggatttcccgttatggctctctcctgttcaagtccgggtcttacctgtcacagacaatcagttggagttttgtaaggaagtgagtaagaaactgagagcttgtggagtgagggctgagttgtgccatggggagagactgcctaagctcataaggaacgcagagacgcagaagatcccgttaatggcggttgttggacccaaagaagtcgagaccggaactgttaccgttagatcgaggtttggaggagagcttggaaccattcctgttgatgacctcatcaacaaaatcaacattgcagttgaaaccagaactgctctgtaa

SEQ ID NO: 48005 - protein, 650 aa, Arabidopsis thaliana
  peptide (1)..(650): Ceres Seq. ID no. 12729259
  misc_feature (274)..(426): Pfam Name: tRNA synthetase class II core domain (G, H, P, S and T) Pfam Description: tRNA synthetase class II core domain (G, H, P,
  misc_feature (60)..(644): Homolog of NCBI NO: 22299745 NR Description: threonyl-tRNA synthetase [Thermosynechococcus
  misc_feature (56)..(644): Homolog of NCBI NO: 23041744 NR Description: hypothetical protein [Trichodesmium erythraeum
  misc_feature (65)..(644): Homolog of NCBI NO: 16331761 NR Description: threonyl-tRNA synthetase [Synechocystis sp. PCC
  misc_feature (479)..(641): Homolog of NCBI NO: 23053456 NR Description: hypothetical protein [Geobacter metallireducens]
  misc_feature (68)..(514): Homolog of NCBI NO: 23053456 NR Description: hypothetical protein [Geobacter metallireducens]
  misc_feature (64)..(644): Homolog of NCBI NO: 17227831 NR Description: threonyl-tRNA synthetase [Nostoc sp. PCC 7120]
  misc_feature (53)..(644): Homolog of NCBI NO: 23124829 NR Description: hypothetical protein [Nostoc punctiforme]
  misc_feature (75)..(185): Homolog of NCBI NO: 17232215 NR Description: threonyl-tRNA synthetase [Nostoc sp. PCC 7120]
  misc_feature (185)..(640): Homolog of NCBI NO: 17232215 NR Description: threonyl-tRNA synthetase [Nostoc sp. PCC 7120]
  misc_feature (52)..(649): Homolog of NCBI NO: 33866012 NR Description: threonyl-tRNA synthetase [Synechococcus sp. WH
MASSHSLLFSSSFLSKPSSFTSSLRRFVYLPTRQFWPRQRHGFSTVFAVATEPAISSSGPKKAEPSTVVLPSNESSDKLLKIRHTCAHVMAMAVQKLFPDAKVTIGPWIDNGFYYDFDMEPLTDKDLKRIKKEMDRIISRNLPLLREEVSREEAKKRIMAINEPYKMEILDGIKEEPITVYHIGNEWWDLCAGPHVETTGKINKKAVELESVAGAYWRGDEKRQMLQRIYGTAWESEEQLKAYLHFKEEAKRRDHRRIGQDLDLFSIQDEAGGGLVFWHPKGAIVRNIIEESWKKMHVEHGYDLIYTPHVAKADLWKISGHLDFYRENMYDQMEIEDELYQLRPMNCPYHILLYQRKRQSYRDLPIRVAELGTVYRYELSGSLHGLFRVRGFTQDDAHIFCLEDQIKDEIRGVLDLTEEILSRFGFNKYEVNLSTRPEKSVGGDDIWEKATCALRDALDDKGWSYEVDEGGGAFYGPKIDLKIEDALGRKWQCSTIQVDFNLPQRFDITYVDTNSDKKRPIMIHRAVLGSLERFFGVLIEHYAGDFPLWLSPVQVRVLPVTDNQLEFCKEVSKKLRACGVRAELCHGERLPKLIRNAETQKIPLMAVVGPKEVETGTVTVRSRFGGELGTIPVDDLINKINIAVETRTAL

SEQ ID NO: 48006 - protein, 561 aa, Arabidopsis thaliana
  peptide (1)..(561): Ceres Seq. ID no. 12729260
  misc_feature (185)..(337): Pfam Name: tRNA synthetase class II core domain (G, H, P, S and T) Pfam Description: tRNA synthetase class II core domain (G, H, P,
  misc_feature (1)..(555): Homolog of NCBI NO: 22299745 NR Description: threonyl-tRNA synthetase [Thermosynechococcus
  misc_feature (1)..(555): Homolog of NCBI NO: 23041744 NR Description: hypothetical protein [Trichodesmium erythraeum
  misc_feature (1)..(555): Homolog of NCBI NO: 16331761 NR Description: threonyl-tRNA synthetase [Synechocystis sp. PCC
  misc_feature (390)..(552): Homolog of NCBI NO: 23053456 NR Description: hypothetical protein [Geobacter metallireducens]
  misc_feature (1)..(425): Homolog of NCBI NO: 23053456 NR Description: hypothetical protein [Geobacter metallireducens]
  misc_feature (1)..(555): Homolog of NCBI NO: 17227831 NR Description: threonyl-tRNA synthetase [Nostoc sp. PCC 7120]
  misc_feature (1)..(555): Homolog of NCBI NO: 23124829 NR Description: hypothetical protein [Nostoc punctiforme]
  misc_feature (1)..(96): Homolog of NCBI NO: 17232215 NR Description: threonyl-tRNA synthetase [Nostoc sp. PCC 7120]
  misc_feature (96)..(551): Homolog of NCBI NO: 17232215 NR Description: threonyl-tRNA synthetase [Nostoc sp. PCC 7120]
  misc_feature (1)..(560): Homolog of NCBI NO: 33866012 NR Description: threonyl-tRNA synthetase [Synechococcus sp. WH
MAMAVQKLFPDAKVTIGPWIDNGFYYDFDMEPLTDKDLKRIKKEMDRIISRNLPLLREEVSREEAKKRIMAINEPYKMEILDGIKEEPITVYHIGNEWWDLCAGPHVETTGKINKKAVELESVAGAYWRGDEKRQMLQRIYGTAWESEEQLKAYLHFKEEAKRRDHRRIGQDLDLFSIQDEAGGGLVFWHPKGAIVRNIIEESWKKMHVEHGYDLIYTPHVAKADLWKISGHLDFYRENMYDQMEIEDELYQLRPMNCPYHILLYQRKRQSYRDLPIRVAELGTVYRYELSGSLHGLFRVRGFTQDDAHIFCLEDQIKDEIRGVLDLTEEILSRFGFNKYEVNLSTRPEKSVGGDDIWEKATCALRDALDDKGWSYEVDEGGGAFYGPKIDLKIEDALGRKWQCSTIQVDFNLPQRFDITYVDTNSDKKRPIMIHRAVLGSLERFFGVLIEHYAGDFPLWLSPVQVRVLPVTDNQLEFCKEVSKKLRACGVRAELCHGERLPKLIRNAETQKIPLMAVVGPKEVETGTVTVRSRFGGELGTIPVDDLINKINIAVETRTAL

SEQ ID NO: 48007 - protein, 559 aa, Arabidopsis thaliana
  peptide (1)..(559): Ceres Seq. ID no. 12729261
  misc_feature (183)..(335): Pfam Name: tRNA synthetase class II core domain (G, H, P, S and T) Pfam Description: tRNA synthetase class II core domain (G, H, P,
  misc_feature (1)..(553): Homolog of NCBI NO: 22299745 NR Description: threonyl-tRNA synthetase [Thermosynechococcus
  misc_feature (1)..(553): Homolog of NCBI NO: 23041744 NR Description: hypothetical protein [Trichodesmium erythraeum
  misc_feature (1)..(553): Homolog of NCBI NO: 16331761 NR Description: threonyl-tRNA synthetase [Synechocystis sp. PCC
  misc_feature (388)..(550): Homolog of NCBI NO: 23053456 NR Description: hypothetical protein [Geobacter metallireducens]
  misc_feature (1)..(423): Homolog of NCBI NO: 23053456 NR Description: hypothetical protein [Geobacter metallireducens]
  misc_feature (1)..(553): Homolog of NCBI NO: 17227831 NR Description: threonyl-tRNA synthetase [Nostoc sp. PCC 7120]
  misc_feature (1)..(553): Homolog of NCBI NO: 23124829 NR Description: hypothetical protein [Nostoc punctiforme]
  misc_feature (1)..(94): Homolog of NCBI NO: 17232215 NR Description: threonyl-tRNA synthetase [Nostoc sp. PCC 7120]
  misc_feature (94)..(549): Homolog of NCBI NO: 17232215 NR Description: threonyl-tRNA synthetase [Nostoc sp. PCC 7120]
  misc_feature (1)..(558): Homolog of NCBI NO: 33866012 NR Description: threonyl-tRNA synthetase [Synechococcus sp. WH
MAVQKLFPDAKVTIGPWIDNGFYYDFDMEPLTDKDLKRIKKEMDRIISRNLPLLREEVSREEAKKRIMAINEPYKMEILDGIKEEPITVYHIGNEWWDLCAGPHVETTGKINKKAVELESVAGAYWRGDEKRQMLQRIYGTAWESEEQLKAYLHFKEEAKRRDHRRIGQDLDLFSIQDEAGGGLVFWHPKGAIVRNIIEESWKKMHVEHGYDLIYTPHVAKADLWKISGHLDFYRENMYDQMEIEDELYQLRPMNCPYHILLYQRKRQSYRDLPIRVAELGTVYRYELSGSLHGLFRVRGFTQDDAHIFCLEDQIKDEIRGVLDLTEEILSRFGFNKYEVNLSTRPEKSVGGDDIWEKATCALRDALDDKGWSYEVDEGGGAFYGPKIDLKIEDALGRKWQCSTIQVDFNLPQRFDITYVDTNSDKKRPIMIHRAVLGSLERFFGVLIEHYAGDFPLWLSPVQVRVLPVTDNQLEFCKEVSKKLRACGVRAELCHGERLPKLIRNAETQKIPLMAVVGPKEVETGTVTVRSRFGGELGTIPVDDLINKINIAVETRTAL

SEQ ID NO: 48008 - DNA, 1598 bp, Arabidopsis thaliana
  misc_feature (1)..(1598): Ceres Seq. ID no. 12680832
  misc_feature: MA Experiment ID: 20000227 Result: Down-regulated in Transcription
  misc_feature: MA Experiment 20000227 PARAMETER Experiment Name: At_Root-Tips-vs-Tops_P Parameter: Tissue Value: Root Tips vs. Root Tops
  misc_feature: MA Experiment ID: 20000439 Result: Up-regulated in Transcription
  misc_feature: MA Experiment 20000439 PARAMETER Experiment Name: At_Roots__P Parameter: Age (day) Value: 14 vs. 21
  misc_feature: MA Experiment 20000439 PARAMETER Experiment Name: At_Roots__P Parameter: Organism Value: A. thaliana
  misc_feature: MA Experiment 20000439 PARAMETER Experiment Name: At_Roots__P Parameter: Tissue Value: Roots vs. Whole Plant
  misc_feature: MA Experiment ID: 20000451 Result: Up-regulated in Transcription
  misc_feature: MA Experiment 20000451 PARAMETER Experiment Name: At_CS6879_Shoots-Roots_P Parameter: Age (day) Value: 14
  misc_feature: MA Experiment 20000451 PARAMETER Experiment Name: At_CS6879_Shoots-Roots_P Parameter: Organism Value: A. thaliana
  misc_feature: MA Experiment 20000451 PARAMETER Experiment Name: At_CS6879_Shoots-Roots_P Parameter: Plant Line Value: CS6879 vs. WS
  misc_feature: MA Experiment 20000451 PARAMETER Experiment Name: At_CS6879_Shoots-Roots_P Parameter: Tissue Value: Roots
atatccaaaagactaggaaaaagaaaataacttaacatatggtagaggtttatgagttctgggccgtgatagtttcactcatagtggtaaagctgtgtcactggatctaccagtggaaaaatccaaaaggaaatggaaaacttcctccaggatctatgggttatccaatcatcggagagactttcgagttcatgaagcttcatgatgctattcagttaccaacattcgttaaggagaaattactcagacatggaccagtttttaggacaagcttatttggaggcaaagttatcatttcgactgatattggattgaacatggagatcgcaaagacaaatcatattcccggtatgccgaagagcttagagcggttatttggggcaaccaacttgtttgtgaataaggatactcataaacatgcccgcagcttgacaaaccagtttttaggttcgcaagctttaaaattaaggatgattcaagacatcgatttcttggctcgcacacacatgaaggaaggagctaggaaaggctgccttgacgtcaaggaaactgcaagcaagatcgttattgaatgtctttcgaagaaagtaatgggagagatggaaccagaggcagcaaaggaactcacactctgttggacatttttcccaagggattggtttcgattcgcttggaatttcccggggactggtgtctatcgcatagtgaaggcaagaaatcgtatgatgaaggttataaaggagacagtagttaaaaaaagagcatcaggaaagaaattgggggagtttttcgagaccatctttggagatacggaaagtgtaactatgagcatagagattgcgactgagtacatatttactctgtttgtgcttgctaacgaaacaacaccaggggtccttgcggcaacaataaagctcataagtgataaccctaaagtcatgcaggagttacggagagaacatgaaggaatcgtccaagataagattaagaaggatgagacagctgacctaacttgggaagactacaaatcaatgacttttacccagatggtgataaatgagtcgcttaggatcacaagcacggtaccaacggtgcttagaataattgatcatgagatccaatttggtgattatacaattccggctggttggatctttatgggttatccttatgtgcatttcaatccagagaagtatgatgaccctttagcttttaatccatggcgctggaagacttgagcacgatcgtctccaagacttaccttccctttggctctggtactagactatgtgtgggagctgaattcgttaagttgcaaatggccatttttatccatcatttgtttagatacaggtggtcaatgaaggcagagactactttacttcgaagatttatacttgtgcttccacgtggatctgatgttcaaatctcataagacaccaaacaggataactctgtatagtgttatgagagaataataaaattcagtttctatacctttcactctttctccttataacttttcatgtagttttggtatcatagccaatttcgatttttctagtatttgctttataaaaaatatatgttattgaaag

SEQ ID NO: 48009 - protein, 399 aa, Arabidopsis thaliana
  peptide (1)..(399): Ceres Seq. ID no. 12680833
  misc_feature (16)..(398): Homolog of NCBI NO: 38567920 NR Description: OSJNBa0088I22.16 [Oryza sativa (japonica
  misc_feature (6)..(398): Homolog of NCBI NO: 15222806 NR Description: cytochrome P450, putative; protein id:
  misc_feature (75)..(398): Homolog of NCBI NO: 15230741 NR Description: cytochrome P450, putative; protein id:
  misc_feature (1)..(398): Homolog of NCBI NO: 9294334 NR Description: cytochrome P450-like protein [Arabidopsis
  misc_feature (11)..(398): Homolog of NCBI NO: 15233767 NR Description: steroid 22-alpha-hydroxylase(cytochrome p450),
  misc_feature (11)..(398): Homolog of NCBI NO: 2190554 NR Description: Similar to Arabidopsis cytochrome P450 CYP90
  misc_feature (1)..(398): Homolog of NCBI NO: 6686409 NR Description: F1E22.5 [Arabidopsis thaliana]
  misc_feature (1)..(398): Homolog of NCBI NO: 15218776 NR Description: cytochrome P450, putative; protein id:
  misc_feature (38)..(398): Homolog of NCBI NO: 18700149 NR Description: At4g15396 [Arabidopsis thaliana]
  misc_feature (1)..(398): Homolog of NCBI NO: 30683237 NR Description: cytochrome P450 -related [Arabidopsis thaliana]
MVEVYEFWAVIVSLIVVKLCHWIYQWKNPKGNGKLPPGSMGYPIIGETFEFMKLHDAIQLPTFVKEKLLRHGPVFRTSLFGGKVIISTDIGLNMEIAKTNHIPGMPKSLERLFGATNLFVNKDTHKHARSLTNQFLGSQALKLRMIQDIDFLARTHMKEGARKGCLDVKETASKIVIECLSKKVMGEMEPEAAKELTLCWTFFPRDWFRFAWNFPGTGVYRIVKARNRMMKVIKETVVKKRASGKKLGEFFETIFGDTESVTMSIEIATEYIFTLFVLANETTPGVLAATIKLISDNPKVMQELRREHEGIVQDKIKKDETADLTWEDYKSMTFTQMVINESLRITSTVPTVLRIIDHEIQFGDYTIPAGWIFMGYPYVHFNPEKYDDPLAFNPWRWKT

SEQ ID NO: 48010 - protein, 360 aa, Arabidopsis thaliana
  peptide (1)..(360): Ceres Seq. ID no. 12680834
  misc_feature (1)..(359): Homolog of NCBI NO: 38567920 NR Description: OSJNBa0088I22.16 [Oryza sativa (japonica
  misc_feature (1)..(359): Homolog of NCBI NO: 15222806 NR Description: cytochrome P450, putative; protein id:
  misc_feature (36)..(359): Homolog of NCBI NO: 15230741 NR Description: cytochrome P450, putative; protein id:
  misc_feature (1)..(359): Homolog of NCBI NO: 9294334 NR Description: cytochrome P450-like protein [Arabidopsis
  misc_feature (1)..(359): Homolog of NCBI NO: 15233767 NR Description: steroid 22-alpha-hydroxylase(cytochrome p450),
  misc_feature (1)..(359): Homolog of NCBI NO: 2190554 NR Description: Similar to Arabidopsis cytochrome P450 CYP90
  misc_feature (1)..(359): Homolog of NCBI NO: 6686409 NR Description: F1E22.5 [Arabidopsis thaliana]
  misc_feature (1)..(359): Homolog of NCBI NO: 15218776 NR Description: cytochrome P450, putative; protein id:
  misc_feature (1)..(359): Homolog of NCBI NO: 18700149 NR Description: At4g15396 [Arabidopsis thaliana]
  misc_feature (1)..(359): Homolog of NCBI NO: 30683237 NR Description: cytochrome P450 -related [Arabidopsis thaliana]
MGYPIIGETFEFMKLHDAIQLPTFVKEKLLRHGPVFRTSLFGGKVIISTDIGLNMEIAKTNHIPGMPKSLERLFGATNLFVNKDTHKHARSLTNQFLGSQALKLRMIQDIDFLARTHMKEGARKGCLDVKETASKIVIECLSKKVMGEMEPEAAKELTLCWTFFPRDWFRFAWNFPGTGVYRIVKARNRMMKVIKETVVKKRASGKKLGEFFETIFGDTESVTMSIEIATEYIFTLFVLANETTPGVLAATIKLISDNPKVMQELRREHEGIVQDKIKKDETADLTWEDYKSMTFTQMVINESLRITSTVPTVLRIIDHEIQFGDYTIPAGWIFMGYPYVHFNPEKYDDPLAFNPWRWKT

SEQ ID NO: 48011 - protein, 348 aa, Arabidopsis thaliana
  peptide (1)..(348): Ceres Seq. ID no. 12680835
  misc_feature (1)..(347): Homolog of NCBI NO: 38567920 NR Description: OSJNBa0088I22.16 [Oryza sativa (japonica
  misc_feature (1)..(347): Homolog of NCBI NO: 15222806 NR Description: cytochrome P450, putative; protein id:
  misc_feature (24)..(347): Homolog of NCBI NO: 15230741 NR Description: cytochrome P450, putative; protein id:
  misc_feature (1)..(347): Homolog of NCBI NO: 9294334 NR Description: cytochrome P450-like protein [Arabidopsis
  misc_feature (1)..(347): Homolog of NCBI NO: 15233767 NR Description: steroid 22-alpha-hydroxylase(cytochrome p450),
  misc_feature (1)..(347): Homolog of NCBI NO: 2190554 NR Description: Similar to Arabidopsis cytochrome P450 CYP90
  misc_feature (1)..(347): Homolog of NCBI NO: 6686409 NR Description: F1E22.5 [Arabidopsis thaliana]
  misc_feature (1)..(347): Homolog of NCBI NO: 15218776 NR Description: cytochrome P450, putative; protein id:
  misc_feature (1)..(347): Homolog of NCBI NO: 18700149 NR Description: At4g15396 [Arabidopsis thaliana]
  misc_feature (1)..(347): Homolog of NCBI NO: 30683237 NR Description: cytochrome P450 -related [Arabidopsis thaliana]
MKLHDAIQLPTFVKEKLLRHGPVFRTSLFGGKVIISTDIGLNMEIAKTNHIPGMPKSLERLFGATNLFVNKDTHKHARSLTNQFLGSQALKLRMIQDIDFLARTHMKEGARKGCLDVKETASKIVIECLSKKVMGEMEPEAAKELTLCWTFFPRDWFRFAWNFPGTGVYRIVKARNRMMKVIKETVVKKRASGKKLGEFFETIFGDTESVTMSIEIATEYIFTLFVLANETTPGVLAATIKLISDNPKVMQELRREHEGIVQDKIKKDETADLTWEDYKSMTFTQMVINESLRITSTVPTVLRIIDHEIQFGDYTIPAGWIFMGYPYVHFNPEKYDDPLAFNPWRWKT

SEQ ID NO: 48012 - DNA, 2322 bp, Arabidopsis thaliana
  misc_feature (1)..(2322): Ceres Seq. ID no. 12730151
  misc_feature: MA Experiment ID: 20000173 Result: Up-regulated in Transcription
  misc_feature: MA Experiment 20000173 PARAMETER Experiment Name: At_42deg_Heat_P Parameter: Age (day) Value: 14
  misc_feature: MA Experiment 20000173 PARAMETER Experiment Name: At_42deg_Heat_P Parameter: Organism Value: A. thaliana
  misc_feature: MA Experiment 20000173 PARAMETER Experiment Name: At_42deg_Heat_P Parameter: Plant Line Value: WS
  misc_feature: MA Experiment 20000173 PARAMETER Experiment Name: At_42deg_Heat_P Parameter: Temperature (deg C) Value: 42 vs. 22
  misc_feature: MA Experiment 20000173 PARAMETER Experiment Name: At_42deg_Heat_P Parameter: Timepoint (hr) Value: 6
  misc_feature: MA Experiment 20000173 PARAMETER Experiment Name: At_42deg_Heat_P Parameter: Tissue Value: Aerial
  misc_feature: MA Experiment ID: 20000227 Result: Down-regulated in Transcription
  misc_feature: MA Experiment 20000227 PARAMETER Experiment Name: At_Root-Tips-vs-Tops_P Parameter: Tissue Value: Root Tips vs. Root Tops
  misc_feature: MA Experiment ID: 20000265 Result: Down-regulated in Transcription
  misc_feature: MA Experiment 20000265 PARAMETER Experiment Name: At_Open_Flower_P Parameter: Age (day) Value: 21
  misc_feature: MA Experiment 20000265 PARAMETER Experiment Name: At_Open_Flower_P Parameter: Plant Line Value: WS
  misc_feature: MA Experiment 20000265 PARAMETER Experiment Name: At_Open_Flower_P Parameter: Tissue Value: Closed Flower vs. Whole Plant
  misc_feature: MA Experiment ID: 20000441 Result: Up-regulated in Transcription
  misc_feature: MA Experiment 20000441 PARAMETER Experiment Name: At_1uM_BR-BRZ__P Parameter: Tissue Value: Shoot Apices
  misc_feature: MA Experiment 20000441 PARAMETER Experiment Name: At_1uM_BR-BRZ__P Parameter: Treatment Value: 1uM BR vs. No Treatment
  misc_feature: MA Experiment ID: 20000443 Result: Up-regulated in Transcription
  misc_feature: MA Experiment 20000443 PARAMETER Experiment Name: At_1uM_BR-BRZ__P Parameter: Tissue Value: Shoot Apices
  misc_feature: MA Experiment 20000443 PARAMETER Experiment Name: At_1uM_BR-BRZ__P Parameter: Treatment Value: 1uM BRZ vs. No Treatment
  misc_feature: MA Experiment ID: 20000445 Result: Up-regulated in Transcription
  misc_feature: MA Experiment 20000445 PARAMETER Experiment Name: At_100uM_NAA__P Parameter: Age (day) Value: 14
  misc_feature: MA Experiment 20000445 PARAMETER Experiment Name: At_100uM_NAA__P Parameter: Organism Value: A. thaliana
  misc_feature: MA Experiment 20000445 PARAMETER Experiment Name: At_100uM_NAA__P Parameter: Plant Line Value: WS
  misc_feature: MA Experiment 20000445 PARAMETER Experiment Name: At_100uM_NAA__P Parameter: Timepoint (hr) Value: 6
  misc_feature: MA Experiment 20000445 PARAMETER Experiment Name: At_100uM_NAA__P Parameter: Tissue Value: Aerial
  misc_feature: MA Experiment 20000445 PARAMETER Experiment Name: At_100uM_NAA__P Parameter: Treatment Value: 100uM NAA vs. No Treatment
  misc_feature: MA Experiment ID: 20000495 Result: Up-regulated in Transcription
  misc_feature: MA Experiment 20000495 PARAMETER Experiment Name: At_Guard_Cells_P Parameter: Harvest Date Value: 8/2/2002
  misc_feature: MA Experiment 20000495 PARAMETER Experiment Name: At_Guard_Cells_P Parameter: Organism Value: A. thaliana
  misc_feature: MA Experiment 20000495 PARAMETER Experiment Name: At_Guard_Cells_P Parameter: Tissue Value: Guard Cells vs. Leaves
  misc_feature: MA Experiment ID: 20001248 Result: Up-regulated in Transcription
  misc_feature: MA Experiment 20001248 PARAMETER Experiment Name: At_Far-red-induction_P Parameter: Age (day) Value: 7
  misc_feature: MA Experiment 20001248 PARAMETER Experiment Name: At_Far-red-induction_P Parameter: Light Value: Far-red vs. White
  misc_feature: MA Experiment 20001248 PARAMETER Experiment Name: At_Far-red-induction_P Parameter: Organism Value: A. thaliana
  misc_feature: MA Experiment 20001248 PARAMETER Experiment Name: At_Far-red-induction_P Parameter: Plant Line Value: Columbia
  misc_feature: MA Experiment 20001248 PARAMETER Experiment Name: At_Far-red-induction_P Parameter: Timepoint (hr) Value: 4
  misc_feature: MA Experiment 20001248 PARAMETER Experiment Name: At_Far-red-induction_P Parameter: Tissue Value: Whole Plant
  misc_feature: MA Experiment ID: 20001757 Result: Down-regulated in Transcription
  misc_feature: MA Experiment 20001757 PARAMETER Experiment Name: At_50mM_NH4NO3_L-to-H_P Parameter: Timepoint (hr) Value: 6
  misc_feature: MA Experiment 20001757 PARAMETER Experiment Name: At_50mM_NH4NO3_L-to-H_P Parameter: Tissue Value: Leaf
  misc_feature: MA Experiment 20001757 PARAMETER Experiment Name: At_50mM_NH4NO3_L-to-H_P Parameter: Treatment Value: 50mM NH4NO3 vs 100mM Mannitol
  misc_feature: MA Experiment ID: 20001770 Result: Up-regulated in Transcription
  misc_feature: MA Experiment 20001770 PARAMETER Experiment Name: At_Far-red-enriched-adult_P Parameter: Age (day) Value: 28
  misc_feature: MA Experiment 20001770 PARAMETER Experiment Name: At_Far-red-enriched-adult_P Parameter: Light Value: Far-red enriched vs. White
  misc_feature: MA Experiment 20001770 PARAMETER Experiment Name: At_Far-red-enriched-adult_P Parameter: Organism Value: A. thaliana
  misc_feature: MA Experiment 20001770 PARAMETER Experiment Name: At_Far-red-enriched-adult_P Parameter: Plant Line Value: Columbia
  misc_feature: MA Experiment 20001770 PARAMETER Experiment Name: At_Far-red-enriched-adult_P Parameter: Timepoint (hr) Value: 8
  misc_feature: MA Experiment 20001770 PARAMETER Experiment Name: At_Far-red-enriched-adult_P Parameter: Tissue Value: Aerial
atggttaaagaaatagcttcttggttattgatactatcaatggtggtgtttgtttctccggttttagctataaacggcggtggttatccacgatgtaactgcgaagacgaaggaaacagtttctggagtacagagaacattctagaaactcaaagagtaagcgatttcttaatcgcagtagcttatttctcaatccctattgagttactttacttcgtgagttgttccaatgttccattcaaatgggttctctttgagtttatcgccttcattgttctttgtggtatgactcatcttcttcatggttggacttactctgctcatccatttagattaatgatggcgtttactgttttcaagatgttgactgctttagtctcttgtgctactgcgattacgcttattactttgattcctctgcttttgaaagttaaagttagagagtttatgcttaagaagaaagctcatgagcttggtcgtgaagttggtttgattttgattaagaaagagactggctttcatgttcgtatgcttactcaagagattcgtaagtctttggatcgtcatacgattctttatactactttggttgagctttcgaagactttagggttgcagaattgtgcggtttggatgccgaatgacggtggaacggagatggatttgactcatgagttgagagggagaggtggttatggtggttgttctgtttctatggaggatttggatgttgttaggattagggagagtgatgaagtgaatgtgttgagtgttgactcgtccattgctcgagctagtggtggtggtggggatgttagtgagattggtgccgtggctgctattagaatgccgatgcttcgtgtttcggattttaatggagagctaagttatgcgatacttgtttgtgttttaccgggcgggacgcctcgggattggacttatcaggagattgagattgttaaagttgtggcggatcaagtaaccgttgcgttagatcatgcagcggttcttgaagagtctcagcttatgagggagaagctggcggaacagaacagggcgttgcagatggcgaagagagacgcgttgagagcgagccaagcgaggaatgcgtttcagaaaacgatgagcgaagggatgaggcgtcctatgcattcgatactcggtcttttgtcgatgattcaggacgagaagttgagtgacgagcagaaaatgattgttgatacgatggttaaaacagggaatgttatgtcgaatttggtgggggactctatggatgtgcctgacggtagatttggtacggagatgaaaccatttagtctgcatcgtacgatccatgaagcagcttgtatggcgagatgtttgtgtctatgcaatggaattaggttcttggttgacgcggagaagtctctacctgataatgtagtaggtgatgaaagaagggtctttcaagtgatacttcatatagttggtagtttagtaaagcctagaaaacgtcaagaaggatcttcattgatgtttaaggttttgaaagaaagaggaagcttggataggagtgatcatagatgggctgcttggagatcaccggcttcttcagcagatggagatgtgtatataagatttgaaatgaatgtagagaatgatgattcaagttctcaatcatttgcttctgtttcctccagagatcaagaagttggtgatgttagattctccggcggctatgggttaggacaagatctaagctttggtgtttgtaagaaagtggtgcagttgattcatgggaatatctcggtggtccctggctcggatggttcaccggagaccatgtcgttgctccttcggtttcgacgtagaccctccatatctgtccatggatccagcgagtcgccagctcctgaccaccacgctcacccacattcgaattctctgttacgtggcttacaagttttattggtagacaccaacgattcgaaccgggcagttacacgtaaactcttagagaaactcgggtgcgatgtaaccgcggtttcctctggattcgattgccttaccgccattgctcccggctcgtcctcgccttctacttcgtttcaagtggtggtgcttgatcttcaaatggcagagatggacggttatgaagtggccatgaggatcaggagtcgatcttggccgttgattgtggcgacgacagtgagcttggatgaagaaatgtgggacaagtgtgcacagattggaatcaatggagttgtgagaaagccagtggtgttaagagctatggagagtgagctccgaagagtattgttgcaagctgaccaacttctctaa

SEQ ID NO: 48013 - protein, 773 aa, Arabidopsis thaliana
  peptide (1)..(773): Ceres Seq. ID no. 12730152
  misc_feature (187)..(331): Pfam Name: GAF domain Pfam Description: GAF domain
  misc_feature (32)..(595): Homolog of NCBI NO: 4154359 NR Description: putative ethylene response sensor [Phalaenopsis
  misc_feature (32)..(766): Homolog of NCBI NO: 30697334 NR Description: ethylene-response protein, ETR1 [Arabidopsis
  misc_feature (11)..(766): Homolog of NCBI NO: 21735412 NR Description: ethylene receptor-like protein 2 [Oryza sativa]
  misc_feature (12)..(771): Homolog of NCBI NO: 15229317 NR Description: putative ethylene receptor (EIN4); protein id:
  misc_feature (8)..(766): Homolog of NCBI NO: 4877653 NR Description: ethylene receptor homolog [Lycopersicon
  misc_feature (1)..(769): Homolog of NCBI NO: 5733831 NR Description: ethylene receptor homolog [Nicotiana tabacum]
  misc_feature (1)..(773): Homolog of NCBI NO: 4877651 NR Description: ethylene receptor homolog [Lycopersicon
  misc_feature (1)..(773): Homolog of NCBI NO: 6136818 NR Description: ethylene receptor CS-ETR2 [Cucumis sativus]
  misc_feature (1)..(773): Homolog of NCBI NO: 15131533 NR Description: ethylene receptor [Fragaria x ananassa]
  misc_feature (1)..(590): Homolog of NCBI NO: 7939523 NR Description: ethylene receptor [Arabidopsis thaliana]
MVKEIASWLLILSMVVFVSPVLAINGGGYPRCNCEDEGNSFWSTENILETQRVSDFLIAVAYFSIPIELLYFVSCSNVPFKWVLFEFIAFIVLCGMTHLLHGWTYSAHPFRLMMAFTVFKMLTALVSCATAITLITLIPLLLKVKVREFMLKKKAHELGREVGLILIKKETGFHVRMLTQEIRKSLDRHTILYTTLVELSKTLGLQNCAVWMPNDGGTEMDLTHELRGRGGYGGCSVSMEDLDVVRIRESDEVNVLSVDSSIARASGGGGDVSEIGAVAAIRMPMLRVSDFNGELSYAILVCVLPGGTPRDWTYQEIEIVKVVADQVTVALDHAAVLEESQLMREKLAEQNRALQMAKRDALRASQARNAFQKTMSEGMRRPMHSILGLLSMIQDEKLSDEQKMIVDTMVKTGNVMSNLVGDSMDVPDGRFGTEMKPFSLHRTIHEAACMARCLCLCNGIRFLVDAEKSLPDNVVGDERRVFQVILHIVGSLVKPRKRQEGSSLMFKVLKERGSLDRSDHRWAAWRSPASSADGDVYIRFEMNVENDDSSSQSFASVSSRDQEVGDVRFSGGYGLGQDLSFGVCKKVVQLIHGNISVVPGSDGSPETMSLLLRFRRRPSISVHGSSESPAPDHHAHPHSNSLLRGLQVLLVDTNDSNRAVTRKLLEKLGCDVTAVSSGFDCLTAIAPGSSSPSTSFQVVVLDLQMAEMDGYEVAMRIRSRSWPLIVATTVSLDEEMWDKCAQIGINGVVRKPVVLRAMESELRRVLLQADQLL

SEQ ID NO: 48014 - protein, 760 aa, Arabidopsis thaliana
  peptide (1)..(760): Ceres Seq. ID no. 12730153
  misc_feature (174)..(318): Pfam Name: GAF domain Pfam Description: GAF domain
  misc_feature (19)..(582): Homolog of NCBI NO: 4154359 NR Description: putative ethylene response sensor [Phalaenopsis
  misc_feature (19)..(753): Homolog of NCBI NO: 30697334 NR Description: ethylene-response protein, ETR1 [Arabidopsis
  misc_feature (1)..(753): Homolog of NCBI NO: 21735412 NR Description: ethylene receptor-like protein 2 [Oryza sativa]
  misc_feature (1)..(758): Homolog of NCBI NO: 15229317 NR Description: putative ethylene receptor (EIN4); protein id:
  misc_feature (1)..(753): Homolog of NCBI NO: 4877653 NR Description: ethylene receptor homolog [Lycopersicon
  misc_feature (1)..(756): Homolog of NCBI NO: 5733831 NR Description: ethylene receptor homolog [Nicotiana tabacum]
  misc_feature (1)..(760): Homolog of NCBI NO: 4877651 NR Description: ethylene receptor homolog [Lycopersicon
  misc_feature (1)..(760): Homolog of NCBI NO: 6136818 NR Description: ethylene receptor CS-ETR2 [Cucumis sativus]
  misc_feature (1)..(760): Homolog of NCBI NO: 15131533 NR Description: ethylene receptor [Fragaria x ananassa]
  misc_feature (1)..(577): Homolog of NCBI NO: 7939523 NR Description: ethylene receptor [Arabidopsis thaliana]
MVVFVSPVLAINGGGYPRCNCEDEGNSFWSTENILETQRVSDFLIAVAYFSIPIELLYFVSCSNVPFKWVLFEFIAFIVLCGMTHLLHGWTYSAHPFRLMMAFTVFKMLTALVSCATAITLITLIPLLLKVKVREFMLKKKAHELGREVGLILIKKETGFHVRMLTQEIRKSLDRHTILYTTLVELSKTLGLQNCAVWMPNDGGTEMDLTHELRGRGGYGGCSVSMEDLDVVRIRESDEVNVLSVDSSIARASGGGGDVSEIGAVAAIRMPMLRVSDFNGELSYAILVCVLPGGTPRDWTYQEIEIVKVVADQVTVALDHAAVLEESQLMREKLAEQNRALQMAKRDALRASQARNAFQKTMSEGMRRPMHSILGLLSMIQDEKLSDEQKMIVDTMVKTGNVMSNLVGDSMDVPDGRFGTEMKPFSLHRTIHEAACMARCLCLCNGIRFLVDAEKSLPDNVVGDERRVFQVILHIVGSLVKPRKRQEGSSLMFKVLKERGSLDRSDHRWAAWRSPASSADGDVYIRFEMNVENDDSSSQSFASVSSRDQEVGDVRFSGGYGLGQDLSFGVCKKVVQLIHGNISVVPGSDGSPETMSLLLRFRRRPSISVHGSSESPAPDHHAHPHSNSLLRGLQVLLVDTNDSNRAVTRKLLEKLGCDVTAVSSGFDCLTAIAPGSSSPSTSFQVVVLDLQMAEMDGYEVAMRIRSRSWPLIVATTVSLDEEMWDKCAQIGINGVVRKPVVLRAMESELRRVLLQADQLL

SEQ ID NO: 48015 - protein, 678 aa, Arabidopsis thaliana
  peptide (1)..(678): Ceres Seq. ID no. 12730154
  misc_feature (92)..(236): Pfam Name: GAF domain Pfam Description: GAF domain
  misc_feature (1)..(500): Homolog of NCBI NO: 4154359 NR Description: putative ethylene response sensor [Phalaenopsis
  misc_feature (1)..(671): Homolog of NCBI NO: 30697334 NR Description: ethylene-response protein, ETR1 [Arabidopsis
  misc_feature (1)..(671): Homolog of NCBI NO: 21735412 NR Description: ethylene receptor-like protein 2 [Oryza sativa]
  misc_feature (1)..(676): Homolog of NCBI NO: 15229317 NR Description: putative ethylene receptor (EIN4); protein id:
  misc_feature (1)..(671): Homolog of NCBI NO: 4877653 NR Description: ethylene receptor homolog [Lycopersicon
  misc_feature (1)..(674): Homolog of NCBI NO: 5733831 NR Description: ethylene receptor homolog [Nicotiana tabacum]
  misc_feature (1)..(678): Homolog of NCBI NO: 4877651 NR Description: ethylene receptor homolog [Lycopersicon
  misc_feature (1)..(678): Homolog of NCBI NO: 6136818 NR Description: ethylene receptor CS-ETR2 [Cucumis sativus]
  misc_feature (1)..(678): Homolog of NCBI NO: 15131533 NR Description: ethylene receptor [Fragaria x ananassa]
  misc_feature (1)..(495): Homolog of NCBI NO: 7939523 NR Description: ethylene receptor [Arabidopsis thaliana]
MTHLLHGWTYSAHPFRLMMAFTVFKMLTALVSCATAITLITLIPLLLKVKVREFMLKKKAHELGREVGLILIKKETGFHVRMLTQEIRKSLDRHTILYTTLVELSKTLGLQNCAVWMPNDGGTEMDLTHELRGRGGYGGCSVSMEDLDVVRIRESDEVNVLSVDSSIARASGGGGDVSEIGAVAAIRMPMLRVSDFNGELSYAILVCVLPGGTPRDWTYQEIEIVKVVADQVTVALDHAAVLEESQLMREKLAEQNRALQMAKRDALRASQARNAFQKTMSEGMRRPMHSILGLLSMIQDEKLSDEQKMIVDTMVKTGNVMSNLVGDSMDVPDGRFGTEMKPFSLHRTIHEAACMARCLCLCNGIRFLVDAEKSLPDNVVGDERRVFQVILHIVGSLVKPRKRQEGSSLMFKVLKERGSLDRSDHRWAAWRSPASSADGDVYIRFEMNVENDDSSSQSFASVSSRDQEVGDVRFSGGYGLGQDLSFGVCKKVVQLIHGNISVVPGSDGSPETMSLLLRFRRRPSISVHGSSESPAPDHHAHPHSNSLLRGLQVLLVDTNDSNRAVTRKLLEKLGCDVTAVSSGFDCLTAIAPGSSSPSTSFQVVVLDLQMAEMDGYEVAMRIRSRSWPLIVATTVSLDEEMWDKCAQIGINGVVRKPVVLRAMESELRRVLLQADQLL

SEQ ID NO: 48016 - DNA, 1655 bp, Arabidopsis thaliana
  misc_feature (1)..(1655): Ceres Seq. ID no. 12664856
  misc_feature: MA Experiment ID: 20000306 Result: Down-regulated in Transcription
  misc_feature: MA Experiment 20000306 PARAMETER Experiment Name: At_Germinating_Seeds_Sub_P Parameter: Age (hr) Value: 6 vs. 0
  misc_feature: MA Experiment 20000306 PARAMETER Experiment Name: At_Germinating_Seeds_Sub_P Parameter: Organism Value: A. thaliana
  misc_feature: MA Experiment 20000306 PARAMETER Experiment Name: At_Germinating_Seeds_Sub_P Parameter: Plant Line Value: WS
  misc_feature: MA Experiment 20000306 PARAMETER Experiment Name: At_Germinating_Seeds_Sub_P Parameter: Tissue Value: Germinating Seeds
  misc_feature: MA Experiment ID: 20000307 Result: Down-regulated in Transcription
  misc_feature: MA Experiment 20000307 PARAMETER Experiment Name: At_Germinating_Seeds_Sub_P Parameter: Age (hr) Value: 24 vs. 0
  misc_feature: MA Experiment 20000307 PARAMETER Experiment Name: At_Germinating_Seeds_Sub_P Parameter: Organism Value: A. thaliana
  misc_feature: MA Experiment 20000307 PARAMETER Experiment Name: At_Germinating_Seeds_Sub_P Parameter: Plant Line Value: WS
  misc_feature: MA Experiment 20000307 PARAMETER Experiment Name: At_Germinating_Seeds_Sub_P Parameter: Tissue Value: Germinating Seeds
  misc_feature: MA Experiment ID: 20000315 Result: Down-regulated in Transcription
  misc_feature: MA Experiment 20000315 PARAMETER Experiment Name: At_14day_Shoots-Roots_Sub_P Parameter: Age (day) Value: 14
  misc_feature: MA Experiment 20000315 PARAMETER Experiment Name: At_14day_Shoots-Roots_Sub_P Parameter: Organism Value: A. thaliana
  misc_feature: MA Experiment 20000315 PARAMETER Experiment Name: At_14day_Shoots-Roots_Sub_P Parameter: Plant Line Value: WS
  misc_feature: MA Experiment 20000315 PARAMETER Experiment Name: At_14day_Shoots-Roots_Sub_P Parameter: Tissue Value: Shoots vs. Whole Plant
  misc_feature: MA Experiment ID: 20000346 Result: Down-regulated in Transcription
  misc_feature: MA Experiment 20000346 PARAMETER Experiment Name: At_2mM_SA_Sub_P Parameter: Age (day) Value: 14
  misc_feature: MA Experiment 20000346 PARAMETER Experiment Name: At_2mM_SA_Sub_P Parameter: Organism Value: A. thaliana
  misc_feature: MA Experiment 20000346 PARAMETER Experiment Name: At_2mM_SA_Sub_P Parameter: Plant Line Value: WS
  misc_feature: MA Experiment 20000346 PARAMETER Experiment Name: At_2mM_SA_Sub_P Parameter: Timepoint (hr) Value: 1
  misc_feature: MA Experiment 20000346 PARAMETER Experiment Name: At_2mM_SA_Sub_P Parameter: Tissue Value: Aerial
  misc_feature: MA Experiment 20000346 PARAMETER Experiment Name: At_2mM_SA_Sub_P Parameter: Treatment Value: 2mM SA vs. No Treatment
  misc_feature: MA Experiment ID: 20000347 Result: Down-regulated in Transcription
  misc_feature: MA Experiment 20000347 PARAMETER Experiment Name: At_2mM_SA_Sub_P Parameter: Age (day) Value: 14
  misc_feature: MA Experiment 20000347 PARAMETER Experiment Name: At_2mM_SA_Sub_P Parameter: Organism Value: A. thaliana
  misc_feature: MA Experiment 20000347 PARAMETER Experiment Name: At_2mM_SA_Sub_P Parameter: Plant Line Value: WS
  misc_feature: MA Experiment 20000347 PARAMETER Experiment Name: At_2mM_SA_Sub_P Parameter: Timepoint (hr) Value: 6
  misc_feature: MA Experiment 20000347 PARAMETER Experiment Name: At_2mM_SA_Sub_P Parameter: Tissue Value: Aerial
  misc_feature: MA Experiment 20000347 PARAMETER Experiment Name: At_2mM_SA_Sub_P Parameter: Treatment Value: 2mM SA vs. No Treatment
  misc_feature: MA Experiment ID: 20000440 Result: Up-regulated in Transcription
  misc_feature: MA Experiment 20000440 PARAMETER Experiment Name: At_Closed-Flower__Sub_P Parameter: Tissue Value: Closed Flower vs. Whole Plant
atcttaaaatcacattctgatcatcaccaacacattgcaaaccaaaccagacacaaacacaaagacatgtctcttcttgctttcttcctcttcaccatccttgtcttttcaagttcatgttgttccgcaactcggttccaagggcacaggtacatgcagaggaaaacaatgctagatttggctagcaagattggtatcaactatggaagaagaggaaacaacctcccatctccatatcaatccatcaacttcatcaaatctatcaaagctggtcatgtcaagctctatgacgccgatccagagagtctcacactcctctctcaaaccaatctctacgtcaccataaccgtccctaaccaccaaatcaccgccctcagctctaaccaaaccatagctgacgaatgggtcagaactaacatcctcccttactatccacaaacacaaatccgttttgtccttgtcggaaacgaaatcctcagctacaattctgggaatgtctctgtgaatcttgtaccggcgatgcgcaaaatcgttaactcactcagattacatgggattcacaacatcaaagttgggacacctctagctatggattctctccggtcgtcgtttcctccatcgaacggaacattccgggaagaaatcaccggaccggtgatgttaccgttgctgaagtttctcaacggaacaaactcttacttcttccttaatgttcatccttacttccgttggtcaagaaaccccatgaacaccagtttggattttgctctgttccaaggacactcaacctataccgatcctcaaaccggtttggtttaccgtaatcttctagaccaaatgttggattcggttctcttcgccatgaccaaactcggttatccacatatgcgcctcgcgatctctgaaaccggatggcctaatttcggtgacatcgacgaaaccggagccaacattctcaacgcagctacctataaccgtaatctgatcaagaagatgagcgcaagtcctccaatcggtacaccatcaagacccggtttaccaataccgacatttgttttctccttattcaacgaaaaccagaaatccggttcggggacacagagacattggggaatcttgcatcccgacggttcaccaatctacgacgtagatttcaccggtcaaacacccttaaccggtttcaacccgttacctaaaccgacgaacaacgttccttacaaaggtcaagtgtggtgcgtaccagtcgaaggagccaacgagactgagcttgaagaaacattgaggatggcttgtgcccaaagcaacaccacttgtgcagctttagctcctgggagagaatgttacgaaccagtctccatttattggcatgcaagctacgcgcttaattcgtactgggctcagtttcgtaaccaaagcattcaatgtttcttcaatggattggctcatgagacaacaaccaaccctggaaatgatcgttgcaagtttccgagcgttactctgtgaggaggacttgaggaagaagacacatgattaaagctggattattcgtataactcaatattgttccttatcttttttttattataccttttctgcttcaagtttcgctatgttgagaaaaaaaattcaaataattaataaatagtaattttttt

SEQ ID NO: 48017 - protein, 500 aa, Arabidopsis thaliana
  peptide (1)..(500): Ceres Seq. ID no. 12664857
  misc_feature (64)..(385): Pfam Name: Glycosyl hydrolases family 17 Pfam Description: Glycosyl hydrolases family 17
  misc_feature (64)..(490): Homolog of NCBI NO: 29647494 NR Description: putative beta-1,3-glucanase
  misc_feature (435)..(500): Homolog of NCBI NO: 6642633 NR Description: putative beta-1,3-glucanase precursor
  misc_feature (65)..(413): Homolog of NCBI NO: 6642633 NR Description: putative beta-1,3-glucanase precursor
  misc_feature (65)..(500): Homolog of NCBI NO: 22330905 NR Description: glycosyl hydrolase family 17
  misc_feature (65)..(500): Homolog of NCBI NO: 21593090 NR Description: putative glucan endo-1-3-beta-glucosidase
  misc_feature (59)..(500): Homolog of NCBI NO: 6714534 NR Description: beta-1,3-glucanase [Salix gilgiana]
  misc_feature (23)..(500): Homolog of NCBI NO: 15229514 NR Description: glycosyl hydrolase family 17
  misc_feature (23)..(500): Homolog of NCBI NO: 21592541 NR Description: beta-1,3-glucanase, putative [Arabidopsis
  misc_feature (28)..(500): Homolog of NCBI NO: 322641 NR Description: beta-1,3-glucanase homolog (clone A6) - rape
  misc_feature (23)..(500): Homolog of NCBI NO: 15236405 NR Description: glycosyl hydrolase family 17 (anther-specific
ILKSHSDHHQHIANQTRHKHKDMSLLAFFLFTILVFSSSCCSATRFQGHRYMQRKTMLDLASKIGINYGRRGNNLPSPYQSINFIKSIKAGHVKLYDADPESLTLLSQTNLYVTITVPNHQITALSSNQTIADEWVRTNILPYYPQTQIRFVLVGNEILSYNSGNVSVNLVPAMRKIVNSLRLHGIHNIKVGTPLAMDSLRSSFPPSNGTFREEITGPVMLPLLKFLNGTNSYFFLNVHPYFRWSRNPMNTSLDFALFQGHSTYTDPQTGLVYRNLLDQMLDSVLFAMTKLGYPHMRLAISETGWPNFGDIDETGANILNAATYNRNLIKKMSASPPIGTPSRPGLPIPTFVFSLFNENQKSGSGTQRHWGILHPDGSPIYDVDFTGQTPLTGFNPLPKPTNNVPYKGQVWCVPVEGANETELEETLRMACAQSNTTCAALAPGRECYEPVSIYWHASYALNSYWAQFRNQSIQCFFNGLAHETTTNPGNDRCKFPSVTL

SEQ ID NO: 48018 - protein, 478 aa, Arabidopsis thaliana
  peptide (1)..(478): Ceres Seq. ID no. 12664858
  misc_feature (42)..(363): Pfam Name: Glycosyl hydrolases family 17 Pfam Description: Glycosyl hydrolases family 17
  misc_feature (42)..(468): Homolog of NCBI NO: 29647494 NR Description: putative beta-1,3-glucanase
  misc_feature (413)..(478): Homolog of NCBI NO: 6642633 NR Description: putative beta-1,3-glucanase precursor
  misc_feature (43)..(391): Homolog of NCBI NO: 6642633 NR Description: putative beta-1,3-glucanase precursor
  misc_feature (43)..(478): Homolog of NCBI NO: 22330905 NR Description: glycosyl hydrolase family 17
  misc_feature (43)..(478): Homolog of NCBI NO: 21593090 NR Description: putative glucan endo-1-3-beta-glucosidase
  misc_feature (37)..(478): Homolog of NCBI NO: 6714534 NR Description: beta-1,3-glucanase [Salix gilgiana]
  misc_feature (1)..(478): Homolog of NCBI NO: 15229514 NR Description: glycosyl hydrolase family 17
  misc_feature (1)..(478): Homolog of NCBI NO: 21592541 NR Description: beta-1,3-glucanase, putative [Arabidopsis
  misc_feature (6)..(478): Homolog of NCBI NO: 322641 NR Description: beta-1,3-glucanase homolog (clone A6) - rape
  misc_feature (1)..(478): Homolog of NCBI NO: 15236405 NR Description: glycosyl hydrolase family 17 (anther-specific
MSLLAFFLFTILVFSSSCCSATRFQGHRYMQRKTMLDLASKIGINYGRRGNNLPSPYQSINFIKSIKAGHVKLYDADPESLTLLSQTNLYVTITVPNHQITALSSNQTIADEWVRTNILPYYPQTQIRFVLVGNEILSYNSGNVSVNLVPAMRKIVNSLRLHGIHNIKVGTPLAMDSLRSSFPPSNGTFREEITGPVMLPLLKFLNGTNSYFFLNVHPYFRWSRNPMNTSLDFALFQGHSTYTDPQTGLVYRNLLDQMLDSVLFAMTKLGYPHMRLAISETGWPNFGDIDETGANILNAATYNRNLIKKMSASPPIGTPSRPGLPIPTFVFSLFNENQKSGSGTQRHWGILHPDGSPIYDVDFTGQTPLTGFNPLPKPTNNVPYKGQVWCVPVEGANETELEETLRMACAQSNTTCAALAPGRECYEPVSIYWHASYALNSYWAQFRNQSIQCFFNGLAHETTTNPGNDRCKFPSVTL

SEQ ID NO: 48019 - protein, 449 aa, Arabidopsis thaliana
  peptide (1)..(449): Ceres Seq. ID no. 12664859
  misc_feature (13)..(334): Pfam Name: Glycosyl hydrolases family 17 Pfam Description: Glycosyl hydrolases family 17
  misc_feature (13)..(439): Homolog of NCBI NO: 29647494 NR Description: putative beta-1,3-glucanase
  misc_feature (384)..(449): Homolog of NCBI NO: 6642633 NR Description: putative beta-1,3-glucanase precursor
  misc_feature (14)..(362): Homolog of NCBI NO: 6642633 NR Description: putative beta-1,3-glucanase precursor
  misc_feature (14)..(449): Homolog of NCBI NO: 22330905 NR Description: glycosyl hydrolase family 17
  misc_feature (14)..(449): Homolog of NCBI NO: 21593090 NR Description: putative glucan endo-1-3-beta-glucosidase
  misc_feature (8)..(449): Homolog of NCBI NO: 6714534 NR Description: beta-1,3-glucanase [Salix gilgiana]
  misc_feature (1)..(449): Homolog of NCBI NO: 15229514 NR Description: glycosyl hydrolase family 17
  misc_feature (1)..(449): Homolog of NCBI NO: 21592541 NR Description: beta-1,3-glucanase, putative [Arabidopsis
  misc_feature (1)..(449): Homolog of NCBI NO: 322641 NR Description: beta-1,3-glucanase homolog (clone A6) - rape
  misc_feature (1)..(449): Homolog of NCBI NO: 15236405 NR Description: glycosyl hydrolase family 17 (anther-specific
MQRKTMLDLASKIGINYGRRGNNLPSPYQSINFIKSIKAGHVKLYDADPESLTLLSQTNLYVTITVPNHQITALSSNQTIADEWVRTNILPYYPQTQIRFVLVGNEILSYNSGNVSVNLVPAMRKIVNSLRLHGIHNIKVGTPLAMDSLRSSFPPSNGTFREEITGPVMLPLLKFLNGTNSYFFLNVHPYFRWSRNPMNTSLDFALFQGHSTYTDPQTGLVYRNLLDQMLDSVLFAMTKLGYPHMRLAISETGWPNFGDIDETGANILNAATYNRNLIKKMSASPPIGTPSRPGLPIPTFVFSLFNENQKSGSGTQRHWGILHPDGSPIYDVDFTGQTPLTGFNPLPKPTNNVPYKGQVWCVPVEGANETELEETLRMACAQSNTTCAALAPGRECYEPVSIYWHASYALNSYWAQFRNQSIQCFFNGLAHETTTNPGNDRCKFPSVTL

SEQ ID NO: 48020 - DNA, 1003 bp, Arabidopsis thaliana
  misc_feature (1)..(1003): Ceres Seq. ID no. 12661707
  misc_feature: MA Experiment ID: 20000328 Result: Up-regulated in Transcription
  misc_feature: MA Experiment 20000328 PARAMETER Experiment Name: At_42deg_Heat_Sub_P Parameter: Age (day) Value: 14
  misc_feature: MA Experiment 20000328 PARAMETER Experiment Name: At_42deg_Heat_Sub_P Parameter: Organism Value: A. thaliana
  misc_feature: MA Experiment 20000328 PARAMETER Experiment Name: At_42deg_Heat_Sub_P Parameter: Plant Line Value: WS
  misc_feature: MA Experiment 20000328 PARAMETER Experiment Name: At_42deg_Heat_Sub_P Parameter: Temperature (deg C) Value: 42 vs. 22
  misc_feature: MA Experiment 20000328 PARAMETER Experiment Name: At_42deg_Heat_Sub_P Parameter: Timepoint (hr) Value: 6
  misc_feature: MA Experiment 20000328 PARAMETER Experiment Name: At_42deg_Heat_Sub_P Parameter: Tissue Value: Aerial
attgctcttctccacaagacaacatttctctggctcagaatcgacgccatggaaatgtaaagaagaaacaaagacgagctctcaaatccagcagcaatggcttttcttctttctaatctatcatctccgtcaatccatcttcaaaccggaaaatacccaaaccttaaacccattttcagtcaatctctatcgtcttcgtcttctgttagctacgaatttgtagaagagaatctatctacactctctctattgagcatccagtctcctcctcttaaagacacgcaagttcagacaagacacagttcgcaagataagcataataaccacgacagagatgaattctatatcaatcttggtgtcgctgtccgtacacttcgtgaagatttgcctttgctcttcactagagatcttaattacgacatctacagggatgatataacatttgtggatccgatgaacacattcactgggatggacaactacaagattatcttctgggcactcagatttcatgggaagatattgttcagagatatctcacttgagatcttcagagtatggcaaccatcagagaacatgattctcatcaggtggaatctcaagggtgtgcctagagttccatgggaagctaaaggagagtttcaaggcacttctcggtataaactcgaccgtaatggcaaaatctatgagcataaagtcgataacttggccttcaatttccctcaacagctcaaacctgcagcttcggttttggatttggtgactgcttcccctgcaagcagtcctaatcctacgttctttttcagtcctgtggactcttattcatcttcatgggttaagttttatcaagcggtgagagggacattggagacagaggatatgtttgtaacaacagactgtttagtcacatgctcatagtggaagtagagttgcgatatagacactcaaggtcacacttctcaggtgtatatagtttttacattaaaggtttcatatatatgag

SEQ ID NO: 48021 - protein, 273 aa, Arabidopsis thaliana
  peptide (1)..(273): Ceres Seq. ID no. 12661708
  misc_feature (90)..(199): Homolog of NCBI NO: 23041435 NR Description: hypothetical protein [Trichodesmium erythraeum
  misc_feature (81)..(199): Homolog of NCBI NO: 17228448 NR Description: hypothetical protein [Nostoc sp. PCC 7120]
  misc_feature (90)..(199): Homolog of NCBI NO: 23040676 NR Description: hypothetical protein [Trichodesmium erythraeum
  misc_feature (79)..(199): Homolog of NCBI NO: 23126421 NR Description: hypothetical protein [Nostoc punctiforme]
  misc_feature (52)..(201): Homolog of NCBI NO: 34904098 NR Description: unnamed protein product [Oryza sativa (japonica
  misc_feature (1)..(200): Homolog of NCBI NO: 25408977 NR Description: hypothetical protein At2g46220 [imported] -
  misc_feature (1)..(235): Homolog of NCBI NO: 18407008 NR Description: Expressed protein
  misc_feature (79)..(273): Homolog of NCBI NO: 38347356 NR Description: OSJNBa0070C17.17 [Oryza sativa (japonica
  misc_feature (1)..(273): Homolog of NCBI NO: 18412399 NR Description: expressed protein
  misc_feature (1)..(273): Homolog of NCBI NO: 15219209 NR Description: unknown protein
MAFLLSNLSSPSIHLQTGKYPNLKPIFSQSLSSSSSVSYEFVEENLSTLSLLSIQSPPLKDTQVQTRHSSQDKHNNHDRDEFYINLGVAVRTLREDLPLLFTRDLNYDIYRDDITFVDPMNTFTGMDNYKIIFWALRFHGKILFRDISLEIFRVWQPSENMILIRWNLKGVPRVPWEAKGEFQGTSRYKLDRNGKIYEHKVDNLAFNFPQQLKPAASVLDLVTASPASSPNPTFFFSPVDSYSSSWVKFYQAVRGTLETEDMFVTTDCLVTCS

SEQ ID NO: 48022 - protein, 154 aa, Arabidopsis thaliana
  peptide (1)..(154): Ceres Seq. ID no. 12661709
  misc_feature (1)..(80): Homolog of NCBI NO: 23041435 NR Description: hypothetical protein [Trichodesmium erythraeum
  misc_feature (1)..(80): Homolog of NCBI NO: 17228448 NR Description: hypothetical protein [Nostoc sp. PCC 7120]
  misc_feature (1)..(80): Homolog of NCBI NO: 23040676 NR Description: hypothetical protein [Trichodesmium erythraeum
  misc_feature (1)..(80): Homolog of NCBI NO: 23126421 NR Description: hypothetical protein [Nostoc punctiforme]
  misc_feature (1)..(82): Homolog of NCBI NO: 34904098 NR Description: unnamed protein product [Oryza sativa (japonica
  misc_feature (1)..(81): Homolog of NCBI NO: 25408977 NR Description: hypothetical protein At2g46220 [imported] -
  misc_feature (1)..(116): Homolog of NCBI NO: 18407008 NR Description: Expressed protein
  misc_feature (1)..(154): Homolog of NCBI NO: 38347356 NR Description: OSJNBa0070C17.17 [Oryza sativa (japonica
  misc_feature (1)..(154): Homolog of NCBI NO: 18412399 NR Description: expressed protein
  misc_feature (1)..(154): Homolog of NCBI NO: 15219209 NR Description: unknown protein
MNTFTGMDNYKIIFWALRFHGKILFRDISLEIFRVWQPSENMILIRWNLKGVPRVPWEAKGEFQGTSRYKLDRNGKIYEHKVDNLAFNFPQQLKPAASVLDLVTASPASSPNPTFFFSPVDSYSSSWVKFYQAVRGTLETEDMFVTTDCLVTCS

SEQ ID NO: 48023 - protein, 148 aa, Arabidopsis thaliana
  peptide (1)..(148): Ceres Seq. ID no. 12661710
  misc_feature (1)..(74): Homolog of NCBI NO: 23041435 NR Description: hypothetical protein [Trichodesmium erythraeum
  misc_feature (1)..(74): Homolog of NCBI NO: 17228448 NR Description: hypothetical protein [Nostoc sp. PCC 7120]
  misc_feature (1)..(74): Homolog of NCBI NO: 23040676 NR Description: hypothetical protein [Trichodesmium erythraeum
  misc_feature (1)..(74): Homolog of NCBI NO: 23126421 NR Description: hypothetical protein [Nostoc punctiforme]
  misc_feature (1)..(76): Homolog of NCBI NO: 34904098 NR Description: unnamed protein product [Oryza sativa (japonica
  misc_feature (1)..(75): Homolog of NCBI NO: 25408977 NR Description: hypothetical protein At2g46220 [imported] -
  misc_feature (1)..(110): Homolog of NCBI NO: 18407008 NR Description: Expressed protein
  misc_feature (1)..(148): Homolog of NCBI NO: 38347356 NR Description: OSJNBa0070C17.17 [Oryza sativa (japonica
  misc_feature (1)..(148): Homolog of NCBI NO: 18412399 NR Description: expressed protein
  misc_feature (1)..(148): Homolog of NCBI NO: 15219209 NR Description: unknown protein
MDNYKIIFWALRFHGKILFRDISLEIFRVWQPSENMILIRWNLKGVPRVPWEAKGEFQGTSRYKLDRNGKIYEHKVDNLAFNFPQQLKPAASVLDLVTASPASSPNPTFFFSPVDSYSSSWVKFYQAVRGTLETEDMFVTTDCLVTCS

SEQ ID NO: 48024 - DNA, 2764 bp, Arabidopsis thaliana; identical to SEQ ID NO: 44816
  misc_feature (1)..(2764): Ceres Seq. ID no. 13646330
  misc_feature: MA Experiment ID: 20000439 Result: Down-regulated in Transcription
  misc_feature: MA Experiment 20000439 PARAMETER Experiment Name: At_Roots__P Parameter: Age (day) Value: 14 vs. 21
  misc_feature: MA Experiment 20000439 PARAMETER Experiment Name: At_Roots__P Parameter: Organism Value: A. thaliana
  misc_feature: MA Experiment 20000439 PARAMETER Experiment Name: At_Roots__P Parameter: Tissue Value: Roots vs. Whole Plant
  misc_feature: MA Experiment ID: 20001557 Result: Down-regulated in Transcription
  misc_feature: MA Experiment 20001557 PARAMETER Experiment Name: At_Drought_Soil_Dry_P Parameter: Age (day) Value: 27
  misc_feature: MA Experiment 20001557 PARAMETER Experiment Name: At_Drought_Soil_Dry_P Parameter: Organism Value: A. thaliana
  misc_feature: MA Experiment 20001557 PARAMETER Experiment Name: At_Drought_Soil_Dry_P Parameter: Plant Line Value: WS
  misc_feature: MA Experiment 20001557 PARAMETER Experiment Name: At_Drought_Soil_Dry_P Parameter: Post Timepoint (hr) Value: 3
  misc_feature: MA Experiment 20001557 PARAMETER Experiment Name: At_Drought_Soil_Dry_P Parameter: Post-Treatment Value: Re-Water vs. No Drought
  misc_feature: MA Experiment 20001557 PARAMETER Experiment Name: At_Drought_Soil_Dry_P Parameter: Timepoint (day) Value: 13
  misc_feature: MA Experiment 20001557 PARAMETER Experiment Name: At_Drought_Soil_Dry_P Parameter: Treatment Value: Drought vs. No Drought
  misc_feature: MA Experiment ID: 20001558 Result: Down-regulated in Transcription
  misc_feature: MA Experiment 20001558 PARAMETER Experiment Name: At_Drought_Soil_Dry_P Parameter: Age (day) Value: 27
  misc_feature: MA Experiment 20001558 PARAMETER Experiment Name: At_Drought_Soil_Dry_P Parameter: Organism Value: A. thaliana
  misc_feature: MA Experiment 20001558 PARAMETER Experiment Name: At_Drought_Soil_Dry_P Parameter: Plant Line Value: WS
  misc_feature: MA Experiment 20001558 PARAMETER Experiment Name: At_Drought_Soil_Dry_P Parameter: Post Timepoint (hr) Value: 6
  misc_feature: MA Experiment 20001558 PARAMETER Experiment Name: At_Drought_Soil_Dry_P Parameter: Post-Treatment Value: Re-Water vs. No Drought
  misc_feature: MA Experiment 20001558 PARAMETER Experiment Name: At_Drought_Soil_Dry_P Parameter: Timepoint (day) Value: 13
  misc_feature: MA Experiment 20001558 PARAMETER Experiment Name: At_Drought_Soil_Dry_P Parameter: Treatment Value: Drought vs. No Drought
  misc_feature: MA Experiment ID: 20001560 Result: Down-regulated in Transcription
  misc_feature: MA Experiment 20001560 PARAMETER Experiment Name: At_Drought_Soil_Dry_P Parameter: Age (day) Value: 28
  misc_feature: MA Experiment 20001560 PARAMETER Experiment Name: At_Drought_Soil_Dry_P Parameter: Organism Value: A. thaliana
  misc_feature: MA Experiment 20001560 PARAMETER Experiment Name: At_Drought_Soil_Dry_P Parameter: Plant Line Value: WS
  misc_feature: MA Experiment 20001560 PARAMETER Experiment Name: At_Drought_Soil_Dry_P Parameter: Post Timepoint (hr) Value: None
  misc_feature: MA Experiment 20001560 PARAMETER Experiment Name: At_Drought_Soil_Dry_P Parameter: Post-Treatment Value: None
  misc_feature: MA Experiment 20001560 PARAMETER Experiment Name: At_Drought_Soil_Dry_P Parameter: Timepoint (day) Value: 14
  misc_feature: MA Experiment 20001560 PARAMETER Experiment Name: At_Drought_Soil_Dry_P Parameter: Treatment Value: Drought vs. No Drought
  misc_feature: MA Experiment ID: 20001904 Result: Down-regulated in Transcription
  misc_feature: MA Experiment 20001904 PARAMETER Experiment Name: At_Drought_Reproduction_P Parameter: Age (day) Value: 37
  misc_feature: MA Experiment 20001904 PARAMETER Experiment Name: At_Drought_Reproduction_P Parameter: Organism Value: A. thaliana
  misc_feature: MA Experiment 20001904 PARAMETER Experiment Name: At_Drought_Reproduction_P Parameter: Plant Line Value: WS
  misc_feature: MA Experiment 20001904 PARAMETER Experiment Name: At_Drought_Reproduction_P Parameter: Timepoint (day) Value: 7
  misc_feature: MA Experiment 20001904 PARAMETER Experiment Name: At_Drought_Reproduction_P Parameter: Tissue Value: Rosettes
  misc_feature: MA Experiment 20001904 PARAMETER Experiment Name: At_Drought_Reproduction_P Parameter: Treatment Value: Drought vs. No Drought
  misc_feature: MA Experiment ID: 20001905 Result: Down-regulated in Transcription
  misc_feature: MA Experiment 20001905 PARAMETER Experiment Name: At_Drought_Reproduction_P Parameter: Age (day) Value: 40
  misc_feature: MA Experiment 20001905 PARAMETER Experiment Name: At_Drought_Reproduction_P Parameter: Organism Value: A. thaliana
  misc_feature: MA Experiment 20001905 PARAMETER Experiment Name: At_Drought_Reproduction_P Parameter: Plant Line Value: WS
  misc_feature: MA Experiment 20001905 PARAMETER Experiment Name: At_Drought_Reproduction_P Parameter: Timepoint (day) Value: 10
  misc_feature: MA Experiment 20001905 PARAMETER Experiment Name: At_Drought_Reproduction_P Parameter: Tissue Value: Rosettes
  misc_feature: MA Experiment 20001905 PARAMETER Experiment Name: At_Drought_Reproduction_P Parameter: Treatment Value: Drought vs. No Drought

SEQ ID NO: 48025 - protein, 772 aa, Arabidopsis thaliana; identical to SEQ ID NO: 44817
  peptide (1)..(772): Ceres Seq. ID no. 13646331
  misc_feature (306)..(731): Pfam Name: Domain of unknown function DUF221 Pfam Description: Domain of unknown function DUF221
  misc_feature (306)..(731): Pfam Name: Domain of unknown function DUF221 Pfam Description: Domain of unknown function DUF221
  misc_feature (1)..(772): Homolog of NCBI NO: 15222569 NR Description: ERD4 protein-related [Arabidopsis thaliana]
  misc_feature (1)..(749): Homolog of NCBI NO: 37537172 NR Description: unknown protein [Oryza sativa (japonica
  misc_feature (1)..(768): Homolog of NCBI NO: 15236212 NR Description: ERD4 protein-related [Arabidopsis thaliana]
  misc_feature (1)..(160): Homolog of NCBI NO: 7486105 NR Description: hypothetical protein F24O1.3 - Arabidopsis
  misc_feature (237)..(763): Homolog of NCBI NO: 7486105 NR Description: hypothetical protein F24O1.3 - Arabidopsis
  misc_feature (1)..(772): Homolog of NCBI NO: 15222569 NR Description: ERD4 protein-related [Arabidopsis thaliana]
  misc_feature (1)..(768): Homolog of NCBI NO: 15236212 NR Description: ERD4 protein-related [Arabidopsis thaliana]
  misc_feature (237)..(763): Homolog of NCBI NO: 7486105 NR Description: hypothetical protein F24O1.3 - Arabidopsis
  misc_feature (1)..(763): Homolog of NCBI NO: 25404887 NR Description: protein F24O1.4 [imported] - Arabidopsis thaliana
  misc_feature (1)..(763): Homolog of NCBI NO: 25402694 NR Description: hypothetical protein [imported] - Arabidopsis
  misc_feature (1)..(748): Homolog of NCBI NO: 15233100 NR Description: ERD4 protein-related [Arabidopsis thaliana]
  misc_feature (1)..(763): Homolog of NCBI NO: 15220762 NR Description: ERD4 protein-related [Arabidopsis thaliana]
  misc_feature (1)..(762): Homolog of NCBI NO: 17381104 NR Description: unknown protein [Arabidopsis thaliana]
  misc_feature (1)..(160): Homolog of NCBI NO: 7486105 NR Description: hypothetical protein F24O1.3 - Arabidopsis
  misc_feature (1)..(749): Homolog of NCBI NO: 37537172 NR Description: unknown protein [Oryza sativa (japonica
  misc_feature (1)..(762): Homolog of NCBI NO: 17381104 NR Description: unknown protein [Arabidopsis thaliana]
  misc_feature (1)..(763): Homolog of NCBI NO: 15220762 NR Description: ERD4 protein-related [Arabidopsis thaliana]
  misc_feature (1)..(748): Homolog of NCBI NO: 15233100 NR Description: ERD4 protein-related [Arabidopsis thaliana]
  misc_feature (1)..(763): Homolog of NCBI NO: 25402694 NR Description: hypothetical protein [imported] - Arabidopsis
  misc_feature (1)..(763): Homolog of NCBI NO: 25404887 NR Description: protein F24O1.4 [imported] - Arabidopsis thaliana

SEQ ID NO: 48026 - protein, 697 aa, Arabidopsis thaliana; identical to SEQ ID NO: 44818
  peptide (1)..(697): Ceres Seq. ID no. 13646332
  misc_feature (231)..(656): Pfam Name: Domain of unknown function DUF221 Pfam Description: Domain of unknown function DUF221
  misc_feature (231)..(656): Pfam Name: Domain of unknown function DUF221 Pfam Description: Domain of unknown function DUF221
  misc_feature (1)..(697): Homolog of NCBI NO: 15222569 NR Description: ERD4 protein-related [Arabidopsis thaliana]
  misc_feature (1)..(674): Homolog of NCBI NO: 37537172 NR Description: unknown protein [Oryza sativa (japonica
  misc_feature (1)..(693): Homolog of NCBI NO: 15236212 NR Description: ERD4 protein-related [Arabidopsis thaliana]
  misc_feature (1)..(85): Homolog of NCBI NO: 7486105 NR Description: hypothetical protein F24O1.3 - Arabidopsis
  misc_feature (162)..(688): Homolog of NCBI NO: 7486105 NR Description: hypothetical protein F24O1.3 - Arabidopsis
  misc_feature (1)..(697): Homolog of NCBI NO: 15222569 NR Description: ERD4 protein-related [Arabidopsis thaliana]
  misc_feature (1)..(693): Homolog of NCBI NO: 15236212 NR Description: ERD4 protein-related [Arabidopsis thaliana]
  misc_feature (162)..(688): Homolog of NCBI NO: 7486105 NR Description: hypothetical protein F24O1.3 - Arabidopsis
  misc_feature (1)..(688): Homolog of NCBI NO: 25404887 NR Description: protein F24O1.4 [imported] - Arabidopsis thaliana
  misc_feature (1)..(688): Homolog of NCBI NO: 25402694 NR Description: hypothetical protein [imported] - Arabidopsis
  misc_feature (1)..(673): Homolog of NCBI NO: 15233100 NR Description: ERD4 protein-related [Arabidopsis thaliana]
  misc_feature (1)..(688): Homolog of NCBI NO: 15220762 NR Description: ERD4 protein-related [Arabidopsis thaliana]
  misc_feature (1)..(687): Homolog of NCBI NO: 17381104 NR Description: unknown protein [Arabidopsis thaliana]
  misc_feature (1)..(85): Homolog of NCBI NO: 7486105 NR Description: hypothetical protein F24O1.3 - Arabidopsis
  misc_feature (1)..(674): Homolog of NCBI NO: 37537172 NR Description: unknown protein [Oryza sativa (japonica
  misc_feature (1)..(687): Homolog of NCBI NO: 17381104 NR Description: unknown protein [Arabidopsis thaliana]
  misc_feature (1)..(688): Homolog of NCBI NO: 15220762 NR Description: ERD4 protein-related [Arabidopsis thaliana]
  misc_feature (1)..(673): Homolog of NCBI NO: 15233100 NR Description: ERD4 protein-related [Arabidopsis thaliana]
  misc_feature (1)..(688): Homolog of NCBI NO: 25402694 NR Description: hypothetical protein [imported] - Arabidopsis
  misc_feature (1)..(688): Homolog of NCBI NO: 25404887 NR Description: protein F24O1.4 [imported] - Arabidopsis thaliana

SEQ ID NO: 48027 - protein, 691 aa, Arabidopsis thaliana; identical to SEQ ID NO: 44819
  peptide (1)..(691): Ceres Seq. ID no. 13646333
  misc_feature (225)..(650): Pfam Name: Domain of unknown function DUF221 Pfam Description: Domain of unknown function DUF221
  misc_feature (225)..(650): Pfam Name: Domain of unknown function DUF221 Pfam Description: Domain of unknown function DUF221
  misc_feature (1)..(691): Homolog of NCBI NO: 15222569 NR Description: ERD4 protein-related [Arabidopsis thaliana]
  misc_feature (1)..(668): Homolog of NCBI NO: 37537172 NR Description: unknown protein [Oryza sativa (japonica
  misc_feature (1)..(687): Homolog of NCBI NO: 15236212 NR Description: ERD4 protein-related [Arabidopsis thaliana]
  misc_feature (1)..(79): Homolog of NCBI NO: 7486105 NR Description: hypothetical protein F24O1.3 - Arabidopsis
  misc_feature (156)..(682): Homolog of NCBI NO: 7486105 NR Description: hypothetical protein F24O1.3 - Arabidopsis
  misc_feature (1)..(691): Homolog of NCBI NO: 15222569 NR Description: ERD4 protein-related [Arabidopsis thaliana]
  misc_feature (1)..(687): Homolog of NCBI NO: 15236212 NR Description: ERD4 protein-related [Arabidopsis thaliana]
  misc_feature (156)..(682): Homolog of NCBI NO: 7486105 NR Description: hypothetical protein F24O1.3 - Arabidopsis
  misc_feature (1)..(682): Homolog of NCBI NO: 25404887 NR Description: protein F24O1.4 [imported] - Arabidopsis thaliana
  misc_feature (1)..(682): Homolog of NCBI NO: 25402694 NR Description: hypothetical protein [imported] - Arabidopsis
  misc_feature (1)..(667): Homolog of NCBI NO: 15233100 NR Description: ERD4 protein-related [Arabidopsis thaliana]
  misc_feature (1)..(682): Homolog of NCBI NO: 15220762 NR Description: ERD4 protein-related [Arabidopsis thaliana]
  misc_feature (1)..(681): Homolog of NCBI NO: 17381104 NR Description: unknown protein [Arabidopsis thaliana]
  misc_feature (1)..(79): Homolog of NCBI NO: 7486105 NR Description: hypothetical protein F24O1.3 - Arabidopsis
  misc_feature (1)..(668): Homolog of NCBI NO: 37537172 NR Description: unknown protein [Oryza sativa (japonica
  misc_feature (1)..(681): Homolog of NCBI NO: 17381104 NR Description: unknown protein [Arabidopsis thaliana]
  misc_feature (1)..(682): Homolog of NCBI NO: 15220762 NR Description: ERD4 protein-related [Arabidopsis thaliana]
  misc_feature (1)..(667): Homolog of NCBI NO: 15233100 NR Description: ERD4 protein-related [Arabidopsis thaliana]
  misc_feature (1)..(682): Homolog of NCBI NO: 25402694 NR Description: hypothetical protein [imported] - Arabidopsis
  misc_feature (1)..(682): Homolog of NCBI NO: 25404887 NR Description: protein F24O1.4 [imported] - Arabidopsis thaliana

SEQ ID NO: 48028 - DNA, 1693 bp, Arabidopsis thaliana
  misc_feature (1)..(1693): Ceres Seq. ID no. 13649623
  misc_feature: MA Experiment ID: 20000171 Result: Up-regulated in Transcription
  misc_feature: MA Experiment 20000171 PARAMETER Experiment Name: At_42deg_Heat_P Parameter: Age (day) Value: 14
  misc_feature: MA Experiment 20000171 PARAMETER Experiment Name: At_42deg_Heat_P Parameter: Organism Value: A. thaliana
  misc_feature: MA Experiment 20000171 PARAMETER Experiment Name: At_42deg_Heat_P Parameter: Plant Line Value: WS
  misc_feature: MA Experiment 20000171 PARAMETER Experiment Name: At_42deg_Heat_P Parameter: Temperature (deg C) Value: 42 vs. 22
  misc_feature: MA Experiment 20000171 PARAMETER Experiment Name: At_42deg_Heat_P Parameter: Timepoint (hr) Value: 1
  misc_feature: MA Experiment 20000171 PARAMETER Experiment Name: At_42deg_Heat_P Parameter: Tissue Value: Aerial
  misc_feature: MA Experiment ID: 20000173 Result: Up-regulated in Transcription
  misc_feature: MA Experiment 20000173 PARAMETER Experiment Name: At_42deg_Heat_P Parameter: Age (day) Value: 14
  misc_feature: MA Experiment 20000173 PARAMETER Experiment Name: At_42deg_Heat_P Parameter: Organism Value: A. thaliana
  misc_feature: MA Experiment 20000173 PARAMETER Experiment Name: At_42deg_Heat_P Parameter: Plant Line Value: WS
  misc_feature: MA Experiment 20000173 PARAMETER Experiment Name: At_42deg_Heat_P Parameter: Temperature (deg C) Value: 42 vs. 22
  misc_feature: MA Experiment 20000173 PARAMETER Experiment Name: At_42deg_Heat_P Parameter: Timepoint (hr) Value: 6
  misc_feature: MA Experiment 20000173 PARAMETER Experiment Name: At_42deg_Heat_P Parameter: Tissue Value: Aerial
  misc_feature: MA Experiment ID: 20000437 Result: Up-regulated in Transcription
  misc_feature: MA Experiment 20000437 PARAMETER Experiment Name: At_Drought_P Parameter: Age (day) Value: 8
  misc_feature: MA Experiment 20000437 PARAMETER Experiment Name: At_Drought_P Parameter: Organism Value: A. thaliana
  misc_feature: MA Experiment 20000437 PARAMETER Experiment Name: At_Drought_P Parameter: Plant Line Value: WS
  misc_feature: MA Experiment 20000437 PARAMETER Experiment Name: At_Drought_P Parameter: Timepoint (hr) Value: 24
  misc_feature: MA Experiment 20000437 PARAMETER Experiment Name: At_Drought_P Parameter: Tissue Value: Whole Plant
  misc_feature: MA Experiment 20000437 PARAMETER Experiment Name: At_Drought_P Parameter: Treatment Value: Drought vs. No Drought
  misc_feature: MA Experiment ID: 20001905 Result: Up-regulated in Transcription
  misc_feature: MA Experiment 20001905 PARAMETER Experiment Name: At_Drought_Reproduction_P Parameter: Age (day) Value: 40
  misc_feature: MA Experiment 20001905 PARAMETER Experiment Name: At_Drought_Reproduction_P Parameter: Organism Value: A. thaliana
  misc_feature: MA Experiment 20001905 PARAMETER Experiment Name: At_Drought_Reproduction_P Parameter: Plant Line Value: WS
  misc_feature: MA Experiment 20001905 PARAMETER Experiment Name: At_Drought_Reproduction_P Parameter: Timepoint (day) Value: 10
  misc_feature: MA Experiment 20001905 PARAMETER Experiment Name: At_Drought_Reproduction_P Parameter: Tissue Value: Rosettes
  misc_feature: MA Experiment 20001905 PARAMETER Experiment Name: At_Drought_Reproduction_P Parameter: Treatment Value: Drought vs. No Drought
atgaagccctcccttaaacgacgtcttcttcttctttctcgaaaattcgccaaagcttcgatccgaaaacttcttcgccaatcttccttttcttctcacgaatttctccttcaagctccgttcccagcaatgtcatggtacagaagaacaaaactcgtattcgattccctgcgacgcaacataaacccgaagattctacctcgatctcatgttacttcgagaatcaacaatccaattgggtcttctaatccctcagctaagttctcttcaatctcttcgcgagaagtaggattaagatcatggacatctctcggccgaaacacgaacagaatcgcgtataatccgtttctgagtcaacccaagagatattactacgttgatcgataccaagttcgtcatttcaagccacgaggaccaggacggtggtttcaaaaccctagaactgtgtttacggtggtgctcgttggttccgttggtctgatcactttgattgttgggaatacagaaacgattccgtacacaaagagaacacatttcattctcttatcgaaacctatggagaagcttcttggtgaaactcaatttgagcagattaagaaaacttaccaagggaaaattcttcctgcgactcatcctgagagtatcagggttagattgatagctaaagaggttattgatgcgttacagagaggtttgagtaatgagcgtgtatggagtgatttggggtatgcttctactgagagtagtttgggaggtggtagtgataaaggagttaaggaaatggaaatggctatgagtggtgaagatactatgactgatatgaaatggtctaaagaagatcaggttcttgatgatcaatggattcaaaagagtaggaagaaagattcaaaggctcatgcagcgactagtcatcttgaaggtattagttgggaggttcttgtggttaatgagcctattgttaacgcgttttgtttgcctgctgggaagattgtggtgttcactgggctgcttaatcatttcaagtcagatgctgaagttgccactgtgattgggcatgaggttggtcatgcggtggcccgacatgtagctgagggaataactaagaacttgtggtttgctatccttcaactggtcctatatcagtttgtcatgcctgatcttgtgaacactatgtccgcccttttcttgaggcttcctttctccagaaagatggagatagaagcagactacatcggtttgctgttacttgcatctgcgggctatgacccacgagtagctcccacagtgtatgagaagctgggaaagctcggtggagacgcactcggagattatctatcgacccatccgtcgggaaaaaagagatcaaaacttttggctcaagccaatgtgatggaagaagcactaatgatatatagagaagtccaagcaggtcgtactggcgttgaaggctttctttagctcttcaccattcatctcgtctgcttctgtacattatttctcctccacctccattaatcatgtggaatgttatgttagtatgtttatgtcgttaaattgattggtgcaatagaatgattccgattgagacgtatagttggatattttggtctaaataaacattttagacatagaacatgcaaatggtgaaaataggaacctgaaatagaatagttataagtattgaattcacgac

SEQ ID NO: 48029 - protein, 485 aa, Arabidopsis thaliana
  peptide (1)..(485): Ceres Seq. ID no. 13649624
  misc_feature (259)..(461): Homolog of NCBI NO: 34557683 NR Description: conserved hypothetical protein [Wolinella
  misc_feature (260)..(472): Homolog of NCBI NO: 23473121 NR Description: hypothetical protein [Desulfovibrio desulfuricans
  misc_feature (305)..(458): Homolog of NCBI NO: 40745859 NR Description: hypothetical protein AN1850.2 [Aspergillus
  misc_feature (56)..(225): Homolog of NCBI NO: 40745859 NR Description: hypothetical protein AN1850.2 [Aspergillus
  misc_feature (106)..(238): Homolog of NCBI NO: 19114452 NR Description: hypothetical peptidase 48 family protein
  misc_feature (301)..(473): Homolog of NCBI NO: 19114452 NR Description: hypothetical peptidase 48 family protein
  misc_feature (172)..(227): Homolog of NCBI NO: 6322940 NR Description: Hypothetical ORF; Ykr087cp [Saccharomyces
  misc_feature (303)..(466): Homolog of NCBI NO: 6322940 NR Description: Hypothetical ORF; Ykr087cp [Saccharomyces
  misc_feature (44)..(485): Homolog of NCBI NO: 30696099 NR Description: expressed protein [Arabidopsis thaliana]
  misc_feature (1)..(485): Homolog of NCBI NO: 10177873 NR Description: contains similarity to peptidase~gene_id:MIO24.13
MKPSLKRRLLLLSRKFAKASIRKLLRQSSFSSHEFLLQAPFPAMSWYRRTKLVFDSLRRNINPKILPRSHVTSRINNPIGSSNPSAKFSSISSREVGLRSWTSLGRNTNRIAYNPFLSQPKRYYYVDRYQVRHFKPRGPGRWFQNPRTVFTVVLVGSVGLITLIVGNTETIPYTKRTHFILLSKPMEKLLGETQFEQIKKTYQGKILPATHPESIRVRLIAKEVIDALQRGLSNERVWSDLGYASTESSLGGGSDKGVKEMEMAMSGEDTMTDMKWSKEDQVLDDQWIQKSRKKDSKAHAATSHLEGISWEVLVVNEPIVNAFCLPAGKIVVFTGLLNHFKSDAEVATVIGHEVGHAVARHVAEGITKNLWFAILQLVLYQFVMPDLVNTMSALFLRLPFSRKMEIEADYIGLLLLASAGYDPRVAPTVYEKLGKLGGDALGDYLSTHPSGKKRSKLLAQANVMEEALMIYREVQAGRTGVEGFL

SEQ ID NO: 48030 - protein, 442 aa, Arabidopsis thaliana
  peptide (1)..(442): Ceres Seq. ID no. 13649625
  misc_feature (216)..(418): Homolog of NCBI NO: 34557683 NR Description: conserved hypothetical protein [Wolinella
  misc_feature (217)..(429): Homolog of NCBI NO: 23473121 NR Description: hypothetical protein [Desulfovibrio desulfuricans
  misc_feature (262)..(415): Homolog of NCBI NO: 40745859 NR Description: hypothetical protein AN1850.2 [Aspergillus
  misc_feature (13)..(182): Homolog of NCBI NO: 40745859 NR Description: hypothetical protein AN1850.2 [Aspergillus
  misc_feature (63)..(195): Homolog of NCBI NO: 19114452 NR Description: hypothetical peptidase 48 family protein
  misc_feature (258)..(430): Homolog of NCBI NO: 19114452 NR Description: hypothetical peptidase 48 family protein
  misc_feature (129)..(184): Homolog of NCBI NO: 6322940 NR Description: Hypothetical ORF; Ykr087cp [Saccharomyces
  misc_feature (260)..(423): Homolog of NCBI NO: 6322940 NR Description: Hypothetical ORF; Ykr087cp [Saccharomyces
  misc_feature (1)..(442): Homolog of NCBI NO: 30696099 NR Description: expressed protein [Arabidopsis thaliana]
  misc_feature (1)..(442): Homolog of NCBI NO: 10177873 NR Description: contains similarity to peptidase~gene_id:MIO24.13
MSWYRRTKLVFDSLRRNINPKILPRSHVTSRINNPIGSSNPSAKFSSISSREVGLRSWTSLGRNTNRIAYNPFLSQPKRYYYVDRYQVRHFKPRGPGRWFQNPRTVFTVVLVGSVGLITLIVGNTETIPYTKRTHFILLSKPMEKLLGETQFEQIKKTYQGKILPATHPESIRVRLIAKEVIDALQRGLSNERVWSDLGYASTESSLGGGSDKGVKEMEMAMSGEDTMTDMKWSKEDQVLDDQWIQKSRKKDSKAHAATSHLEGISWEVLVVNEPIVNAFCLPAGKIVVFTGLLNHFKSDAEVATVIGHEVGHAVARHVAEGITKNLWFAILQLVLYQFVMPDLVNTMSALFLRLPFSRKMEIEADYIGLLLLASAGYDPRVAPTVYEKLGKLGGDALGDYLSTHPSGKKRSKLLAQANVMEEALMIYREVQAGRTGVEGFL

SEQ ID NO: 48031 - protein, 300 aa, Arabidopsis thaliana
  peptide (1)..(300): Ceres Seq. ID no. 13649626
  misc_feature (74)..(276): Homolog of NCBI NO: 34557683 NR Description: conserved hypothetical protein [Wolinella
  misc_feature (75)..(287): Homolog of NCBI NO: 23473121 NR Description: hypothetical protein [Desulfovibrio desulfuricans
  misc_feature (120)..(273): Homolog of NCBI NO: 40745859 NR Description: hypothetical protein AN1850.2 [Aspergillus
  misc_feature (1)..(40): Homolog of NCBI NO: 40745859 NR Description: hypothetical protein AN1850.2 [Aspergillus
  misc_feature (1)..(53): Homolog of NCBI NO: 19114452 NR Description: hypothetical peptidase 48 family protein
  misc_feature (116)..(288): Homolog of NCBI NO: 19114452 NR Description: hypothetical peptidase 48 family protein
  misc_feature (1)..(42): Homolog of NCBI NO: 6322940 NR Description: Hypothetical ORF; Ykr087cp [Saccharomyces
  misc_feature (118)..(281): Homolog of NCBI NO: 6322940 NR Description: Hypothetical ORF; Ykr087cp [Saccharomyces
  misc_feature (1)..(300): Homolog of NCBI NO: 30696099 NR Description: expressed protein [Arabidopsis thaliana]
  misc_feature (1)..(300): Homolog of NCBI NO: 10177873 NR Description: contains similarity to peptidase~gene_id:MIO24.13
MEKLLGETQFEQIKKTYQGKILPATHPESIRVRLIAKEVIDALQRGLSNERVWSDLGYASTESSLGGGSDKGVKEMEMAMSGEDTMTDMKWSKEDQVLDDQWIQKSRKKDSKAHAATSHLEGISWEVLVVNEPIVNAFCLPAGKIVVFTGLLNHFKSDAEVATVIGHEVGHAVARHVAEGITKNLWFAILQLVLYQFVMPDLVNTMSALFLRLPFSRKMEIEADYIGLLLLASAGYDPRVAPTVYEKLGKLGGDALGDYLSTHPSGKKRSKLLAQANVMEEALMIYREVQAGRTGVEGFL

SEQ ID NO: 48032 - DNA, 1944 bp, Arabidopsis thaliana
  misc_feature (1)..(1944): Ceres Seq. ID no. 13649263
  misc_feature: MA Experiment ID: 20000185 Result: Down-regulated in Transcription
  misc_feature: MA Experiment 20000185 PARAMETER Experiment Name: At_Roots__P Parameter: Age (day) Value: 7 vs. 21
  misc_feature: MA Experiment 20000185 PARAMETER Experiment Name: At_Roots__P Parameter: Organism Value: A. thaliana
  misc_feature: MA Experiment 20000185 PARAMETER Experiment Name: At_Roots__P Parameter: Tissue Value: Roots vs. Whole Plant
  misc_feature: MA Experiment ID: 20000437 Result: Down-regulated in Transcription
  misc_feature: MA Experiment 20000437 PARAMETER Experiment Name: At_Drought_P Parameter: Age (day) Value: 8
  misc_feature: MA Experiment 20000437 PARAMETER Experiment Name: At_Drought_P Parameter: Organism Value: A. thaliana
  misc_feature: MA Experiment 20000437 PARAMETER Experiment Name: At_Drought_P Parameter: Plant Line Value: WS
  misc_feature: MA Experiment 20000437 PARAMETER Experiment Name: At_Drought_P Parameter: Timepoint (hr) Value: 24
  misc_feature: MA Experiment 20000437 PARAMETER Experiment Name: At_Drought_P Parameter: Tissue Value: Whole Plant
  misc_feature: MA Experiment 20000437 PARAMETER Experiment Name: At_Drought_P Parameter: Treatment Value: Drought vs. No Drought
ggcttcacaaaaccttccgataaacctcacaaccctcttcctcctcacactacagtaagaaaaacacgcgcgaaagctatggtaggagcttcaagaacaatcctatccctatctctatcatcttccctcttcaccttctccaaaatccctcacgtttttccatttctccgcctccacaaacccagattccaccacgcgtttcgtcctctttactccgccgccgcaacaacttcttctccgacgacggagactaatgttacagatccggatcaattgaaacatacgatcttactagagaggcttaggcttcgacatttgaaagaatcagcgaaaccaccacaacagagaccaagtagtgttgttggtgtagaggaagagagtagtattaggaagaagagtaagaagttagttgagaattttcaggaattgggtttaagtgaagaagttatgggagctttacaagagttgaatattgaggttcctactgagattcagtgtatcggaatacctgcggttatggaacgtaagagcgttgtattgggttcgcataccggttctggcaagactcttgcttacttgttgcctattgttcagctgatgagagaagatgaagcaaaccttggtaaaaaaacaaagcctagacgtcccaggactgttgttctttgtcctacaagagaactatctgagcaggtttaccgtgtggcgaagtccataagtcatcacgcgaggtttagatctatattggttagtggtggttctcggataagaccccaggaggattctttgaacaatgcaatagatatggttgttggaacccctggtaggattcttcagcatatcgaagaaggaaacatggtgtatggagatatcgcatatttggtattggatgaggcagatactatgtttgatcgtggctttggtcccgaaattcgtaaattccttgccccactgaatcaacgtgcgttgaaaacaaatgaccaaggatttcaaaccgtcttagtgactgctactatgacaatggctgttcagaagttagtcgatgaggagtttcaagggatagagcatttgcgtacatcaacactgcataaaaagatagcaaacgctcgccatgacttcatcaagctttcaggtggtgaagataagctagaagcacttctacaggttcttgaacctagcctagccaaagggagcaaggtgatggtcttctgtaacactttgaactccagtcgcgctgttgatcactatctttctgaaaaccagatctccactgtaaattatcacggtgaagttccagcagaacaaagggttgagaatttgaaaaagttcaaggacgaagaaggagactgtcccacgctagtgtgcacggatttggctgcaaggggtctggacctcgacgttgatcatgtagtcatgtttgatttcccaaagaactcgattgactaccttcatcgcactggaagaacagctcggatgggtgctaaaggaaaagtgacaagtctagtgagcaggaaggaccaaatgttagcagcacgaatcgaagaagcaatgagaaacaacgagagcttagaatcactcacgactgataatgtgaggagagacgccgcaagaacccatatcactcaagagaaaggaagaagcgttaagcagatcagagaagtgagcaagcaacgaaactccagagacaaaccatcatcatcatctcctcctgcaagatcgacaggtgggaagacacccgtgagaaagtcaagttcaagttcgttttcgaaaccaagaaaagcatcatctcctccagagaaatcttcaaagccaaaaagaaaaatattaaaaacggttggatccagatcgattgctgcgagggggaagacgggttcagatagaagaccaggaaagaaactaagtgttgttggtttccggggcaagtcttcttcggcaagagcctcttga

SEQ ID NO: 48033 - protein, 647 aa, Arabidopsis thaliana
  peptide (1)..(647): Ceres Seq. ID no. 13649264
  misc_feature (151)..(314): Pfam Name: DEAD/DEAH box helicase Pfam Description: DEAD/DEAH box helicase
  misc_feature (136)..(541): Homolog of NCBI NO: 12003026 NR Description: ATP-dependent RNA helicase DeaD [Synechococcus
  misc_feature (140)..(626): Homolog of NCBI NO: 22966149 NR Description: hypothetical protein [Rhodospirillum rubrum]
  misc_feature (139)..(628): Homolog of NCBI NO: 24375277 NR Description: ATP-dependent RNA helicase, DEAD box family
  misc_feature (128)..(574): Homolog of NCBI NO: 22988061 NR Description: hypothetical protein [Burkholderia fungorum]
  misc_feature (140)..(612): Homolog of NCBI NO: 22985814 NR Description: hypothetical protein [Burkholderia fungorum]
  misc_feature (140)..(603): Homolog of NCBI NO: 17546930 NR Description: PROBABLE ATP-DEPENDENT RNA HELICASE PROTEIN
  misc_feature (138)..(520): Homolog of NCBI NO: 15231353 NR Description: DEAD/DEAH box helicase, putative [Arabidopsis
  misc_feature (138)..(520): Homolog of NCBI NO: 27311829 NR Description: putative DEAD/DEAH box helicase [Arabidopsis
  misc_feature (54)..(610): Homolog of NCBI NO: 34906288 NR Description: unnamed protein product [Oryza sativa (japonica
  misc_feature (27)..(495): Homolog of NCBI NO: 7485607 NR Description: hypothetical protein F17A8.80 - Arabidopsis
GFTKPSDKPHNPLPPHTTVRKTRAKAMVGASRTILSLSLSSSLFTFSKIPHVFPFLRLHKPRFHHAFRPLYSAAATTSSPTTETNVTDPDQLKHTILLERLRLRHLKESAKPPQQRPSSVVGVEEESSIRKKSKKLVENFQELGLSEEVMGALQELNIEVPTEIQCIGIPAVMERKSVVLGSHTGSGKTLAYLLPIVQLMREDEANLGKKTKPRRPRTVVLCPTRELSEQVYRVAKSISHHARFRSILVSGGSRIRPQEDSLNNAIDMVVGTPGRILQHIEEGNMVYGDIAYLVLDEADTMFDRGFGPEIRKFLAPLNQRALKTNDQGFQTVLVTATMTMAVQKLVDEEFQGIEHLRTSTLHKKIANARHDFIKLSGGEDKLEALLQVLEPSLAKGSKVMVFCNTLNSSRAVDHYLSENQISTVNYHGEVPAEQRVENLKKFKDEEGDCPTLVCTDLAARGLDLDVDHVVMFDFPKNSIDYLHRTGRTARMGAKGKVTSLVSRKDQMLAARIEEAMRNNESLESLTTDNVRRDAARTHITQEKGRSVKQIREVSKQRNSRDKPSSSSPPARSTGGKTPVRKSSSSSFSKPRKASSPPEKSSKPKRKILKTVGSRSIAARGKTGSDRRPGKKLSVVGFRGKSSSARAS

SEQ ID NO: 48034 - protein, 621 aa, Arabidopsis thaliana
  peptide (1)..(621): Ceres Seq. ID no. 13649265
  misc_feature (125)..(288): Pfam Name: DEAD/DEAH box helicase Pfam Description: DEAD/DEAH box helicase
  misc_feature (110)..(515): Homolog of NCBI NO: 12003026 NR Description: ATP-dependent RNA helicase DeaD [Synechococcus
  misc_feature (114)..(600): Homolog of NCBI NO: 22966149 NR Description: hypothetical protein [Rhodospirillum rubrum]
  misc_feature (113)..(602): Homolog of NCBI NO: 24375277 NR Description: ATP-dependent RNA helicase, DEAD box family
  misc_feature (102)..(548): Homolog of NCBI NO: 22988061 NR Description: hypothetical protein [Burkholderia fungorum]
  misc_feature (114)..(586): Homolog of NCBI NO: 22985814 NR Description: hypothetical protein [Burkholderia fungorum]
  misc_feature (114)..(577): Homolog of NCBI NO: 17546930 NR Description: PROBABLE ATP-DEPENDENT RNA HELICASE PROTEIN
  misc_feature (112)..(494): Homolog of NCBI NO: 15231353 NR Description: DEAD/DEAH box helicase, putative [Arabidopsis
  misc_feature (112)..(494): Homolog of NCBI NO: 27311829 NR Description: putative DEAD/DEAH box helicase [Arabidopsis
  misc_feature (28)..(584): Homolog of NCBI NO: 34906288 NR Description: unnamed protein product [Oryza sativa (japonica
  misc_feature (1)..(469): Homolog of NCBI NO: 7485607 NR Description: hypothetical protein F17A8.80 - Arabidopsis
MVGASRTILSLSLSSSLFTFSKIPHVFPFLRLHKPRFHHAFRPLYSAAATTSSPTTETNVTDPDQLKHTILLERLRLRHLKESAKPPQQRPSSVVGVEEESSIRKKSKKLVENFQELGLSEEVMGALQELNIEVPTEIQCIGIPAVMERKSVVLGSHTGSGKTLAYLLPIVQLMREDEANLGKKTKPRRPRTVVLCPTRELSEQVYRVAKSISHHARFRSILVSGGSRIRPQEDSLNNAIDMVVGTPGRILQHIEEGNMVYGDIAYLVLDEADTMFDRGFGPEIRKFLAPLNQRALKTNDQGFQTVLVTATMTMAVQKLVDEEFQGIEHLRTSTLHKKIANARHDFIKLSGGEDKLEALLQVLEPSLAKGSKVMVFCNTLNSSRAVDHYLSENQISTVNYHGEVPAEQRVENLKKFKDEEGDCPTLVCTDLAARGLDLDVDHVVMFDFPKNSIDYLHRTGRTARMGAKGKVTSLVSRKDQMLAARIEEAMRNNESLESLTTDNVRRDAARTHITQEKGRSVKQIREVSKQRNSRDKPSSSSPPARSTGGKTPVRKSSSSSFSKPRKASSPPEKSSKPKRKILKTVGSRSIAARGKTGSDRRPGKKLSVVGFRGKSSSARAS

SEQ ID NO: 48035 - protein, 498 aa, Arabidopsis thaliana
  peptide (1)..(498): Ceres Seq. ID no. 13649266
  misc_feature (2)..(165): Pfam Name: DEAD/DEAH box helicase Pfam Description: DEAD/DEAH box helicase
  misc_feature (1)..(392): Homolog of NCBI NO: 12003026 NR Description: ATP-dependent RNA helicase DeaD [Synechococcus
  misc_feature (1)..(477): Homolog of NCBI NO: 22966149 NR Description: hypothetical protein [Rhodospirillum rubrum]
  misc_feature (1)..(479): Homolog of NCBI NO: 24375277 NR Description: ATP-dependent RNA helicase, DEAD box family
  misc_feature (1)..(425): Homolog of NCBI NO: 22988061 NR Description: hypothetical protein [Burkholderia fungorum]
  misc_feature (1)..(463): Homolog of NCBI NO: 22985814 NR Description: hypothetical protein [Burkholderia fungorum]
  misc_feature (1)..(454): Homolog of NCBI NO: 17546930 NR Description: PROBABLE ATP-DEPENDENT RNA HELICASE PROTEIN
  misc_feature (1)..(371): Homolog of NCBI NO: 15231353 NR Description: DEAD/DEAH box helicase, putative [Arabidopsis
  misc_feature (1)..(371): Homolog of NCBI NO: 27311829 NR Description: putative DEAD/DEAH box helicase [Arabidopsis
  misc_feature (1)..(461): Homolog of NCBI NO: 34906288 NR Description: unnamed protein product [Oryza sativa (japonica
  misc_feature (1)..(346): Homolog of NCBI NO: 7485607 NR Description: hypothetical protein F17A8.80 - Arabidopsis
MGALQELNIEVPTEIQCIGIPAVMERKSVVLGSHTGSGKTLAYLLPIVQLMREDEANLGKKTKPRRPRTVVLCPTRELSEQVYRVAKSISHHARFRSILVSGGSRIRPQEDSLNNAIDMVVGTPGRILQHIEEGNMVYGDIAYLVLDEADTMFDRGFGPEIRKFLAPLNQRALKTNDQGFQTVLVTATMTMAVQKLVDEEFQGIEHLRTSTLHKKIANARHDFIKLSGGEDKLEALLQVLEPSLAKGSKVMVFCNTLNSSRAVDHYLSENQISTVNYHGEVPAEQRVENLKKFKDEEGDCPTLVCTDLAARGLDLDVDHVVMFDFPKNSIDYLHRTGRTARMGAKGKVTSLVSRKDQMLAARIEEAMRNNESLESLTTDNVRRDAARTHITQEKGRSVKQIREVSKQRNSRDKPSSSSPPARSTGGKTPVRKSSSSSFSKPRKASSPPEKSSKPKRKILKTVGSRSIAARGKTGSDRRPGKKLSVVGFRGKSSSARAS

SEQ ID NO: 48036 - DNA, 2765 bp, Arabidopsis thaliana; identical to SEQ ID NO: 46527
  misc_feature (1)..(2765): Ceres Seq. ID no. 13579248
  misc_feature: MA Experiment ID: 20000307 Result: Up-regulated in Transcription
  misc_feature: MA Experiment 20000307 PARAMETER Experiment Name: At_Germinating_Seeds_Sub_P Parameter: Age (hr) Value: 24 vs. 0
  misc_feature: MA Experiment 20000307 PARAMETER Experiment Name: At_Germinating_Seeds_Sub_P Parameter: Organism Value: A. thaliana
  misc_feature: MA Experiment 20000307 PARAMETER Experiment Name: At_Germinating_Seeds_Sub_P Parameter: Plant Line Value: WS
  misc_feature: MA Experiment 20000307 PARAMETER Experiment Name: At_Germinating_Seeds_Sub_P Parameter: Tissue Value: Germinating Seeds
  misc_feature: MA Experiment ID: 20000315 Result: Down-regulated in Transcription
  misc_feature: MA Experiment 20000315 PARAMETER Experiment Name: At_14day_Shoots-Roots_Sub_P Parameter: Age (day) Value: 14
  misc_feature: MA Experiment 20000315 PARAMETER Experiment Name: At_14day_Shoots-Roots_Sub_P Parameter: Organism Value: A. thaliana
  misc_feature: MA Experiment 20000315 PARAMETER Experiment Name: At_14day_Shoots-Roots_Sub_P Parameter: Plant Line Value: WS
  misc_feature: MA Experiment 20000315 PARAMETER Experiment Name: At_14day_Shoots-Roots_Sub_P Parameter: Tissue Value: Shoots vs. Whole Plant
  misc_feature: MA Experiment ID: 20000327 Result: Down-regulated in Transcription
  misc_feature: MA Experiment 20000327 PARAMETER Experiment Name: At_42deg_Heat_Sub_P Parameter: Age (day) Value: 14
  misc_feature: MA Experiment 20000327 PARAMETER Experiment Name: At_42deg_Heat_Sub_P Parameter: Organism Value: A. thaliana
  misc_feature: MA Experiment 20000327 PARAMETER Experiment Name: At_42deg_Heat_Sub_P Parameter: Plant Line Value: WS
  misc_feature: MA Experiment 20000327 PARAMETER Experiment Name: At_42deg_Heat_Sub_P Parameter: Temperature (deg C) Value: 42 vs. 22
  misc_feature: MA Experiment 20000327 PARAMETER Experiment Name: At_42deg_Heat_Sub_P Parameter: Timepoint (hr) Value: 1
  misc_feature: MA Experiment 20000327 PARAMETER Experiment Name: At_42deg_Heat_Sub_P Parameter: Tissue Value: Aerial
  misc_feature: MA Experiment ID: 20000328 Result: Down-regulated in Transcription
  misc_feature: MA Experiment 20000328 PARAMETER Experiment Name: At_42deg_Heat_Sub_P Parameter: Age (day) Value: 14
  misc_feature: MA Experiment 20000328 PARAMETER Experiment Name: At_42deg_Heat_Sub_P Parameter: Organism Value: A. thaliana
  misc_feature: MA Experiment 20000328 PARAMETER Experiment Name: At_42deg_Heat_Sub_P Parameter: Plant Line Value: WS
  misc_feature: MA Experiment 20000328 PARAMETER Experiment Name: At_42deg_Heat_Sub_P Parameter: Temperature (deg C) Value: 42 vs. 22
  misc_feature: MA Experiment 20000328 PARAMETER Experiment Name: At_42deg_Heat_Sub_P Parameter: Timepoint (hr) Value: 6
  misc_feature: MA Experiment 20000328 PARAMETER Experiment Name: At_42deg_Heat_Sub_P Parameter: Tissue Value: Aerial

SEQ ID NO: 48037 - protein, 829 aa, Arabidopsis thaliana; identical to SEQ ID NO: 46528
  peptide (1)..(829): Ceres Seq. ID no. 13579249
  misc_feature (553)..(737): Pfam Name: ATPase family associated with various cellular Pfam Description: ATPase family associated with various cellular
  misc_feature (553)..(737): Pfam Name: ATPase family associated with various cellular Pfam Description: ATPase family associated with various cellular
  misc_feature (553)..(737): Pfam Name: ATPase family associated with various cellular Pfam Description: ATPase family associated with various cellular
  misc_feature (1)..(448): Homolog of NCBI NO: 34912822 NR Description: P0501G01.20 [Oryza sativa (japonica
  misc_feature (1)..(116): Homolog of NCBI NO: 15234347 NR Description: hypothetical protein [Arabidopsis thaliana]
  misc_feature (440)..(829): Homolog of NCBI NO: 15234347 NR Description: hypothetical protein [Arabidopsis thaliana]
  misc_feature (745)..(829): Homolog of NCBI NO: 25404926 NR Description: protein F22C12.12 [imported] - Arabidopsis
  misc_feature (160)..(750): Homolog of NCBI NO: 25404926 NR Description: protein F22C12.12 [imported] - Arabidopsis
  misc_feature (1)..(448): Homolog of NCBI NO: 34912822 NR Description: P0501G01.20 [Oryza sativa (japonica
  misc_feature (440)..(829): Homolog of NCBI NO: 15234347 NR Description: hypothetical protein [Arabidopsis thaliana]
  misc_feature (160)..(750): Homolog of NCBI NO: 25404926 NR Description: protein F22C12.12 [imported] - Arabidopsis
  misc_feature (745)..(829): Homolog of NCBI NO: 25404926 NR Description: protein F22C12.12 [imported] - Arabidopsis
  misc_feature (440)..(829): Homolog of NCBI NO: 15234347 NR Description: hypothetical protein [Arabidopsis thaliana]
  misc_feature (1)..(116): Homolog of NCBI NO: 15234347 NR Description: hypothetical protein [Arabidopsis thaliana]
  misc_feature (1)..(448): Homolog of NCBI NO: 34912822 NR Description: P0501G01.20 [Oryza sativa (japonica
  misc_feature (1)..(829): Homolog of NCBI NO: 30696968 NR Description: expressed protein [Arabidopsis thaliana]
  misc_feature (6)..(829): Homolog of NCBI NO: 18407974 NR Description: expressed protein [Arabidopsis thaliana]
  misc_feature (8)..(725): Homolog of NCBI NO: 34904204 NR Description: P0492F05.26 [Oryza sativa (japonica
  misc_feature (733)..(829): Homolog of NCBI NO: 34904204 NR Description: P0492F05.26 [Oryza sativa (japonica
  misc_feature (1)..(747): Homolog of NCBI NO: 17065032 NR Description: similar to homeobox protein [Arabidopsis thaliana]
  misc_feature (1)..(829): Homolog of NCBI NO: 30696968 NR Description: expressed protein [Arabidopsis thaliana]
  misc_feature (6)..(829): Homolog of NCBI NO: 18407974 NR Description: expressed protein [Arabidopsis thaliana]
  misc_feature (8)..(725): Homolog of NCBI NO: 34904204 NR Description: P0492F05.26 [Oryza sativa (japonica
  misc_feature (733)..(829): Homolog of NCBI NO: 34904204 NR Description: P0492F05.26 [Oryza sativa (japonica
  misc_feature (1)..(747): Homolog of NCBI NO: 17065032 NR Description: similar to homeobox protein [Arabidopsis thaliana]
  misc_feature (160)..(750): Homolog of NCBI NO: 25404926 NR Description: protein F22C12.12 [imported] - Arabidopsis
  misc_feature (745)..(829): Homolog of NCBI NO: 25404926 NR Description: protein F22C12.12 [imported] - Arabidopsis
  misc_feature (1)..(116): Homolog of NCBI NO: 15234347 NR Description: hypothetical protein [Arabidopsis thaliana]
  misc_feature (1)..(747): Homolog of NCBI NO: 17065032 NR Description: similar to homeobox protein [Arabidopsis thaliana]
  misc_feature (733)..(829): Homolog of NCBI NO: 34904204 NR Description: P0492F05.26 [Oryza sativa (japonica
  misc_feature (8)..(725): Homolog of NCBI NO: 34904204 NR Description: P0492F05.26 [Oryza sativa (japonica
  misc_feature (6)..(829): Homolog of NCBI NO: 18407974 NR Description: expressed protein [Arabidopsis thaliana]
  misc_feature (1)..(829): Homolog of NCBI NO: 30696968 NR Description: expressed protein [Arabidopsis thaliana]

SEQ ID NO: 48038 - protein, 712 aa, Arabidopsis thaliana; identical to SEQ ID NO: 46529
  peptide (1)..(712): Ceres Seq. ID no. 13579250
  misc_feature (436)..(620): Pfam Name: ATPase family associated with various cellular Pfam Description: ATPase family associated with various cellular
  misc_feature (436)..(620): Pfam Name: ATPase family associated with various cellular Pfam Description: ATPase family associated with various cellular
  misc_feature (436)..(620): Pfam Name: ATPase family associated with various cellular Pfam Description: ATPase family associated with various cellular
  misc_feature (323)..(694): Homolog of NCBI NO: 34912822 NR Description: P0501G01.20 [Oryza sativa (japonica
  misc_feature (1)..(331): Homolog of NCBI NO: 34912822 NR Description: P0501G01.20 [Oryza sativa (japonica
  misc_feature (323)..(712): Homolog of NCBI NO: 15234347 NR Description: hypothetical protein [Arabidopsis thaliana]
  misc_feature (628)..(712): Homolog of NCBI NO: 25404926 NR Description: protein F22C12.12 [imported] - Arabidopsis
  misc_feature (43)..(633): Homolog of NCBI NO: 25404926 NR Description: protein F22C12.12 [imported] - Arabidopsis
  misc_feature (323)..(694): Homolog of NCBI NO: 34912822 NR Description: P0501G01.20 [Oryza sativa (japonica
  misc_feature (323)..(712): Homolog of NCBI NO: 15234347 NR Description: hypothetical protein [Arabidopsis thaliana]
  misc_feature (43)..(633): Homolog of NCBI NO: 25404926 NR Description: protein F22C12.12 [imported] - Arabidopsis
  misc_feature (628)..(712): Homolog of NCBI NO: 25404926 NR Description: protein F22C12.12 [imported] - Arabidopsis
  misc_feature (323)..(712): Homolog of NCBI NO: 15234347 NR Description: hypothetical protein [Arabidopsis thaliana]
  misc_feature (1)..(331): Homolog of NCBI NO: 34912822 NR Description: P0501G01.20 [Oryza sativa (japonica
  misc_feature (323)..(694): Homolog of NCBI NO: 34912822 NR Description: P0501G01.20 [Oryza sativa (japonica
  misc_feature (1)..(712): Homolog of NCBI NO: 30696968 NR Description: expressed protein [Arabidopsis thaliana]
  misc_feature (1)..(712): Homolog of NCBI NO: 18407974 NR Description: expressed protein [Arabidopsis thaliana]
  misc_feature (1)..(608): Homolog of NCBI NO: 34904204 NR Description: P0492F05.26 [Oryza sativa (japonica
  misc_feature (616)..(712): Homolog of NCBI NO: 34904204 NR Description: P0492F05.26 [Oryza sativa (japonica
  misc_feature (1)..(630): Homolog of NCBI NO: 17065032 NR Description: similar to homeobox protein [Arabidopsis thaliana]
  misc_feature (1)..(712): Homolog of NCBI NO: 30696968 NR Description: expressed protein [Arabidopsis thaliana]
  misc_feature (1)..(712): Homolog of NCBI NO: 18407974 NR Description: expressed protein [Arabidopsis thaliana]
  misc_feature (1)..(608): Homolog of NCBI NO: 34904204 NR Description: P0492F05.26 [Oryza sativa (japonica
  misc_feature (616)..(712): Homolog of NCBI NO: 34904204 NR Description: P0492F05.26 [Oryza sativa (japonica
  misc_feature (1)..(630): Homolog of NCBI NO: 17065032 NR Description: similar to homeobox protein [Arabidopsis thaliana]
  misc_feature (43)..(633): Homolog of NCBI NO: 25404926 NR Description: protein F22C12.12 [imported] - Arabidopsis
  misc_feature (628)..(712): Homolog of NCBI NO: 25404926 NR Description: protein F22C12.12 [imported] - Arabidopsis
  misc_feature (1)..(331): Homolog of NCBI NO: 34912822 NR Description: P0501G01.20 [Oryza sativa (japonica
  misc_feature (1)..(630): Homolog of NCBI NO: 17065032 NR Description: similar to homeobox protein [Arabidopsis thaliana]
  misc_feature (616)..(712): Homolog of NCBI NO: 34904204 NR Description: P0492F05.26 [Oryza sativa (japonica
  misc_feature (1)..(608): Homolog of NCBI NO: 34904204 NR Description: P0492F05.26 [Oryza sativa (japonica
  misc_feature (1)..(712): Homolog of NCBI NO: 18407974 NR Description: expressed protein [Arabidopsis thaliana]
  misc_feature (1)..(712): Homolog of NCBI NO: 30696968 NR Description: expressed protein [Arabidopsis thaliana]

SEQ ID NO: 48039 - protein, 658 aa, Arabidopsis thaliana; identical to SEQ ID NO: 46530
  peptide (1)..(658): Ceres Seq. ID no. 13579251
  misc_feature (382)..(566): Pfam Name: ATPase family associated with various cellular Pfam Description: ATPase family associated with various cellular
  misc_feature (382)..(566): Pfam Name: ATPase family associated with various cellular Pfam Description: ATPase family associated with various cellular
  misc_feature (382)..(566): Pfam Name: ATPase family associated with various cellular Pfam Description: ATPase family associated with various cellular
  misc_feature (269)..(640): Homolog of NCBI NO: 34912822 NR Description: P0501G01.20 [Oryza sativa (japonica
  misc_feature (1)..(277): Homolog of NCBI NO: 34912822 NR Description: P0501G01.20 [Oryza sativa (japonica
  misc_feature (269)..(658): Homolog of NCBI NO: 15234347 NR Description: hypothetical protein [Arabidopsis thaliana]
  misc_feature (574)..(658): Homolog of NCBI NO: 25404926 NR Description: protein F22C12.12 [imported] - Arabidopsis
  misc_feature (1)..(579): Homolog of NCBI NO: 25404926 NR Description: protein F22C12.12 [imported] - Arabidopsis
  misc_feature (269)..(640): Homolog of NCBI NO: 34912822 NR Description: P0501G01.20 [Oryza sativa (japonica
  misc_feature (269)..(658): Homolog of NCBI NO: 15234347 NR Description: hypothetical protein [Arabidopsis thaliana]
  misc_feature (1)..(579): Homolog of NCBI NO: 25404926 NR Description: protein F22C12.12 [imported] - Arabidopsis
  misc_feature (574)..(658): Homolog of NCBI NO: 25404926 NR Description: protein F22C12.12 [imported] - Arabidopsis
  misc_feature (269)..(658): Homolog of NCBI NO: 15234347 NR Description: hypothetical protein [Arabidopsis thaliana]
  misc_feature (1)..(277): Homolog of NCBI NO: 34912822 NR Description: P0501G01.20 [Oryza sativa (japonica
  misc_feature (269)..(640): Homolog of NCBI NO: 34912822 NR Description: P0501G01.20 [Oryza sativa (japonica
  misc_feature (1)..(658): Homolog of NCBI NO: 30696968 NR Description: expressed protein [Arabidopsis thaliana]
  misc_feature (1)..(658): Homolog of NCBI NO: 18407974 NR Description: expressed protein [Arabidopsis thaliana]
  misc_feature (1)..(554): Homolog of NCBI NO: 34904204 NR Description: P0492F05.26 [Oryza sativa (japonica
  misc_feature (562)..(658): Homolog of NCBI NO: 34904204 NR Description: P0492F05.26 [Oryza sativa (japonica
  misc_feature (1)..(576): Homolog of NCBI NO: 17065032 NR Description: similar to homeobox protein [Arabidopsis thaliana]
  misc_feature (1)..(658): Homolog of NCBI NO: 30696968 NR Description: expressed protein [Arabidopsis thaliana]
  misc_feature (1)..(658): Homolog of NCBI NO: 18407974 NR Description: expressed protein [Arabidopsis thaliana]
  misc_feature (1)..(554): Homolog of NCBI NO: 34904204 NR Description: P0492F05.26 [Oryza sativa (japonica
  misc_feature (562)..(658): Homolog of NCBI NO: 34904204 NR Description: P0492F05.26 [Oryza sativa (japonica
  misc_feature (1)..(576): Homolog of NCBI NO: 17065032 NR Description: similar to homeobox protein [Arabidopsis thaliana]
  misc_feature (1)..(579): Homolog of NCBI NO: 25404926 NR Description: protein F22C12.12 [imported] - Arabidopsis
  misc_feature (574)..(658): Homolog of NCBI NO: 25404926 NR Description: protein F22C12.12 [imported] - Arabidopsis
  misc_feature (1)..(277): Homolog of NCBI NO: 34912822 NR Description: P0501G01.20 [Oryza sativa (japonica
  misc_feature (1)..(576): Homolog of NCBI NO: 17065032 NR Description: similar to homeobox protein [Arabidopsis thaliana]
  misc_feature (562)..(658): Homolog of NCBI NO: 34904204 NR Description: P0492F05.26 [Oryza sativa (japonica
  misc_feature (1)..(554): Homolog of NCBI NO: 34904204 NR Description: P0492F05.26 [Oryza sativa (japonica
  misc_feature (1)..(658): Homolog of NCBI NO: 18407974 NR Description: expressed protein [Arabidopsis thaliana]
  misc_feature (1)..(658): Homolog of NCBI NO: 30696968 NR Description: expressed protein [Arabidopsis thaliana]

SEQ ID NO: 48040 - DNA, 1527 bp, Arabidopsis thaliana
  misc_feature (1)..(1527): Ceres Seq. ID no. 12659104
  misc_feature: MA Experiment ID: 20000180 Result: Down-regulated in Transcription
  misc_feature: MA Experiment 20000180 PARAMETER Experiment Name: At_Germinating_Seeds_P Parameter: Age (hr) Value: 24 vs. 0
  misc_feature: MA Experiment 20000180 PARAMETER Experiment Name: At_Germinating_Seeds_P Parameter: Tissue Value: Germinating Seeds
  misc_feature: MA Experiment ID: 20000185 Result: Down-regulated in Transcription
  misc_feature: MA Experiment 20000185 PARAMETER Experiment Name: At_Roots__P Parameter: Age (day) Value: 7 vs. 21
  misc_feature: MA Experiment 20000185 PARAMETER Experiment Name: At_Roots__P Parameter: Organism Value: A. thaliana
  misc_feature: MA Experiment 20000185 PARAMETER Experiment Name: At_Roots__P Parameter: Tissue Value: Roots vs. Whole Plant
  misc_feature: MA Experiment ID: 20000234 Result: Up-regulated in Transcription
  misc_feature: MA Experiment 20000234 PARAMETER Experiment Name: At_Siliques_P Parameter: Age (day) Value: 21
  misc_feature: MA Experiment 20000234 PARAMETER Experiment Name: At_Siliques_P Parameter: Organism Value: A. thaliana
  misc_feature: MA Experiment 20000234 PARAMETER Experiment Name: At_Siliques_P Parameter: Plant Line Value: WS
  misc_feature: MA Experiment 20000234 PARAMETER Experiment Name: At_Siliques_P Parameter: Tissue Value: Less Than 5mm Siliques vs. Whole Plant
  misc_feature: MA Experiment ID: 20000235 Result: Up-regulated in Transcription
  misc_feature: MA Experiment 20000235 PARAMETER Experiment Name: At_Siliques_P Parameter: Age (day) Value: 21
  misc_feature: MA Experiment 20000235 PARAMETER Experiment Name: At_Siliques_P Parameter: Organism Value: A. thaliana
  misc_feature: MA Experiment 20000235 PARAMETER Experiment Name: At_Siliques_P Parameter: Plant Line Value: WS
  misc_feature: MA Experiment 20000235 PARAMETER Experiment Name: At_Siliques_P Parameter: Tissue Value: 5-10mm Siliques vs. Whole Plant
  misc_feature: MA Experiment ID: 20000264 Result: Up-regulated in Transcription
  misc_feature: MA Experiment 20000264 PARAMETER Experiment Name: At_Open_Flower_P Parameter: Age (day) Value: 21
  misc_feature: MA Experiment 20000264 PARAMETER Experiment Name: At_Open_Flower_P Parameter: Plant Line Value: WS
  misc_feature: MA Experiment 20000264 PARAMETER Experiment Name: At_Open_Flower_P Parameter: Tissue Value: Open Flower vs. Whole Plant
  misc_feature: MA Experiment ID: 20000439 Result: Down-regulated in Transcription
  misc_feature: MA Experiment 20000439 PARAMETER Experiment Name: At_Roots__P Parameter: Age (day) Value: 14 vs. 21
  misc_feature: MA Experiment 20000439 PARAMETER Experiment Name: At_Roots__P Parameter: Organism Value: A. thaliana
  misc_feature: MA Experiment 20000439 PARAMETER Experiment Name: At_Roots__P Parameter: Tissue Value: Roots vs. Whole Plant
  misc_feature: MA Experiment ID: 20000794 Result: Down-regulated in Transcription
  misc_feature: MA Experiment 20000794 PARAMETER Experiment Name: At_Petals_P Parameter: Age (day) Value: 23-25 days
  misc_feature: MA Experiment 20000794 PARAMETER Experiment Name: At_Petals_P Parameter: Plant Line Value: WS
  misc_feature: MA Experiment 20000794 PARAMETER Experiment Name: At_Petals_P Parameter: Tissue Value: Petals vs. Whole plant
  misc_feature: MA Experiment ID: 20001248 Result: Up-regulated in Transcription
  misc_feature: MA Experiment 20001248 PARAMETER Experiment Name: At_Far-red-induction_P Parameter: Age (day) Value: 7
  misc_feature: MA Experiment 20001248 PARAMETER Experiment Name: At_Far-red-induction_P Parameter: Light Value: Far-red vs. White
  misc_feature: MA Experiment 20001248 PARAMETER Experiment Name: At_Far-red-induction_P Parameter: Organism Value: A. thaliana
  misc_feature: MA Experiment 20001248 PARAMETER Experiment Name: At_Far-red-induction_P Parameter: Plant Line Value: Columbia
  misc_feature: MA Experiment 20001248 PARAMETER Experiment Name: At_Far-red-induction_P Parameter: Timepoint (hr) Value: 4
  misc_feature: MA Experiment 20001248 PARAMETER Experiment Name: At_Far-red-induction_P Parameter: Tissue Value: Whole Plant
  misc_feature: MA Experiment ID: 20001451 Result: Up-regulated in Transcription
  misc_feature: MA Experiment 20001451 PARAMETER Experiment Name: At_Far-red-induction_P Parameter: Age (day) Value: 7
  misc_feature: MA Experiment 20001451 PARAMETER Experiment Name: At_Far-red-induction_P Parameter: Light Value: Far-red vs. White
  misc_feature: MA Experiment 20001451 PARAMETER Experiment Name: At_Far-red-induction_P Parameter: Organism Value: A. thaliana
  misc_feature: MA Experiment 20001451 PARAMETER Experiment Name: At_Far-red-induction_P Parameter: Plant Line Value: Columbia
  misc_feature: MA Experiment 20001451 PARAMETER Experiment Name: At_Far-red-induction_P Parameter: Timepoint (hr) Value: 24
  misc_feature: MA Experiment 20001451 PARAMETER Experiment Name: At_Far-red-induction_P Parameter: Tissue Value: Whole Plant
atgccttcagtcggaattgtcatcggagatggcaaaaaagaatatcctggtaaactcactctttacgtcaccgtgacatgtattgtcgccgccatgggtggtctcatcttcggttacgacatcggtatctccggtggagtgacgacaatggattcgtttcagcaaaagttcttcccgtcggtttacgagaaacagaagaaggatcatgattcaaaccaatactgcagatttgacagcgtttctctcactctcttcacttcctctctttacctcgccgcactctgctcctccctcgttgcctcttacgttacccgtcagtttggccggaaaatttcgatgcttctcggtggagttctcttctgcgccggagctcttcttaacggtttcgcaactgccgtttggatgctcatcgttggtcgtttgttactcggtttcggtatcggcttcaccaatcagtctgtgccgttgtatctctcggagatggcaccgtataaatacagaggagcattgaacatcggattccagctctcaatcaccattggtatccttgtcgccaacgttttgaacttcttcttctccaaaatcagttggggttggagactcagtctcggcggcgccgtcgttccggcactcatcatcaccgtcggttctcttatcctcccggacacaccaaactccatgatcgagagaggtcaatttaggctagcggaagcgaaactccgtaagattcgtggcgtcgacgacattgatgacgagatcaacgatttgatcatcgccagtgaagcttcgaagctcgttgagcatccatggaggaatctgttgcagaggaagtatagaccacatctaacgatggcgattctgattccggcatttcagcagcttaccggaatcaatgttataatgttctacgcgccggttctgtttcaaacgattggatttggtagcgacgcggctctgatttcggcggttgtgaccggtttggttaacgttggagccaccgtggtgtcaatctatggcgttgataaatggggaagacgatttctattccttgaaggaggattccaaatgctaatttctcaggtagctgttgcggcggcgatcggagctaagttcggtgtcgatggaaccccaggcgttttaccaaaatggtacgccattgttgtggttttgttcatatgcatctacgtggcggcgtttgcttggtcgtggggtccactaggatggttagtgccatcggagatttttccgttggaaatccgatcagcggctcagagcataacggtgtcggtgaacatgatcttcacgttcttgattgcacaagtgtttttgatgatgctttgccacttgaagttcgggttgttcatattcttcgcgtttttcgtggtggtgatgtcgattttcgtctatcttttcttaccggagacaagaggagtgccgatcgaggagatgaatcgggtctggagatcacattggtattggtcgaagttcgttgacgccgagaagaatctaacgaaagttgttatctag

SEQ ID NO: 48041 - protein, 508 aa, Arabidopsis thaliana
  peptide (1)..(508): Ceres Seq. ID no. 12659105
  misc_feature (26)..(487): Pfam Name: Sugar (and other) transporter Pfam Description: Sugar (and other) transporter
  misc_feature (1)..(498): Homolog of NCBI NO: 1353516 NR Description: sugar transporter
  misc_feature (5)..(497): Homolog of NCBI NO: 100347 NR Description: monosaccharide transport protein MST1 - common
  misc_feature (1)..(498): Homolog of NCBI NO: 4138722 NR Description: hexose transporter [Vitis vinifera]
  misc_feature (1)..(498): Homolog of NCBI NO: 4138724 NR Description: hexose transporter [Vitis vinifera]
  misc_feature (1)..(497): Homolog of NCBI NO: 3915039 NR Description: Sugar carrier protein C
  misc_feature (1)..(498): Homolog of NCBI NO: 21618276 NR Description: glucose transporter [Arabidopsis thaliana]
  misc_feature (1)..(498): Homolog of NCBI NO: 15220330 NR Description: glucose transporter
  misc_feature (1)..(498): Homolog of NCBI NO: 81619 NR Description: glucose transport protein STP1 - Arabidopsis
  misc_feature (1)..(500): Homolog of NCBI NO: 30349804 NR Description: monosaccharide-H+ symporter [Datisca glomerata]
  misc_feature (1)..(508): Homolog of NCBI NO: 15234474 NR Description: glucose transporter; protein id: At4g21480.1
MPSVGIVIGDGKKEYPGKLTLYVTVTCIVAAMGGLIFGYDIGISGGVTTMDSFQQKFFPSVYEKQKKDHDSNQYCRFDSVSLTLFTSSLYLAALCSSLVASYVTRQFGRKISMLLGGVLFCAGALLNGFATAVWMLIVGRLLLGFGIGFTNQSVPLYLSEMAPYKYRGALNIGFQLSITIGILVANVLNFFFSKISWGWRLSLGGAVVPALIITVGSLILPDTPNSMIERGQFRLAEAKLRKIRGVDDIDDEINDLIIASEASKLVEHPWRNLLQRKYRPHLTMAILIPAFQQLTGINVIMFYAPVLFQTIGFGSDAALISAVVTGLVNVGATVVSIYGVDKWGRRFLFLEGGFQMLISQVAVAAAIGAKFGVDGTPGVLPKWYAIVVVLFICIYVAAFAWSWGPLGWLVPSEIFPLEIRSAAQSITVSVNMIFTFLIAQVFLMMLCHLKFGLFIFFAFFVVVMSIFVYLFLPETRGVPIEEMNRVWRSHWYWSKFVDAEKNLTKVVI

SEQ ID NO: 48042 - protein, 477 aa, Arabidopsis thaliana
  peptide (1)..(477): Ceres Seq. ID no. 12659106
  misc_feature (1)..(456): Pfam Name: Sugar (and other) transporter Pfam Description: Sugar (and other) transporter
  misc_feature (1)..(467): Homolog of NCBI NO: 1353516 NR Description: sugar transporter
  misc_feature (1)..(466): Homolog of NCBI NO: 100347 NR Description: monosaccharide transport protein MST1 - common
  misc_feature (1)..(467): Homolog of NCBI NO: 4138722 NR Description: hexose transporter [Vitis vinifera]
  misc_feature (1)..(467): Homolog of NCBI NO: 4138724 NR Description: hexose transporter [Vitis vinifera]
  misc_feature (1)..(466): Homolog of NCBI NO: 3915039 NR Description: Sugar carrier protein C
  misc_feature (1)..(467): Homolog of NCBI NO: 21618276 NR Description: glucose transporter [Arabidopsis thaliana]
  misc_feature (1)..(467): Homolog of NCBI NO: 15220330 NR Description: glucose transporter
  misc_feature (1)..(467): Homolog of NCBI NO: 81619 NR Description: glucose transport protein STP1 - Arabidopsis
  misc_feature (1)..(469): Homolog of NCBI NO: 30349804 NR Description: monosaccharide-H+ symporter [Datisca glomerata]
  misc_feature (1)..(477): Homolog of NCBI NO: 15234474 NR Description: glucose transporter; protein id: At4g21480.1
MGGLIFGYDIGISGGVTTMDSFQQKFFPSVYEKQKKDHDSNQYCRFDSVSLTLFTSSLYLAALCSSLVASYVTRQFGRKISMLLGGVLFCAGALLNGFATAVWMLIVGRLLLGFGIGFTNQSVPLYLSEMAPYKYRGALNIGFQLSITIGILVANVLNFFFSKISWGWRLSLGGAVVPALIITVGSLILPDTPNSMIERGQFRLAEAKLRKIRGVDDIDDEINDLIIASEASKLVEHPWRNLLQRKYRPHLTMAILIPAFQQLTGINVIMFYAPVLFQTIGFGSDAALISAVVTGLVNVGATVVSIYGVDKWGRRFLFLEGGFQMLISQVAVAAAIGAKFGVDGTPGVLPKWYAIVVVLFICIYVAAFAWSWGPLGWLVPSEIFPLEIRSAAQSITVSVNMIFTFLIAQVFLMMLCHLKFGLFIFFAFFVVVMSIFVYLFLPETRGVPIEEMNRVWRSHWYWSKFVDAEKNLTKVVI

SEQ ID NO: 48043 - protein, 459 aa, Arabidopsis thaliana
  peptide (1)..(459): Ceres Seq. ID no. 12659107
  misc_feature (1)..(438): Pfam Name: Sugar (and other) transporter Pfam Description: Sugar (and other) transporter
  misc_feature (1)..(449): Homolog of NCBI NO: 1353516 NR Description: sugar transporter
  misc_feature (1)..(448): Homolog of NCBI NO: 100347 NR Description: monosaccharide transport protein MST1 - common
  misc_feature (1)..(449): Homolog of NCBI NO: 4138722 NR Description: hexose transporter [Vitis vinifera]
  misc_feature (1)..(449): Homolog of NCBI NO: 4138724 NR Description: hexose transporter [Vitis vinifera]
  misc_feature (1)..(448): Homolog of NCBI NO: 3915039 NR Description: Sugar carrier protein C
  misc_feature (1)..(449): Homolog of NCBI NO: 21618276 NR Description: glucose transporter [Arabidopsis thaliana]
  misc_feature (1)..(449): Homolog of NCBI NO: 15220330 NR Description: glucose transporter
  misc_feature (1)..(449): Homolog of NCBI NO: 81619 NR Description: glucose transport protein STP1 - Arabidopsis
  misc_feature (1)..(451): Homolog of NCBI NO: 30349804 NR Description: monosaccharide-H+ symporter [Datisca glomerata]
  misc_feature (1)..(459): Homolog of NCBI NO: 15234474 NR Description: glucose transporter; protein id: At4g21480.1
MDSFQQKFFPSVYEKQKKDHDSNQYCRFDSVSLTLFTSSLYLAALCSSLVASYVTRQFGRKISMLLGGVLFCAGALLNGFATAVWMLIVGRLLLGFGIGFTNQSVPLYLSEMAPYKYRGALNIGFQLSITIGILVANVLNFFFSKISWGWRLSLGGAVVPALIITVGSLILPDTPNSMIERGQFRLAEAKLRKIRGVDDIDDEINDLIIASEASKLVEHPWRNLLQRKYRPHLTMAILIPAFQQLTGINVIMFYAPVLFQTIGFGSDAALISAVVTGLVNVGATVVSIYGVDKWGRRFLFLEGGFQMLISQVAVAAAIGAKFGVDGTPGVLPKWYAIVVVLFICIYVAAFAWSWGPLGWLVPSEIFPLEIRSAAQSITVSVNMIFTFLIAQVFLMMLCHLKFGLFIFFAFFVVVMSIFVYLFLPETRGVPIEEMNRVWRSHWYWSKFVDAEKNLTKVVI

SEQ ID NO: 48044 - DNA, 1027 bp, Arabidopsis thaliana
  misc_feature (1)..(1027): Ceres Seq. ID no. 12482406
  misc_feature: MA Experiment ID: 20000169 Result: Down-regulated in Transcription
  misc_feature: MA Experiment 20000169 PARAMETER Experiment Name: At_100uM_ABA_P Parameter: Age (day) Value: 14
  misc_feature: MA Experiment 20000169 PARAMETER Experiment Name: At_100uM_ABA_P Parameter: Organism Value: A. thaliana
  misc_feature: MA Experiment 20000169 PARAMETER Experiment Name: At_100uM_ABA_P Parameter: Plant Line Value: WS
  misc_feature: MA Experiment 20000169 PARAMETER Experiment Name: At_100uM_ABA_P Parameter: Timepoint (hr) Value: 6
  misc_feature: MA Experiment 20000169 PARAMETER Experiment Name: At_100uM_ABA_P Parameter: Tissue Value: Aerial
  misc_feature: MA Experiment 20000169 PARAMETER Experiment Name: At_100uM_ABA_P Parameter: Treatment Value: 100uM ABA vs. No Treatment
  misc_feature: MA Experiment ID: 20000180 Result: Up-regulated in Transcription
  misc_feature: MA Experiment 20000180 PARAMETER Experiment Name: At_Germinating_Seeds_P Parameter: Age (hr) Value: 24 vs. 0
  misc_feature: MA Experiment 20000180 PARAMETER Experiment Name: At_Germinating_Seeds_P Parameter: Tissue Value: Germinating Seeds
  misc_feature: MA Experiment ID: 20000182 Result: Down-regulated in Transcription
  misc_feature: MA Experiment 20000182 PARAMETER Experiment Name: At_2mM_SA_P Parameter: Age (day) Value: 14
  misc_feature: MA Experiment 20000182 PARAMETER Experiment Name: At_2mM_SA_P Parameter: Organism Value: A. thaliana
  misc_feature: MA Experiment 20000182 PARAMETER Experiment Name: At_2mM_SA_P Parameter: Plant Line Value: WS
  misc_feature: MA Experiment 20000182 PARAMETER Experiment Name: At_2mM_SA_P Parameter: Timepoint (hr) Value: 6
  misc_feature: MA Experiment 20000182 PARAMETER Experiment Name: At_2mM_SA_P Parameter: Tissue Value: Aerial
  misc_feature: MA Experiment 20000182 PARAMETER Experiment Name: At_2mM_SA_P Parameter: Treatment Value: 2mM SA vs. No Treatment
  misc_feature: MA Experiment ID: 20000184 Result: Up-regulated in Transcription
  misc_feature: MA Experiment 20000184 PARAMETER Experiment Name: At_Shoots__P Parameter: Age (day) Value: 7
  misc_feature: MA Experiment 20000184 PARAMETER Experiment Name: At_Shoots__P Parameter: Tissue Value: Shoots vs. Whole Plant
  misc_feature: MA Experiment ID: 20000185 Result: Down-regulated in Transcription
  misc_feature: MA Experiment 20000185 PARAMETER Experiment Name: At_Roots__P Parameter: Age (day) Value: 7 vs. 21
  misc_feature: MA Experiment 20000185 PARAMETER Experiment Name: At_Roots__P Parameter: Organism Value: A. thaliana
  misc_feature: MA Experiment 20000185 PARAMETER Experiment Name: At_Roots__P Parameter: Tissue Value: Roots vs. Whole Plant
  misc_feature: MA Experiment ID: 20000436 Result: Down-regulated in Transcription
  misc_feature: MA Experiment 20000436 PARAMETER Experiment Name: At_Drought_P Parameter: Age (day) Value: 7
  misc_feature: MA Experiment 20000436 PARAMETER Experiment Name: At_Drought_P Parameter: Organism Value: A. thaliana
  misc_feature: MA Experiment 20000436 PARAMETER Experiment Name: At_Drought_P Parameter: Plant Line Value: WS
  misc_feature: MA Experiment 20000436 PARAMETER Experiment Name: At_Drought_P Parameter: Timepoint (hr) Value: 12
  misc_feature: MA Experiment 20000436 PARAMETER Experiment Name: At_Drought_P Parameter: Tissue Value: Whole Plant
  misc_feature: MA Experiment 20000436 PARAMETER Experiment Name: At_Drought_P Parameter: Treatment Value: Drought vs. No Drought
  misc_feature: MA Experiment ID: 20000437 Result: Down-regulated in Transcription
  misc_feature: MA Experiment 20000437 PARAMETER Experiment Name: At_Drought_P Parameter: Age (day) Value: 8
  misc_feature: MA Experiment 20000437 PARAMETER Experiment Name: At_Drought_P Parameter: Organism Value: A. thaliana
  misc_feature: MA Experiment 20000437 PARAMETER Experiment Name: At_Drought_P Parameter: Plant Line Value: WS
  misc_feature: MA Experiment 20000437 PARAMETER Experiment Name: At_Drought_P Parameter: Timepoint (hr) Value: 24
  misc_feature: MA Experiment 20000437 PARAMETER Experiment Name: At_Drought_P Parameter: Tissue Value: Whole Plant
  misc_feature: MA Experiment 20000437 PARAMETER Experiment Name: At_Drought_P Parameter: Treatment Value: Drought vs. No Drought
  misc_feature: MA Experiment ID: 20000438 Result: Up-regulated in Transcription
  misc_feature: MA Experiment 20000438 PARAMETER Experiment Name: At_Shoots__P Parameter: Age (day) Value: 14
  misc_feature: MA Experiment 20000438 PARAMETER Experiment Name: At_Shoots__P Parameter: Tissue Value: Shoots vs. Whole Plant
  misc_feature: MA Experiment ID: 20000453 Result: Down-regulated in Transcription
  misc_feature: MA Experiment 20000453 PARAMETER Experiment Name: At_100uM_ABA_P Parameter: Age (day) Value: 15
  misc_feature: MA Experiment 20000453 PARAMETER Experiment Name: At_100uM_ABA_P Parameter: Organism Value: A. thaliana
  misc_feature: MA Experiment 20000453 PARAMETER Experiment Name: At_100uM_ABA_P Parameter: Plant Line Value: WS
  misc_feature: MA Experiment 20000453 PARAMETER Experiment Name: At_100uM_ABA_P Parameter: Timepoint (hr) Value: 24
  misc_feature: MA Experiment 20000453 PARAMETER Experiment Name: At_100uM_ABA_P Parameter: Tissue Value: Aerial
  misc_feature: MA Experiment 20000453 PARAMETER Experiment Name: At_100uM_ABA_P Parameter: Treatment Value: 100uM ABA vs. No Treatment
  misc_feature: MA Experiment ID: 20000495 Result: Up-regulated in Transcription
  misc_feature: MA Experiment 20000495 PARAMETER Experiment Name: At_Guard_Cells_P Parameter: Harvest Date Value: 8/2/2002
  misc_feature: MA Experiment 20000495 PARAMETER Experiment Name: At_Guard_Cells_P Parameter: Organism Value: A. thaliana
  misc_feature: MA Experiment 20000495 PARAMETER Experiment Name: At_Guard_Cells_P Parameter: Tissue Value: Guard Cells vs. Leaves
  misc_feature: MA Experiment ID: 20000573 Result: Down-regulated in Transcription
  misc_feature: MA Experiment 20000573 PARAMETER Experiment Name: At_100uM_ABA_Mutants__P Parameter: Organism Value: A. thaliana
  misc_feature: MA Experiment 20000573 PARAMETER Experiment Name: At_100uM_ABA_Mutants__P Parameter: Plant Line Value: CS22 vs. Ler wt
  misc_feature: MA Experiment 20000573 PARAMETER Experiment Name: At_100uM_ABA_Mutants__P Parameter: Timepoint (hr) Value: N/A
  misc_feature: MA Experiment 20000573 PARAMETER Experiment Name: At_100uM_ABA_Mutants__P Parameter: Tissue Value: Whole Plant
  misc_feature: MA Experiment 20000573 PARAMETER Experiment Name: At_100uM_ABA_Mutants__P Parameter: Treatment Value: None
  misc_feature: MA Experiment ID: 20000574 Result: Down-regulated in Transcription
  misc_feature: MA Experiment 20000574 PARAMETER Experiment Name: At_100uM_ABA_Mutants__P Parameter: Organism Value: A. thaliana
  misc_feature: MA Experiment 20000574 PARAMETER Experiment Name: At_100uM_ABA_Mutants__P Parameter: Plant Line Value: CS23 vs. Ler wt
  misc_feature: MA Experiment 20000574 PARAMETER Experiment Name: At_100uM_ABA_Mutants__P Parameter: Timepoint (hr) Value: N/A
  misc_feature: MA Experiment 20000574 PARAMETER Experiment Name: At_100uM_ABA_Mutants__P Parameter: Tissue Value: Whole Plant
  misc_feature: MA Experiment 20000574 PARAMETER Experiment Name: At_100uM_ABA_Mutants__P Parameter: Treatment Value: None
  misc_feature: MA Experiment ID: 20000575 Result: Up-regulated in Transcription
  misc_feature: MA Experiment 20000575 PARAMETER Experiment Name: At_100uM_ABA_Mutants__P Parameter: Organism Value: A. thaliana
  misc_feature: MA Experiment 20000575 PARAMETER Experiment Name: At_100uM_ABA_Mutants__P Parameter: Plant Line Value: CS22
  misc_feature: MA Experiment 20000575 PARAMETER Experiment Name: At_100uM_ABA_Mutants__P Parameter: Timepoint (hr) Value: 6
  misc_feature: MA Experiment 20000575 PARAMETER Experiment Name: At_100uM_ABA_Mutants__P Parameter: Tissue Value: Whole Plant
  misc_feature: MA Experiment 20000575 PARAMETER Experiment Name: At_100uM_ABA_Mutants__P Parameter: Treatment Value: 1uM ABA vs. No Treatment
  misc_feature: MA Experiment ID: 20000576 Result: Up-regulated in Transcription
  misc_feature: MA Experiment 20000576 PARAMETER Experiment Name: At_100uM_ABA_Mutants__P Parameter: Organism Value: A. thaliana
  misc_feature: MA Experiment 20000576 PARAMETER Experiment Name: At_100uM_ABA_Mutants__P Parameter: Plant Line Value: CS23
  misc_feature: MA Experiment 20000576 PARAMETER Experiment Name: At_100uM_ABA_Mutants__P Parameter: Timepoint (hr) Value: 6
  misc_feature: MA Experiment 20000576 PARAMETER Experiment Name: At_100uM_ABA_Mutants__P Parameter: Tissue Value: Whole Plant
  misc_feature: MA Experiment 20000576 PARAMETER Experiment Name: At_100uM_ABA_Mutants__P Parameter: Treatment Value: 1uM ABA vs. No Treatment
  misc_feature: MA Experiment ID: 20000709 Result: Up-regulated in Transcription
  misc_feature: MA Experiment 20000709 PARAMETER Experiment Name: At_15mM_NH4NO3_L-to-H_P Parameter: Age (hr) Value: 14
  misc_feature: MA Experiment 20000709 PARAMETER Experiment Name: At_15mM_NH4NO3_L-to-H_P Parameter: Organism Value: A. thaliana
  misc_feature: MA Experiment 20000709 PARAMETER Experiment Name: At_15mM_NH4NO3_L-to-H_P Parameter: Plant Line Value: WS
  misc_feature: MA Experiment 20000709 PARAMETER Experiment Name: At_15mM_NH4NO3_L-to-H_P Parameter: Timepoint (hr) Value: 4
  misc_feature: MA Experiment 20000709 PARAMETER Experiment Name: At_15mM_NH4NO3_L-to-H_P Parameter: Tissue Value: Aerial
  misc_feature: MA Experiment 20000709 PARAMETER Experiment Name: At_15mM_NH4NO3_L-to-H_P Parameter: Treatment Value: 15mM NH4NO3 vs. 30mM Mannitol
  misc_feature: MA Experiment ID: 20001248 Result: Down-regulated in Transcription
  misc_feature: MA Experiment 20001248 PARAMETER Experiment Name: At_Far-red-induction_P Parameter: Age (day) Value: 7
  misc_feature: MA Experiment 20001248 PARAMETER Experiment Name: At_Far-red-induction_P Parameter: Light Value: Far-red vs. White
  misc_feature: MA Experiment 20001248 PARAMETER Experiment Name: At_Far-red-induction_P Parameter: Organism Value: A. thaliana
  misc_feature: MA Experiment 20001248 PARAMETER Experiment Name: At_Far-red-induction_P Parameter: Plant Line Value: Columbia
  misc_feature: MA Experiment 20001248 PARAMETER Experiment Name: At_Far-red-induction_P Parameter: Timepoint (hr) Value: 4
  misc_feature: MA Experiment 20001248 PARAMETER Experiment Name: At_Far-red-induction_P Parameter: Tissue Value: Whole Plant
  misc_feature: MA Experiment ID: 20001451 Result: Up-regulated in Transcription
  misc_feature: MA Experiment 20001451 PARAMETER Experiment Name: At_Far-red-induction_P Parameter: Age (day) Value: 7
  misc_feature: MA Experiment 20001451 PARAMETER Experiment Name: At_Far-red-induction_P Parameter: Light Value: Far-red vs. White
  misc_feature: MA Experiment 20001451 PARAMETER Experiment Name: At_Far-red-induction_P Parameter: Organism Value: A. thaliana
  misc_feature: MA Experiment 20001451 PARAMETER Experiment Name: At_Far-red-induction_P Parameter: Plant Line Value: Columbia
  misc_feature: MA Experiment 20001451 PARAMETER Experiment Name: At_Far-red-induction_P Parameter: Timepoint (hr) Value: 24
  misc_feature: MA Experiment 20001451 PARAMETER Experiment Name: At_Far-red-induction_P Parameter: Tissue Value: Whole Plant
  misc_feature: MA Experiment ID: 20001503 Result: Up-regulated in Transcription
  misc_feature: MA Experiment 20001503 PARAMETER Experiment Name: At_Far-red-enriched_P Parameter: Age (day) Value: 7
  misc_feature: MA Experiment 20001503 PARAMETER Experiment Name: At_Far-red-enriched_P Parameter: Light Value: Far-red enriched vs. White
  misc_feature: MA Experiment 20001503 PARAMETER Experiment Name: At_Far-red-enriched_P Parameter: Organism Value: A. thaliana
  misc_feature: MA Experiment 20001503 PARAMETER Experiment Name: At_Far-red-enriched_P Parameter: Plant Line Value: Columbia
  misc_feature: MA Experiment 20001503 PARAMETER Experiment Name: At_Far-red-enriched_P Parameter: Timepoint (day) Value: 3
  misc_feature: MA Experiment 20001503 PARAMETER Experiment Name: At_Far-red-enriched_P Parameter: Tissue Value: Whole Plant
  misc_feature: MA Experiment ID: 20001557 Result: Down-regulated in Transcription
  misc_feature: MA Experiment 20001557 PARAMETER Experiment Name: At_Drought_Soil_Dry_P Parameter: Age (day) Value: 27
  misc_feature: MA Experiment 20001557 PARAMETER Experiment Name: At_Drought_Soil_Dry_P Parameter: Organism Value: A. thaliana
  misc_feature: MA Experiment 20001557 PARAMETER Experiment Name: At_Drought_Soil_Dry_P Parameter: Plant Line Value: WS
  misc_feature: MA Experiment 20001557 PARAMETER Experiment Name: At_Drought_Soil_Dry_P Parameter: Post Timepoint (hr) Value: 3
  misc_feature: MA Experiment 20001557 PARAMETER Experiment Name: At_Drought_Soil_Dry_P Parameter: Post-Treatment Value: Re-Water vs. No Drought
  misc_feature: MA Experiment 20001557 PARAMETER Experiment Name: At_Drought_Soil_Dry_P Parameter: Timepoint (day) Value: 13
  misc_feature: MA Experiment 20001557 PARAMETER Experiment Name: At_Drought_Soil_Dry_P Parameter: Treatment Value: Drought vs. No Drought
  misc_feature: MA Experiment ID: 20001756 Result: Up-regulated in Transcription
  misc_feature: MA Experiment 20001756 PARAMETER Experiment Name: At_50mM_NH4NO3_L-to-H_P Parameter: Timepoint (hr) Value: 4
  misc_feature: MA Experiment 20001756 PARAMETER Experiment Name: At_50mM_NH4NO3_L-to-H_P Parameter: Tissue Value: Leaf
  misc_feature: MA Experiment 20001756 PARAMETER Experiment Name: At_50mM_NH4NO3_L-to-H_P Parameter: Treatment Value: 50mM NH4NO3 vs 100mM Mannitol
  misc_feature: MA Experiment ID: 20001905 Result: Down-regulated in Transcription
  misc_feature: MA Experiment 20001905 PARAMETER Experiment Name: At_Drought_Reproduction_P Parameter: Age (day) Value: 40
  misc_feature: MA Experiment 20001905 PARAMETER Experiment Name: At_Drought_Reproduction_P Parameter: Organism Value: A. thaliana
  misc_feature: MA Experiment 20001905 PARAMETER Experiment Name: At_Drought_Reproduction_P Parameter: Plant Line Value: WS
  misc_feature: MA Experiment 20001905 PARAMETER Experiment Name: At_Drought_Reproduction_P Parameter: Timepoint (day) Value: 10
  misc_feature: MA Experiment 20001905 PARAMETER Experiment Name: At_Drought_Reproduction_P Parameter: Tissue Value: Rosettes
  misc_feature: MA Experiment 20001905 PARAMETER Experiment Name: At_Drought_Reproduction_P Parameter: Treatment Value: Drought vs. No Drought
  misc_feature: MA Experiment ID: 20001906 Result: Down-regulated in Transcription
  misc_feature: MA Experiment 20001906 PARAMETER Experiment Name: At_Drought_Reproduction_P Parameter: Age (day) Value: 35
  misc_feature: MA Experiment 20001906 PARAMETER Experiment Name: At_Drought_Reproduction_P Parameter: Organism Value: A. thaliana
  misc_feature: MA Experiment 20001906 PARAMETER Experiment Name: At_Drought_Reproduction_P Parameter: Plant Line Value: WS
  misc_feature: MA Experiment 20001906 PARAMETER Experiment Name: At_Drought_Reproduction_P Parameter: Timepoint (day) Value: 5
  misc_feature: MA Experiment 20001906 PARAMETER Experiment Name: At_Drought_Reproduction_P Parameter: Tissue Value: Siliques
  misc_feature: MA Experiment 20001906 PARAMETER Experiment Name: At_Drought_Reproduction_P Parameter: Treatment Value: Drought vs. No Drought
atgcagtaatctgataaaaccctccacagagatttccaacaaaacaggaactaaaacacaagatgaagattatgatgatgattaagctctgcttcttctccatgtccctcatctgcattgcacctgcagatgctcagacagaaggagtagtgtttggatataaaggcaaaaatggaccaaaccaatggggacacttaaaccctcacttcaccacatgcgcggtcggtaaattgcaatctccaattgatattcaaaggaggcaaatattttacaaccacaaattgaattcaatacaccgtgaatactacttcacaaacgcaacactagtgaaccacgtctgtaatgttgccatgttcttcggggagggagcaggagatgtgataatagaaaacaagaactataccttactgcaaatgcattggcacactccttctgaacatcacctccatggagtccaatatgcagctgagctgcacatggtacaccaagcaaaagatggaagctttgctgtggtggcaagtctcttcaaaatcggcactgaagagcctttcctctctcagatgaaggagaaattggtgaagctaaaggaagagagactcaaagggaaccacacagcacaagtggaagtaggaagaatcgacacaagacacattgaacgtaagactcgaaagtactacagatacattggttcactcactactcctccttgctccgagaacgtttcttggaccatccttggcaaggtgaggtcaatgtcaaaggaacaagtagaactactcagatctccattggacacttctttcaagaacaattcaagaccgtgtcaacccctcaacggccggagagttgagatgttccacgaccacgagcgtgtcgataaaaaagaaaccggtaacaaaaagaaaaaacccaattaaaatagttttacattgtctattggtttgtttagaaccctaattagctttgtaaaactaataatctcttatgtagtactgtgttgttgtttacgacttgatatacgatttcc

SEQ ID NO: 48045 - protein, 284 aa, Arabidopsis thaliana
  peptide (1)..(284): Ceres Seq. ID no. 12482407
  misc_feature (36)..(265): Pfam Name: Eukaryotic-type carbonic anhydrase Pfam Description: Eukaryotic-type carbonic anhydrase
  misc_feature (20)..(187): Homolog of NCBI NO: 15241186 NR Description: putative protein; protein id: At5g56330.1
  misc_feature (3)..(275): Homolog of NCBI NO: 29468280 NR Description: nectarin III [Nicotiana langsdorffii x Nicotiana
  misc_feature (7)..(265): Homolog of NCBI NO: 15223097 NR Description: carbonic anhydrase, putative; protein id:
  misc_feature (2)..(267): Homolog of NCBI NO: 15233471 NR Description: carbonic anhydrase -like protein; protein id:
  misc_feature (9)..(265): Homolog of NCBI NO: 15223122 NR Description: storage protein, putative; protein id:
  misc_feature (31)..(265): Homolog of NCBI NO: 25291473 NR Description: probable carbonic anhydrase [imported] -
  misc_feature (1)..(266): Homolog of NCBI NO: 38346319 NR Description: OJ000126_13.1 [Oryza sativa (japonica
  misc_feature (97)..(284): Homolog of NCBI NO: 15450773 NR Description: carbonic anhydrase (CAH1) [Arabidopsis thaliana]
  misc_feature (1)..(228): Homolog of NCBI NO: 30693691 NR Description: carbonic anhydrase (CAH1) [Arabidopsis thaliana]
  misc_feature (1)..(284): Homolog of NCBI NO: 30693687 NR Description: carbonic anhydrase (CAH1) [Arabidopsis thaliana]
MKIMMMIKLCFFSMSLICIAPADAQTEGVVFGYKGKNGPNQWGHLNPHFTTCAVGKLQSPIDIQRRQIFYNHKLNSIHREYYFTNATLVNHVCNVAMFFGEGAGDVIIENKNYTLLQMHWHTPSEHHLHGVQYAAELHMVHQAKDGSFAVVASLFKIGTEEPFLSQMKEKLVKLKEERLKGNHTAQVEVGRIDTRHIERKTRKYYRYIGSLTTPPCSENVSWTILGKVRSMSKEQVELLRSPLDTSFKNNSRPCQPLNGRRVEMFHDHERVDKKETGNKKKKPN

SEQ ID NO: 48046 - protein, 281 aa, Arabidopsis thaliana
  peptide (1)..(281): Ceres Seq. ID no. 12482408
  misc_feature (33)..(262): Pfam Name: Eukaryotic-type carbonic anhydrase Pfam Description: Eukaryotic-type carbonic anhydrase
  misc_feature (17)..(184): Homolog of NCBI NO: 15241186 NR Description: putative protein; protein id: At5g56330.1
  misc_feature (1)..(272): Homolog of NCBI NO: 29468280 NR Description: nectarin III [Nicotiana langsdorffii x Nicotiana
  misc_feature (4)..(262): Homolog of NCBI NO: 15223097 NR Description: carbonic anhydrase, putative; protein id:
  misc_feature (1)..(264): Homolog of NCBI NO: 15233471 NR Description: carbonic anhydrase -like protein; protein id:
  misc_feature (6)..(262): Homolog of NCBI NO: 15223122 NR Description: storage protein, putative; protein id:
  misc_feature (28)..(262): Homolog of NCBI NO: 25291473 NR Description: probable carbonic anhydrase [imported] -
  misc_feature (1)..(263): Homolog of NCBI NO: 38346319 NR Description: OJ000126_13.1 [Oryza sativa (japonica
  misc_feature (94)..(281): Homolog of NCBI NO: 15450773 NR Description: carbonic anhydrase (CAH1) [Arabidopsis thaliana]
  misc_feature (1)..(225): Homolog of NCBI NO: 30693691 NR Description: carbonic anhydrase (CAH1) [Arabidopsis thaliana]
  misc_feature (1)..(281): Homolog of NCBI NO: 30693687 NR Description: carbonic anhydrase (CAH1) [Arabidopsis thaliana]
MMMIKLCFFSMSLICIAPADAQTEGVVFGYKGKNGPNQWGHLNPHFTTCAVGKLQSPIDIQRRQIFYNHKLNSIHREYYFTNATLVNHVCNVAMFFGEGAGDVIIENKNYTLLQMHWHTPSEHHLHGVQYAAELHMVHQAKDGSFAVVASLFKIGTEEPFLSQMKEKLVKLKEERLKGNHTAQVEVGRIDTRHIERKTRKYYRYIGSLTTPPCSENVSWTILGKVRSMSKEQVELLRSPLDTSFKNNSRPCQPLNGRRVEMFHDHERVDKKETGNKKKKPN

SEQ ID NO: 48047 - protein, 280 aa, Arabidopsis thaliana
  peptide (1)..(280): Ceres Seq. ID no. 12482409
  misc_feature (32)..(261): Pfam Name: Eukaryotic-type carbonic anhydrase Pfam Description: Eukaryotic-type carbonic anhydrase
  misc_feature (16)..(183): Homolog of NCBI NO: 15241186 NR Description: putative protein; protein id: At5g56330.1
  misc_feature (1)..(271): Homolog of NCBI NO: 29468280 NR Description: nectarin III [Nicotiana langsdorffii x Nicotiana
  misc_feature (3)..(261): Homolog of NCBI NO: 15223097 NR Description: carbonic anhydrase, putative; protein id:
  misc_feature (1)..(263): Homolog of NCBI NO: 15233471 NR Description: carbonic anhydrase -like protein; protein id:
  misc_feature (5)..(261): Homolog of NCBI NO: 15223122 NR Description: storage protein, putative; protein id:
  misc_feature (27)..(261): Homolog of NCBI NO: 25291473 NR Description: probable carbonic anhydrase [imported] -
  misc_feature (1)..(262): Homolog of NCBI NO: 38346319 NR Description: OJ000126_13.1 [Oryza sativa (japonica
  misc_feature (93)..(280): Homolog of NCBI NO: 15450773 NR Description: carbonic anhydrase (CAH1) [Arabidopsis thaliana]
  misc_feature (1)..(224): Homolog of NCBI NO: 30693691 NR Description: carbonic anhydrase (CAH1) [Arabidopsis thaliana]
  misc_feature (1)..(280): Homolog of NCBI NO: 30693687 NR Description: carbonic anhydrase (CAH1) [Arabidopsis thaliana]
MMIKLCFFSMSLICIAPADAQTEGVVFGYKGKNGPNQWGHLNPHFTTCAVGKLQSPIDIQRRQIFYNHKLNSIHREYYFTNATLVNHVCNVAMFFGEGAGDVIIENKNYTLLQMHWHTPSEHHLHGVQYAAELHMVHQAKDGSFAVVASLFKIGTEEPFLSQMKEKLVKLKEERLKGNHTAQVEVGRIDTRHIERKTRKYYRYIGSLTTPPCSENVSWTILGKVRSMSKEQVELLRSPLDTSFKNNSRPCQPLNGRRVEMFHDHERVDKKETGNKKKKPN

SEQ ID NO: 48048 - DNA, 2941 bp, Arabidopsis thaliana; identical to SEQ ID NO: 45965
  misc_feature (1)..(2941): Ceres Seq. ID no. 12600180
  misc_feature: MA Experiment ID: 20000171 Result: Up-regulated in Transcription
  misc_feature: MA Experiment 20000171 PARAMETER Experiment Name: At_42deg_Heat_P Parameter: Age (day) Value: 14
  misc_feature: MA Experiment 20000171 PARAMETER Experiment Name: At_42deg_Heat_P Parameter: Organism Value: A. thaliana
  misc_feature: MA Experiment 20000171 PARAMETER Experiment Name: At_42deg_Heat_P Parameter: Plant Line Value: WS
  misc_feature: MA Experiment 20000171 PARAMETER Experiment Name: At_42deg_Heat_P Parameter: Temperature (deg C) Value: 42 vs. 22
  misc_feature: MA Experiment 20000171 PARAMETER Experiment Name: At_42deg_Heat_P Parameter: Timepoint (hr) Value: 1
  misc_feature: MA Experiment 20000171 PARAMETER Experiment Name: At_42deg_Heat_P Parameter: Tissue Value: Aerial
  misc_feature: MA Experiment ID: 20000173 Result: Up-regulated in Transcription
  misc_feature: MA Experiment 20000173 PARAMETER Experiment Name: At_42deg_Heat_P Parameter: Age (day) Value: 14
  misc_feature: MA Experiment 20000173 PARAMETER Experiment Name: At_42deg_Heat_P Parameter: Organism Value: A. thaliana
  misc_feature: MA Experiment 20000173 PARAMETER Experiment Name: At_42deg_Heat_P Parameter: Plant Line Value: WS
  misc_feature: MA Experiment 20000173 PARAMETER Experiment Name: At_42deg_Heat_P Parameter: Temperature (deg C) Value: 42 vs. 22
  misc_feature: MA Experiment 20000173 PARAMETER Experiment Name: At_42deg_Heat_P Parameter: Timepoint (hr) Value: 6
  misc_feature: MA Experiment 20000173 PARAMETER Experiment Name: At_42deg_Heat_P Parameter: Tissue Value: Aerial
  misc_feature: MA Experiment ID: 20000495 Result: Down-regulated in Transcription
  misc_feature: MA Experiment 20000495 PARAMETER Experiment Name: At_Guard_Cells_P Parameter: Harvest Date Value: 8/2/2002
  misc_feature: MA Experiment 20000495 PARAMETER Experiment Name: At_Guard_Cells_P Parameter: Organism Value: A. thaliana
  misc_feature: MA Experiment 20000495 PARAMETER Experiment Name: At_Guard_Cells_P Parameter: Tissue Value: Guard Cells vs. Leaves
  misc_feature: MA Experiment ID: 20001451 Result: Down-regulated in Transcription
  misc_feature: MA Experiment 20001451 PARAMETER Experiment Name: At_Far-red-induction_P Parameter: Age (day) Value: 7
  misc_feature: MA Experiment 20001451 PARAMETER Experiment Name: At_Far-red-induction_P Parameter: Light Value: Far-red vs. White
  misc_feature: MA Experiment 20001451 PARAMETER Experiment Name: At_Far-red-induction_P Parameter: Organism Value: A. thaliana
  misc_feature: MA Experiment 20001451 PARAMETER Experiment Name: At_Far-red-induction_P Parameter: Plant Line Value: Columbia
  misc_feature: MA Experiment 20001451 PARAMETER Experiment Name: At_Far-red-induction_P Parameter: Timepoint (hr) Value: 24
  misc_feature: MA Experiment 20001451 PARAMETER Experiment Name: At_Far-red-induction_P Parameter: Tissue Value: Whole Plant
  misc_feature: MA Experiment ID: 20001557 Result: Up-regulated in Transcription
  misc_feature: MA Experiment 20001557 PARAMETER Experiment Name: At_Drought_Soil_Dry_P Parameter: Age (day) Value: 27
  misc_feature: MA Experiment 20001557 PARAMETER Experiment Name: At_Drought_Soil_Dry_P Parameter: Organism Value: A. thaliana
  misc_feature: MA Experiment 20001557 PARAMETER Experiment Name: At_Drought_Soil_Dry_P Parameter: Plant Line Value: WS
  misc_feature: MA Experiment 20001557 PARAMETER Experiment Name: At_Drought_Soil_Dry_P Parameter: Post Timepoint (hr) Value: 3
  misc_feature: MA Experiment 20001557 PARAMETER Experiment Name: At_Drought_Soil_Dry_P Parameter: Post-Treatment Value: Re-Water vs. No Drought
  misc_feature: MA Experiment 20001557 PARAMETER Experiment Name: At_Drought_Soil_Dry_P Parameter: Timepoint (day) Value: 13
  misc_feature: MA Experiment 20001557 PARAMETER Experiment Name: At_Drought_Soil_Dry_P Parameter: Treatment Value: Drought vs. No Drought

SEQ ID NO: 48049 - protein, 736 aa, Arabidopsis thaliana; identical to SEQ ID NO: 45966
  peptide (1)..(736): Ceres Seq. ID no. 12600181
  misc_feature (105)..(626): Homolog of NCBI NO: 19114449 NR Description: heat shock protein 70-like protein Ssp1p
  misc_feature (2)..(626): Homolog of NCBI NO: 12230134 NR Description: HEAT SHOCK PROTEIN HOMOLOG PSS1
  misc_feature (2)..(626): Homolog of NCBI NO: 7441858 NR Description: heat shock protein 70 - fission yeast
  misc_feature (1)..(634): Homolog of NCBI NO: 39591675 NR Description: Hypothetical protein CBG18133 [Caenorhabditis
  misc_feature (1)..(642): Homolog of NCBI NO: 3170190 NR Description: antigen NY-CO-25 [Homo sapiens]
  misc_feature (1)..(642): Homolog of NCBI NO: 39645395 NR Description: Unknown (protein for MGC:76295) [Silurana
  misc_feature (1)..(642): Homolog of NCBI NO: 40254361 NR Description: osmotic stress protein; osmotic stress protein 94
  misc_feature (1)..(642): Homolog of NCBI NO: 34856875 NR Description: similar to osmotic stress protein [Rattus
  misc_feature (1)..(621): Homolog of NCBI NO: 15221072 NR Description: putative heat-shock protein; protein id:
  misc_feature (1)..(643): Homolog of NCBI NO: 25326732 NR Description: hypothetical protein [imported] - Arabidopsis
  misc_feature (105)..(626): Homolog of NCBI NO: 19114449 NR Description: heat shock protein 70-like protein Ssp1p
  misc_feature (2)..(626): Homolog of NCBI NO: 12230134 NR Description: HEAT SHOCK PROTEIN HOMOLOG PSS1
  misc_feature (2)..(626): Homolog of NCBI NO: 7441858 NR Description: heat shock protein 70 - fission yeast
  misc_feature (1)..(634): Homolog of NCBI NO: 39591675 NR Description: Hypothetical protein CBG18133 [Caenorhabditis
  misc_feature (1)..(642): Homolog of NCBI NO: 3170190 NR Description: antigen NY-CO-25 [Homo sapiens]
  misc_feature (1)..(642): Homolog of NCBI NO: 39645395 NR Description: Unknown (protein for MGC:76295) [Silurana
  misc_feature (1)..(642): Homolog of NCBI NO: 40254361 NR Description: osmotic stress protein; osmotic stress protein 94
  misc_feature (1)..(642): Homolog of NCBI NO: 34856875 NR Description: similar to osmotic stress protein [Rattus
  misc_feature (1)..(621): Homolog of NCBI NO: 15221072 NR Description: putative heat-shock protein; protein id:
  misc_feature (1)..(643): Homolog of NCBI NO: 25326732 NR Description: hypothetical protein [imported] - Arabidopsis
  misc_feature (105)..(626): Homolog of NCBI NO: 19114449 NR Description: heat shock protein 70-like protein Ssp1p
  misc_feature (2)..(626): Homolog of NCBI NO: 12230134 NR Description: HEAT SHOCK PROTEIN HOMOLOG PSS1
  misc_feature (2)..(626): Homolog of NCBI NO: 7441858 NR Description: heat shock protein 70 - fission yeast
  misc_feature (1)..(634): Homolog of NCBI NO: 39591675 NR Description: Hypothetical protein CBG18133 [Caenorhabditis
  misc_feature (1)..(642): Homolog of NCBI NO: 3170190 NR Description: antigen NY-CO-25 [Homo sapiens]
  misc_feature (1)..(642): Homolog of NCBI NO: 39645395 NR Description: Unknown (protein for MGC:76295) [Silurana
  misc_feature (1)..(642): Homolog of NCBI NO: 40254361 NR Description: osmotic stress protein; osmotic stress protein 94
  misc_feature (1)..(642): Homolog of NCBI NO: 34856875 NR Description: similar to osmotic stress protein [Rattus
  misc_feature (1)..(621): Homolog of NCBI NO: 15221072 NR Description: putative heat-shock protein; protein id:
  misc_feature (1)..(643): Homolog of NCBI NO: 25326732 NR Description: hypothetical protein [imported] - Arabidopsis

SEQ ID NO: 48050 - protein, 680 aa, Arabidopsis thaliana; identical to SEQ ID NO: 45967
  peptide (1)..(680): Ceres Seq. ID no. 12600182
  misc_feature (49)..(570): Homolog of NCBI NO: 19114449 NR Description: heat shock protein 70-like protein Ssp1p
  misc_feature (1)..(570): Homolog of NCBI NO: 12230134 NR Description: HEAT SHOCK PROTEIN HOMOLOG PSS1
  misc_feature (1)..(570): Homolog of NCBI NO: 7441858 NR Description: heat shock protein 70 - fission yeast
  misc_feature (1)..(578): Homolog of NCBI NO: 39591675 NR Description: Hypothetical protein CBG18133 [Caenorhabditis
  misc_feature (1)..(586): Homolog of NCBI NO: 3170190 NR Description: antigen NY-CO-25 [Homo sapiens]
  misc_feature (1)..(586): Homolog of NCBI NO: 39645395 NR Description: Unknown (protein for MGC:76295) [Silurana
  misc_feature (1)..(586): Homolog of NCBI NO: 40254361 NR Description: osmotic stress protein; osmotic stress protein 94
  misc_feature (1)..(586): Homolog of NCBI NO: 34856875 NR Description: similar to osmotic stress protein [Rattus
  misc_feature (1)..(565): Homolog of NCBI NO: 15221072 NR Description: putative heat-shock protein; protein id:
  misc_feature (1)..(587): Homolog of NCBI NO: 25326732 NR Description: hypothetical protein [imported] - Arabidopsis
  misc_feature (49)..(570): Homolog of NCBI NO: 19114449 NR Description: heat shock protein 70-like protein Ssp1p
  misc_feature (1)..(570): Homolog of NCBI NO: 12230134 NR Description: HEAT SHOCK PROTEIN HOMOLOG PSS1
  misc_feature (1)..(570): Homolog of NCBI NO: 7441858 NR Description: heat shock protein 70 - fission yeast
  misc_feature (1)..(578): Homolog of NCBI NO: 39591675 NR Description: Hypothetical protein CBG18133 [Caenorhabditis
  misc_feature (1)..(586): Homolog of NCBI NO: 3170190 NR Description: antigen NY-CO-25 [Homo sapiens]
  misc_feature (1)..(586): Homolog of NCBI NO: 39645395 NR Description: Unknown (protein for MGC:76295) [Silurana
  misc_feature (1)..(586): Homolog of NCBI NO: 40254361 NR Description: osmotic stress protein; osmotic stress protein 94
  misc_feature (1)..(586): Homolog of NCBI NO: 34856875 NR Description: similar to osmotic stress protein [Rattus
  misc_feature (1)..(565): Homolog of NCBI NO: 15221072 NR Description: putative heat-shock protein; protein id:
  misc_feature (1)..(587): Homolog of NCBI NO: 25326732 NR Description: hypothetical protein [imported] - Arabidopsis
  misc_feature (49)..(570): Homolog of NCBI NO: 19114449 NR Description: heat shock protein 70-like protein Ssp1p
  misc_feature (1)..(570): Homolog of NCBI NO: 12230134 NR Description: HEAT SHOCK PROTEIN HOMOLOG PSS1
  misc_feature (1)..(570): Homolog of NCBI NO: 7441858 NR Description: heat shock protein 70 - fission yeast
  misc_feature (1)..(578): Homolog of NCBI NO: 39591675 NR Description: Hypothetical protein CBG18133 [Caenorhabditis
  misc_feature (1)..(586): Homolog of NCBI NO: 3170190 NR Description: antigen NY-CO-25 [Homo sapiens]
  misc_feature (1)..(586): Homolog of NCBI NO: 39645395 NR Description: Unknown (protein for MGC:76295) [Silurana
  misc_feature (1)..(586): Homolog of NCBI NO: 40254361 NR Description: osmotic stress protein; osmotic stress protein 94
  misc_feature (1)..(586): Homolog of NCBI NO: 34856875 NR Description: similar to osmotic stress protein [Rattus
  misc_feature (1)..(565): Homolog of NCBI NO: 15221072 NR Description: putative heat-shock protein; protein id:
  misc_feature (1)..(587): Homolog of NCBI NO: 25326732 NR Description: hypothetical protein [imported] - Arabidopsis

SEQ ID NO: 48051 - protein, 679 aa, Arabidopsis thaliana; identical to SEQ ID NO: 45968
  peptide (1)..(679): Ceres Seq. ID no. 12600183
  misc_feature (48)..(569): Homolog of NCBI NO: 19114449 NR Description: heat shock protein 70-like protein Ssp1p
  misc_feature (1)..(569): Homolog of NCBI NO: 12230134 NR Description: HEAT SHOCK PROTEIN HOMOLOG PSS1
  misc_feature (1)..(569): Homolog of NCBI NO: 7441858 NR Description: heat shock protein 70 - fission yeast
  misc_feature (1)..(577): Homolog of NCBI NO: 39591675 NR Description: Hypothetical protein CBG18133 [Caenorhabditis
  misc_feature (1)..(585): Homolog of NCBI NO: 3170190 NR Description: antigen NY-CO-25 [Homo sapiens]
  misc_feature (1)..(585): Homolog of NCBI NO: 39645395 NR Description: Unknown (protein for MGC:76295) [Silurana
  misc_feature (1)..(585): Homolog of NCBI NO: 40254361 NR Description: osmotic stress protein; osmotic stress protein 94
  misc_feature (1)..(585): Homolog of NCBI NO: 34856875 NR Description: similar to osmotic stress protein [Rattus
  misc_feature (1)..(564): Homolog of NCBI NO: 15221072 NR Description: putative heat-shock protein; protein id:
  misc_feature (1)..(586): Homolog of NCBI NO: 25326732 NR Description: hypothetical protein [imported] - Arabidopsis
  misc_feature (48)..(569): Homolog of NCBI NO: 19114449 NR Description: heat shock protein 70-like protein Ssp1p
  misc_feature (1)..(569): Homolog of NCBI NO: 12230134 NR Description: HEAT SHOCK PROTEIN HOMOLOG PSS1
  misc_feature (1)..(569): Homolog of NCBI NO: 7441858 NR Description: heat shock protein 70 - fission yeast
  misc_feature (1)..(577): Homolog of NCBI NO: 39591675 NR Description: Hypothetical protein CBG18133 [Caenorhabditis
  misc_feature (1)..(585): Homolog of NCBI NO: 3170190 NR Description: antigen NY-CO-25 [Homo sapiens]
  misc_feature (1)..(585): Homolog of NCBI NO: 39645395 NR Description: Unknown (protein for MGC:76295) [Silurana
  misc_feature (1)..(585): Homolog of NCBI NO: 40254361 NR Description: osmotic stress protein; osmotic stress protein 94
  misc_feature (1)..(585): Homolog of NCBI NO: 34856875 NR Description: similar to osmotic stress protein [Rattus
  misc_feature (1)..(564): Homolog of NCBI NO: 15221072 NR Description: putative heat-shock protein; protein id:
  misc_feature (1)..(586): Homolog of NCBI NO: 25326732 NR Description: hypothetical protein [imported] - Arabidopsis
  misc_feature (48)..(569): Homolog of NCBI NO: 19114449 NR Description: heat shock protein 70-like protein Ssp1p
  misc_feature (1)..(569): Homolog of NCBI NO: 12230134 NR Description: HEAT SHOCK PROTEIN HOMOLOG PSS1
  misc_feature (1)..(569): Homolog of NCBI NO: 7441858 NR Description: heat shock protein 70 - fission yeast
  misc_feature (1)..(577): Homolog of NCBI NO: 39591675 NR Description: Hypothetical protein CBG18133 [Caenorhabditis
  misc_feature (1)..(585): Homolog of NCBI NO: 3170190 NR Description: antigen NY-CO-25 [Homo sapiens]
  misc_feature (1)..(585): Homolog of NCBI NO: 39645395 NR Description: Unknown (protein for MGC:76295) [Silurana
  misc_feature (1)..(585): Homolog of NCBI NO: 40254361 NR Description: osmotic stress protein; osmotic stress protein 94
  misc_feature (1)..(585): Homolog of NCBI NO: 34856875 NR Description: similar to osmotic stress protein [Rattus
  misc_feature (1)..(564): Homolog of NCBI NO: 15221072 NR Description: putative heat-shock protein; protein id:
  misc_feature (1)..(586): Homolog of NCBI NO: 25326732 NR Description: hypothetical protein [imported] - Arabidopsis

SEQ ID NO: 48052 - DNA, 910 bp, Arabidopsis thaliana
  misc_feature (1)..(910): Ceres Seq. ID no. 12640571
  misc_feature: MA Experiment ID: 108434 Result: Up-regulated in Transcription
  misc_feature: MA Experiment 108434 PARAMETER Experiment Name: At_Root_Tips_cDNA_P Parameter: Tissue Value: Root Tips
  misc_feature: MA Experiment ID: 108463 Result: Down-regulated in Transcription
  misc_feature: MA Experiment 108463 PARAMETER Experiment Name: At_Germinating_Seeds_cDNA_P Parameter: Age (day) Value: 3 vs. 0
  misc_feature: MA Experiment 108463 PARAMETER Experiment Name: At_Germinating_Seeds_cDNA_P Parameter: Tissue Value: Germinating Seeds
  misc_feature: MA Experiment ID: 108464 Result: Down-regulated in Transcription
  misc_feature: MA Experiment 108464 PARAMETER Experiment Name: At_Germinating_Seeds_cDNA_P Parameter: Age (day) Value: 4 vs. 0
  misc_feature: MA Experiment 108464 PARAMETER Experiment Name: At_Germinating_Seeds_cDNA_P Parameter: Tissue Value: Germinating Seeds
  misc_feature: MA Experiment ID: 108488 Result: Up-regulated in Transcription
  misc_feature: MA Experiment ID: 20000093 Result: Up-regulated in Transcription
  misc_feature: MA Experiment 20000093 PARAMETER Experiment Name: At_42deg_Heat_cDNA_P Parameter: Temperature (deg C) Value: 42 vs. 22
  misc_feature: MA Experiment 20000093 PARAMETER Experiment Name: At_42deg_Heat_cDNA_P Parameter: Timepoint (hr) Value: 0.5
  misc_feature: MA Experiment 20000093 PARAMETER Experiment Name: At_42deg_Heat_cDNA_P Parameter: Tissue Value: Aerial
  misc_feature: MA Experiment ID: 20000113 Result: Up-regulated in Transcription
  misc_feature: MA Experiment 20000113 PARAMETER Experiment Name: At_42deg_Heat_cDNA_P Parameter: Temperature (deg C) Value: 42 vs. 22
  misc_feature: MA Experiment 20000113 PARAMETER Experiment Name: At_42deg_Heat_cDNA_P Parameter: Timepoint (hr) Value: 8
  misc_feature: MA Experiment 20000113 PARAMETER Experiment Name: At_42deg_Heat_cDNA_P Parameter: Tissue Value: Aerial
  misc_feature: MA Experiment ID: 20000794 Result: Down-regulated in Transcription
  misc_feature: MA Experiment 20000794 PARAMETER Experiment Name: At_Petals_P Parameter: Age (day) Value: 23-25 days
  misc_feature: MA Experiment 20000794 PARAMETER Experiment Name: At_Petals_P Parameter: Plant Line Value: WS
  misc_feature: MA Experiment 20000794 PARAMETER Experiment Name: At_Petals_P Parameter: Tissue Value: Petals vs. Whole plant
  misc_feature: MA Experiment ID: 20001557 Result: Up-regulated in Transcription
  misc_feature: MA Experiment 20001557 PARAMETER Experiment Name: At_Drought_Soil_Dry_P Parameter: Age (day) Value: 27
  misc_feature: MA Experiment 20001557 PARAMETER Experiment Name: At_Drought_Soil_Dry_P Parameter: Organism Value: A. thaliana
  misc_feature: MA Experiment 20001557 PARAMETER Experiment Name: At_Drought_Soil_Dry_P Parameter: Plant Line Value: WS
  misc_feature: MA Experiment 20001557 PARAMETER Experiment Name: At_Drought_Soil_Dry_P Parameter: Post Timepoint (hr) Value: 3
  misc_feature: MA Experiment 20001557 PARAMETER Experiment Name: At_Drought_Soil_Dry_P Parameter: Post-Treatment Value: Re-Water vs. No Drought
  misc_feature: MA Experiment 20001557 PARAMETER Experiment Name: At_Drought_Soil_Dry_P Parameter: Timepoint (day) Value: 13
  misc_feature: MA Experiment 20001557 PARAMETER Experiment Name: At_Drought_Soil_Dry_P Parameter: Treatment Value: Drought vs. No Drought
  misc_feature: MA Experiment ID: 20001558 Result: Up-regulated in Transcription
  misc_feature: MA Experiment 20001558 PARAMETER Experiment Name: At_Drought_Soil_Dry_P Parameter: Age (day) Value: 27
  misc_feature: MA Experiment 20001558 PARAMETER Experiment Name: At_Drought_Soil_Dry_P Parameter: Organism Value: A. thaliana
  misc_feature: MA Experiment 20001558 PARAMETER Experiment Name: At_Drought_Soil_Dry_P Parameter: Plant Line Value: WS
  misc_feature: MA Experiment 20001558 PARAMETER Experiment Name: At_Drought_Soil_Dry_P Parameter: Post Timepoint (hr) Value: 6
  misc_feature: MA Experiment 20001558 PARAMETER Experiment Name: At_Drought_Soil_Dry_P Parameter: Post-Treatment Value: Re-Water vs. No Drought
  misc_feature: MA Experiment 20001558 PARAMETER Experiment Name: At_Drought_Soil_Dry_P Parameter: Timepoint (day) Value: 13
  misc_feature: MA Experiment 20001558 PARAMETER Experiment Name: At_Drought_Soil_Dry_P Parameter: Treatment Value: Drought vs. No Drought
  misc_feature: MA Experiment ID: 20001757 Result: Up-regulated in Transcription
  misc_feature: MA Experiment 20001757 PARAMETER Experiment Name: At_50mM_NH4NO3_L-to-H_P Parameter: Timepoint (hr) Value: 6
  misc_feature: MA Experiment 20001757 PARAMETER Experiment Name: At_50mM_NH4NO3_L-to-H_P Parameter: Tissue Value: Leaf
  misc_feature: MA Experiment 20001757 PARAMETER Experiment Name: At_50mM_NH4NO3_L-to-H_P Parameter: Treatment Value: 50mM NH4NO3 vs 100mM Mannitol
atactcttttaggtttcaacagcagcttagtctctctgatctctctacctccctcacaccctaaaactcagcaacaatggccgttaccttttcagatctacacacagaggagggtgtcaaatccgtggaggagcacctcgccggaaaaacctacatctccggagatcaattgtctgtggatgatgtcaaggtttacgctgccgttccagtgaaacccagcgatgccttccccaatgctagcaagtggtacgagtccgtggcttcccaacttgctaaaagtttccctggaaaggccgttggagtacaattcggtggctctgctgctgctgctccagctgttgaagctgaggcacctgcagctgcagctgatgatgatgatgacatggatctctttggtgacgagaccgaagaagaaaagaaagctgcagaggagagggaggctgctaagaaggacaccaagaagcctaaagagagtggaaagtcttctgtgctcatggatgttaagccatgggatgatgaaaccgacatgaagaaactggaagaggctgttcgtggtgttgagatgcctggtcttttctggggagcctcaaaacttgtaccagttggttatgggatcaagaaactcacaattatgttcacgattgttgatgacctcgtgtccccggacaacctcattgaagacttcctcacctcagagcctaacaacgagtacatccagagttgtgacattgtcgctttcaacaagatttagagacttcaaatttctccttaccgaaacatatctgaatttcaagttttgttttcgtttgtgttgtttaccgaaatgtttctttcctagttgcaagaccgctttcatgttacaataacactaaattttcaatggttactattccgttgcatcattgttaag

SEQ ID NO: 48053 - protein, 224 aa, Arabidopsis thaliana
  peptide (1)..(224): Ceres Seq. ID no. 12640572
  misc_feature (135)..(224): Pfam Name: EF-1 guanine nucleotide exchange domain Pfam Description: EF-1 guanine nucleotide exchange domain
  misc_feature (1)..(224): Homolog of NCBI NO: 3894214 NR Description: elongation factor 1 beta 2
  misc_feature (1)..(224): Homolog of NCBI NO: 38232568 NR Description: translational elongation factor 1 subunit Bbeta
  misc_feature (1)..(224): Homolog of NCBI NO: 6015064 NR Description: ELONGATION FACTOR 1-BETA (EF-1-BETA)
  misc_feature (1)..(224): Homolog of NCBI NO: 34899162 NR Description: putative translation elongation factor eEF-1
  misc_feature (1)..(224): Homolog of NCBI NO: 232033 NR Description: ELONGATION FACTOR 1-BETA' (EF-1-BETA')
  misc_feature (1)..(224): Homolog of NCBI NO: 232031 NR Description: ELONGATION FACTOR 1-BETA' (EF-1-BETA')
  misc_feature (1)..(224): Homolog of NCBI NO: 38175744 NR Description: putative translation elongation factor eEF-1
  misc_feature (19)..(224): Homolog of NCBI NO: 27754711 NR Description: putative elongation factor 1B alpha-subunit
  misc_feature (1)..(224): Homolog of NCBI NO: 15239877 NR Description: elongation factor 1B alpha-subunit
  misc_feature (1)..(224): Homolog of NCBI NO: 30687350 NR Description: elongation factor 1B alpha-subunit [Arabidopsis
MAVTFSDLHTEEGVKSVEEHLAGKTYISGDQLSVDDVKVYAAVPVKPSDAFPNASKWYESVASQLAKSFPGKAVGVQFGGSAAAAPAVEAEAPAAAADDDDDMDLFGDETEEEKKAAEEREAAKKDTKKPKESGKSSVLMDVKPWDDETDMKKLEEAVRGVEMPGLFWGASKLVPVGYGIKKLTIMFTIVDDLVSPDNLIEDFLTSEPNNEYIQSCDIVAFNKI

SEQ ID NO: 48054 - protein, 122 aa, Arabidopsis thaliana; identical to SEQ ID NO: 36256
  peptide (1)..(122): Ceres Seq. ID no. 12640573
  misc_feature (33)..(122): Pfam Name: EF-1 guanine nucleotide exchange domain Pfam Description: EF-1 guanine nucleotide exchange domain
  misc_feature (1)..(122): Homolog of NCBI NO: 3894214 NR Description: elongation factor 1 beta 2
  misc_feature (1)..(122): Homolog of NCBI NO: 38232568 NR Description: translational elongation factor 1 subunit Bbeta
  misc_feature (1)..(122): Homolog of NCBI NO: 6015064 NR Description: ELONGATION FACTOR 1-BETA (EF-1-BETA)
  misc_feature (1)..(122): Homolog of NCBI NO: 34899162 NR Description: putative translation elongation factor eEF-1
  misc_feature (1)..(122): Homolog of NCBI NO: 232033 NR Description: ELONGATION FACTOR 1-BETA' (EF-1-BETA')
  misc_feature (1)..(122): Homolog of NCBI NO: 232031 NR Description: ELONGATION FACTOR 1-BETA' (EF-1-BETA')
  misc_feature (1)..(122): Homolog of NCBI NO: 38175744 NR Description: putative translation elongation factor eEF-1
  misc_feature (1)..(122): Homolog of NCBI NO: 27754711 NR Description: putative elongation factor 1B alpha-subunit
  misc_feature (1)..(122): Homolog of NCBI NO: 15239877 NR Description: elongation factor 1B alpha-subunit
  misc_feature (1)..(122): Homolog of NCBI NO: 30687350 NR Description: elongation factor 1B alpha-subunit [Arabidopsis

SEQ ID NO: 48055 - DNA, 1501 bp, Arabidopsis thaliana
  misc_feature (1)..(1501): Ceres Seq. ID no. 12726486
  misc_feature: MA Experiment ID: 20000495 Result: Up-regulated in Transcription
  misc_feature: MA Experiment 20000495 PARAMETER Experiment Name: At_Guard_Cells_P Parameter: Harvest Date Value: 8/2/2002
  misc_feature: MA Experiment 20000495 PARAMETER Experiment Name: At_Guard_Cells_P Parameter: Organism Value: A. thaliana
  misc_feature: MA Experiment 20000495 PARAMETER Experiment Name: At_Guard_Cells_P Parameter: Tissue Value: Guard Cells vs. Leaves
actgttttagctacggtcagcttttctctagcgtcggggcctcgatctcttgatttgagcttttcttaggtctgtctctctctgtacactctctccgccgtcgtatctcgccgtcgatttcaatttttccgacgatatgaagctcaccgttaaaactctcaagggcagtcattttgaaattagggttttaccctccgatacgataatggcggtgaagaagaatatagaagattcacaaggaaaagacaattatccatgtgggcagcaattgttgattcacaatggaaaagttttgaaagatgaaactagcctggtggagaacaaagttacggaggaaggatttctcgtcgttatgcttagcaagagcaaatctggaggttcagctggtcaggcttcggttcagcctgtttccgctaccacatcttcgactaagcctgcagctccatctacaacccagtcttcacctgttcctgcttcacctattcctgctcaagaacaaccggcggcacagactgacacctatggacaagctgcgtcaacattagttagtggtagtagtcttgagcaaatggtccaacagataatggaaatgggaggtggaagttgggacaaagaaacagttactcgtgcacttcgtgcagcttataacaaccctgagagagcagtggattatttgtactctggaattcctcaaactgctgaagtagctgtgccagtacctgaggctcagattgcaggatccggtgcagcccctgttgcacctgcatctggaggacctaactcatctcctttggatttatttcctcaggaaacagttgctgctgctggctctggagatcttgggacacttgaatttcttagaaacaatgaccagttccaacaattacgcaccatggtccattccaaccctcaaattcttcagcccatgcttcaggaacttggaaagcaaaaccctcaacttctgaggctaattcaagaaaaccaggcagagtttcttcagttagtaaatgagccctatgagggttctgacggggagggggacatgttcgatcaacccgagcaagaaatgccacatgccattaacgttaccccagcagaacaagaagcgattcaacggctcgaggcaatgggatttgatagagccttagtaatagaagcgttcctcgcatgtgaccgaaatgaagaattggcagctaactatctattggagaactcaggtgactttgaagactgagttcacaaaacgttatctcttcttcgaaaaagttttggctcttttcttacgttgaattacatatcttccgtgaattaatgtgtgggatttgatctctctctctctgtgacttagtttgtcctttttttgttttgaatattattttctccgtttgcgatgggggcggttgttacgtttgtgatagatattgaagcagagagatacaaaagtgtgatcacataattctcgagggataaacataaagtgtaatcgatagatatttatcct

SEQ ID NO: 48056 - protein, 365 aa, Arabidopsis thaliana
  peptide (1)..(365): Ceres Seq. ID no. 12726487
  misc_feature (1)..(78): Pfam Name: Ubiquitin family Pfam Description: Ubiquitin family
  misc_feature (1)..(365): Homolog of NCBI NO: 14335004 NR Description: unknown protein [Arabidopsis thaliana]
  misc_feature (1)..(365): Homolog of NCBI NO: 15240922 NR Description: DNA repair protein RAD23 homolog
  misc_feature (1)..(365): Homolog of NCBI NO: 7446460 NR Description: RAD23 protein, isoform II - carrot
  misc_feature (1)..(365): Homolog of NCBI NO: 30409722 NR Description: RAD23-like protein [Arabidopsis thaliana]
  misc_feature (1)..(365): Homolog of NCBI NO: 15221013 NR Description: hypothetical protein; protein id: At1g16190.1
  misc_feature (1)..(365): Homolog of NCBI NO: 25387250 NR Description: protein F20B17.8 [imported] - Arabidopsis
  misc_feature (1)..(365): Homolog of NCBI NO: 30409718 NR Description: RAD23-like protein [Arabidopsis thaliana]
  misc_feature (1)..(365): Homolog of NCBI NO: 30699439 NR Description: DNA repair protein RAD23 -related [Arabidopsis
  misc_feature (1)..(365): Homolog of NCBI NO: 30409720 NR Description: RAD23-like protein [Arabidopsis thaliana]
  misc_feature (1)..(365): Homolog of NCBI NO: 22330746 NR Description: DNA repair protein RAD23, putative
MKLTVKTLKGSHFEIRVLPSDTIMAVKKNIEDSQGKDNYPCGQQLLIHNGKVLKDETSLVENKVTEEGFLVVMLSKSKSGGSAGQASVQPVSATTSSTKPAAPSTTQSSPVPASPIPAQEQPAAQTDTYGQAASTLVSGSSLEQMVQQIMEMGGGSWDKETVTRALRAAYNNPERAVDYLYSGIPQTAEVAVPVPEAQIAGSGAAPVAPASGGPNSSPLDLFPQETVAAAGSGDLGTLEFLRNNDQFQQLRTMVHSNPQILQPMLQELGKQNPQLLRLIQENQAEFLQLVNEPYEGSDGEGDMFDQPEQEMPHAINVTPAEQEAIQRLEAMGFDRALVIEAFLACDRNEELAANYLLENSGDFED

SEQ ID NO: 48057 - protein, 342 aa, Arabidopsis thaliana
  peptide (1)..(342): Ceres Seq. ID no. 12726488
  misc_feature (1)..(55): Pfam Name: Ubiquitin family Pfam Description: Ubiquitin family
  misc_feature (1)..(342): Homolog of NCBI NO: 14335004 NR Description: unknown protein [Arabidopsis thaliana]
  misc_feature (1)..(342): Homolog of NCBI NO: 15240922 NR Description: DNA repair protein RAD23 homolog
  misc_feature (1)..(342): Homolog of NCBI NO: 7446460 NR Description: RAD23 protein, isoform II - carrot
  misc_feature (1)..(342): Homolog of NCBI NO: 30409722 NR Description: RAD23-like protein [Arabidopsis thaliana]
  misc_feature (1)..(342): Homolog of NCBI NO: 15221013 NR Description: hypothetical protein; protein id: At1g16190.1
  misc_feature (1)..(342): Homolog of NCBI NO: 25387250 NR Description: protein F20B17.8 [imported] - Arabidopsis
  misc_feature (1)..(342): Homolog of NCBI NO: 30409718 NR Description: RAD23-like protein [Arabidopsis thaliana]
  misc_feature (1)..(342): Homolog of NCBI NO: 30699439 NR Description: DNA repair protein RAD23 -related [Arabidopsis
  misc_feature (1)..(342): Homolog of NCBI NO: 30409720 NR Description: RAD23-like protein [Arabidopsis thaliana]
  misc_feature (1)..(342): Homolog of NCBI NO: 22330746 NR Description: DNA repair protein RAD23, putative
MAVKKNIEDSQGKDNYPCGQQLLIHNGKVLKDETSLVENKVTEEGFLVVMLSKSKSGGSAGQASVQPVSATTSSTKPAAPSTTQSSPVPASPIPAQEQPAAQTDTYGQAASTLVSGSSLEQMVQQIMEMGGGSWDKETVTRALRAAYNNPERAVDYLYSGIPQTAEVAVPVPEAQIAGSGAAPVAPASGGPNSSPLDLFPQETVAAAGSGDLGTLEFLRNNDQFQQLRTMVHSNPQILQPMLQELGKQNPQLLRLIQENQAEFLQLVNEPYEGSDGEGDMFDQPEQEMPHAINVTPAEQEAIQRLEAMGFDRALVIEAFLACDRNEELAANYLLENSGDFED

SEQ ID NO: 48058 - protein, 293 aa, Arabidopsis thaliana
  peptide (1)..(293): Ceres Seq. ID no. 12726489
  misc_feature (69)..(111): Pfam Name: UBA/TS-N domain Pfam Description: UBA/TS-N domain
  misc_feature (1)..(293): Homolog of NCBI NO: 14335004 NR Description: unknown protein [Arabidopsis thaliana]
  misc_feature (1)..(293): Homolog of NCBI NO: 15240922 NR Description: DNA repair protein RAD23 homolog
  misc_feature (1)..(293): Homolog of NCBI NO: 7446460 NR Description: RAD23 protein, isoform II - carrot
  misc_feature (1)..(293): Homolog of NCBI NO: 30409722 NR Description: RAD23-like protein [Arabidopsis thaliana]
  misc_feature (1)..(293): Homolog of NCBI NO: 15221013 NR Description: hypothetical protein; protein id: At1g16190.1
  misc_feature (1)..(293): Homolog of NCBI NO: 25387250 NR Description: protein F20B17.8 [imported] - Arabidopsis
  misc_feature (1)..(293): Homolog of NCBI NO: 30409718 NR Description: RAD23-like protein [Arabidopsis thaliana]
  misc_feature (1)..(293): Homolog of NCBI NO: 30699439 NR Description: DNA repair protein RAD23 -related [Arabidopsis
  misc_feature (1)..(293): Homolog of NCBI NO: 30409720 NR Description: RAD23-like protein [Arabidopsis thaliana]
  misc_feature (1)..(293): Homolog of NCBI NO: 22330746 NR Description: DNA repair protein RAD23, putative
MLSKSKSGGSAGQASVQPVSATTSSTKPAAPSTTQSSPVPASPIPAQEQPAAQTDTYGQAASTLVSGSSLEQMVQQIMEMGGGSWDKETVTRALRAAYNNPERAVDYLYSGIPQTAEVAVPVPEAQIAGSGAAPVAPASGGPNSSPLDLFPQETVAAAGSGDLGTLEFLRNNDQFQQLRTMVHSNPQILQPMLQELGKQNPQLLRLIQENQAEFLQLVNEPYEGSDGEGDMFDQPEQEMPHAINVTPAEQEAIQRLEAMGFDRALVIEAFLACDRNEELAANYLLENSGDFED

SEQ ID NO: 48059 - DNA, 2467 bp, Arabidopsis thaliana
  misc_feature (1)..(2467): Ceres Seq. ID no. 12651461
  misc_feature: MA Experiment ID: 20000173 Result: Down-regulated in Transcription
  misc_feature: MA Experiment 20000173 PARAMETER Experiment Name: At_42deg_Heat_P Parameter: Age (day) Value: 14
  misc_feature: MA Experiment 20000173 PARAMETER Experiment Name: At_42deg_Heat_P Parameter: Organism Value: A. thaliana
  misc_feature: MA Experiment 20000173 PARAMETER Experiment Name: At_42deg_Heat_P Parameter: Plant Line Value: WS
  misc_feature: MA Experiment 20000173 PARAMETER Experiment Name: At_42deg_Heat_P Parameter: Temperature (deg C) Value: 42 vs. 22
  misc_feature: MA Experiment 20000173 PARAMETER Experiment Name: At_42deg_Heat_P Parameter: Timepoint (hr) Value: 6
  misc_feature: MA Experiment 20000173 PARAMETER Experiment Name: At_42deg_Heat_P Parameter: Tissue Value: Aerial
  misc_feature: MA Experiment ID: 20000437 Result: Down-regulated in Transcription
  misc_feature: MA Experiment 20000437 PARAMETER Experiment Name: At_Drought_P Parameter: Age (day) Value: 8
  misc_feature: MA Experiment 20000437 PARAMETER Experiment Name: At_Drought_P Parameter: Organism Value: A. thaliana
  misc_feature: MA Experiment 20000437 PARAMETER Experiment Name: At_Drought_P Parameter: Plant Line Value: WS
  misc_feature: MA Experiment 20000437 PARAMETER Experiment Name: At_Drought_P Parameter: Timepoint (hr) Value: 24
  misc_feature: MA Experiment 20000437 PARAMETER Experiment Name: At_Drought_P Parameter: Tissue Value: Whole Plant
  misc_feature: MA Experiment 20000437 PARAMETER Experiment Name: At_Drought_P Parameter: Treatment Value: Drought vs. No Drought
  misc_feature: MA Experiment ID: 20000794 Result: Down-regulated in Transcription
  misc_feature: MA Experiment 20000794 PARAMETER Experiment Name: At_Petals_P Parameter: Age (day) Value: 23-25 days
  misc_feature: MA Experiment 20000794 PARAMETER Experiment Name: At_Petals_P Parameter: Plant Line Value: WS
  misc_feature: MA Experiment 20000794 PARAMETER Experiment Name: At_Petals_P Parameter: Tissue Value: Petals vs. Whole plant
attttcctccaaaatatgaatcttcagttgactctaatctccttactcttcttcacttccgccatagctgaaaccttcaaaaacctcgattctcatccacagttcccttgtaaacctcctcattttagctcttatcccttctgcaatgtctctttatccataaaacaacgagcaatttctctcgtctccctcctcatgctcccagagaagataggtcagctctcaaacacagctgcttcagtaccccgtctcggtattcctccgtacgagtggtggtcggagtctttacacggactcgccgataacggtcccggagtttccttcaacggttcgatctccgccgctactagttttcctcaggtaatcgtatctgctgcatctttcaatagaacgctatggtacgagattggatctgctgttgcggtggaaggtcgggctatgtacaacggtggtcaagctgggttgacgttttgggctccgaatataaatgtgtttagggatccgagatggggaagaggacaggagactcctggtgaggatccgaaggtagtttccgagtatggagttgagttcgttagagggtttcaagagaagaagaaaaggaaggttttgaaaagaagatttagtgatgatgttgatgatgatcgtcatgatgatgatgctgatgggaagctcatgttatctgcttgttgtaagcatttcactgcctatgatttggaaaaatgggggaatttcactagatacgacttcaatgctgtggtcacagaacaggacatggaagacacatatcagcccccatttgagacttgtataagagatggtaaagctagctgcttgatgtgttcatataatgcagttaatggggtccctgcttgtgcgcaaggagacttattacaaaaagctcgagttgagtggggatttgaagggtacattacatcagactgtgatgctgtggcaactatttttgcgtaccaaggatataccaagtcacctgaggaagctgttgctgatgccataaaagcaggggtggatataaattgtggaacatacatgcttcggcacacacaatctgcgattgagcaggggaaggtgagcgaagaactagtagaccgagctctgctaaatctctttgctgttcaacttcgtcttggactttttgatggtgatccaagaagaggacagtacggaaagttaggatcaaatgacatttgtagctcagaccacagaaaattggcactggaagcaacaagacagggtatcgtgctcctgaaaaatgatcacaagttgttgcctttgaacaaaaaccatgtttcttcattagcaatcgttggtccaatggcgaataatataagcaatatgggcggtacttatacaggaaagccgtgtcaacgaaagactttgttcacggaacttctggagtatgtgaagaagacatcttatgcgtctggttgctcagacgtgtcttgtgattctgataccggatttggagaagctgtggccatcgccaagggagcggattttgtcatagtagttgcaggattagatctctctcaagaaaccgaggataaggatcgagttagtctttctttgcctggtaaacagaaagatcttgtgtctcatgttgctgctgtgagcaaaaaaccggtgattcttgttctaaccggtggaggaccagtggatgtaacgtttgctaaaaatgacccgagaatcggaagcattatctggattggttatccaggtgaaactggtggacaagcactcgctgaaatcatatttggagacttcaatccaggtggtagattaccgacaacgtggtatccggagtcattcacggatgtggcaatgtcggatatgcacatgagagccaattcatctcgtggatatccaggaagaacgtacagattctataccggacctcaagtttacagttttgggaccggtttaagctacacgaaattcgagtacaagatcttatcagcaccaatcagacttagcttatcggaacttcttccacaacagtcttctcacaagaaacaactacaacatggagaagaacttcgatacttacagctcgatgatgtgattgttaactcttgcgaatctctgcggtttaacgttcgtgttcatgtgagcaataccggagaaatcgacggtagtcatgttgtgatgctgttttcgaaaatgccaccggttttatctggtgttccggagaagcagctgattggttatgatcgtgttcatgttcgttccaatgaaatgatggaaacagtgttcgtaatcgatccttgcaagcagctaagcgtagcgaatgatgtcgggaagagagtgattcctctggggagtcatgtcttgttcttgggagatttacaacattctctctctgttgaattctaaaacactgtaatccgaaaaaatttcattactgtttatttccttctagaatgatctatatatatacttttgaaac

SEQ ID NO: 48060 - protein, 797 aa, Arabidopsis thaliana
  peptide (1)..(797): Ceres Seq. ID no. 12651462
  misc_feature (420)..(652): Pfam Name: Glycosyl hydrolase family 3 C terminal domain Pfam Description: Glycosyl hydrolase family 3 C terminal domain
  misc_feature (33)..(197): Homolog of NCBI NO: 38344900 NR Description: OSJNBb0079B02.3 [Oryza sativa (japonica
  misc_feature (220)..(795): Homolog of NCBI NO: 38344900 NR Description: OSJNBb0079B02.3 [Oryza sativa (japonica
  misc_feature (3)..(197): Homolog of NCBI NO: 15242492 NR Description: glycosyl hydrolase family 3
  misc_feature (219)..(795): Homolog of NCBI NO: 15242492 NR Description: glycosyl hydrolase family 3
  misc_feature (12)..(197): Homolog of NCBI NO: 15237736 NR Description: glycosyl hydrolase family 3; protein id:
  misc_feature (193)..(795): Homolog of NCBI NO: 15237736 NR Description: glycosyl hydrolase family 3; protein id:
  misc_feature (33)..(795): Homolog of NCBI NO: 15218202 NR Description: glycosyl hydrolase family 3
  misc_feature (43)..(794): Homolog of NCBI NO: 18025342 NR Description: beta-D-xylosidase [Hordeum vulgare]
  misc_feature (36)..(196): Homolog of NCBI NO: 38346629 NR Description: OSJNBa0074L08.23 [Oryza sativa (japonica
  misc_feature (216)..(796): Homolog of NCBI NO: 38346629 NR Description: OSJNBa0074L08.23 [Oryza sativa (japonica
IFLQNMNLQLTLISLLFFTSAIAETFKNLDSHPQFPCKPPHFSSYPFCNVSLSIKQRAISLVSLLMLPEKIGQLSNTAASVPRLGIPPYEWWSESLHGLADNGPGVSFNGSISAATSFPQVIVSAASFNRTLWYEIGSAVAVEGRAMYNGGQAGLTFWAPNINVFRDPRWGRGQETPGEDPKVVSEYGVEFVRGFQEKKKRKVLKRRFSDDVDDDRHDDDADGKLMLSACCKHFTAYDLEKWGNFTRYDFNAVVTEQDMEDTYQPPFETCIRDGKASCLMCSYNAVNGVPACAQGDLLQKARVEWGFEGYITSDCDAVATIFAYQGYTKSPEEAVADAIKAGVDINCGTYMLRHTQSAIEQGKVSEELVDRALLNLFAVQLRLGLFDGDPRRGQYGKLGSNDICSSDHRKLALEATRQGIVLLKNDHKLLPLNKNHVSSLAIVGPMANNISNMGGTYTGKPCQRKTLFTELLEYVKKTSYASGCSDVSCDSDTGFGEAVAIAKGADFVIVVAGLDLSQETEDKDRVSLSLPGKQKDLVSHVAAVSKKPVILVLTGGGPVDVTFAKNDPRIGSIIWIGYPGETGGQALAEIIFGDFNPGGRLPTTWYPESFTDVAMSDMHMRANSSRGYPGRTYRFYTGPQVYSFGTGLSYTKFEYKILSAPIRLSLSELLPQQSSHKKQLQHGEELRYLQLDDVIVNSCESLRFNVRVHVSNTGEIDGSHVVMLFSKMPPVLSGVPEKQLIGYDRVHVRSNEMMETVFVIDPCKQLSVANDVGKRVIPLGSHVLFLGDLQHSLSVEF

SEQ ID NO: 48061 - protein, 792 aa, Arabidopsis thaliana
  peptide (1)..(792): Ceres Seq. ID no. 12651463
  misc_feature (415)..(647): Pfam Name: Glycosyl hydrolase family 3 C terminal domain Pfam Description: Glycosyl hydrolase family 3 C terminal domain
  misc_feature (28)..(192): Homolog of NCBI NO: 38344900 NR Description: OSJNBb0079B02.3 [Oryza sativa (japonica
  misc_feature (215)..(790): Homolog of NCBI NO: 38344900 NR Description: OSJNBb0079B02.3 [Oryza sativa (japonica
  misc_feature (1)..(192): Homolog of NCBI NO: 15242492 NR Description: glycosyl hydrolase family 3
  misc_feature (214)..(790): Homolog of NCBI NO: 15242492 NR Description: glycosyl hydrolase family 3
  misc_feature (7)..(192): Homolog of NCBI NO: 15237736 NR Description: glycosyl hydrolase family 3; protein id:
  misc_feature (188)..(790): Homolog of NCBI NO: 15237736 NR Description: glycosyl hydrolase family 3; protein id:
  misc_feature (28)..(790): Homolog of NCBI NO: 15218202 NR Description: glycosyl hydrolase family 3
  misc_feature (38)..(789): Homolog of NCBI NO: 18025342 NR Description: beta-D-xylosidase [Hordeum vulgare]
  misc_feature (31)..(191): Homolog of NCBI NO: 38346629 NR Description: OSJNBa0074L08.23 [Oryza sativa (japonica
  misc_feature (211)..(791): Homolog of NCBI NO: 38346629 NR Description: OSJNBa0074L08.23 [Oryza sativa (japonica
MNLQLTLISLLFFTSAIAETFKNLDSHPQFPCKPPHFSSYPFCNVSLSIKQRAISLVSLLMLPEKIGQLSNTAASVPRLGIPPYEWWSESLHGLADNGPGVSFNGSISAATSFPQVIVSAASFNRTLWYEIGSAVAVEGRAMYNGGQAGLTFWAPNINVFRDPRWGRGQETPGEDPKVVSEYGVEFVRGFQEKKKRKVLKRRFSDDVDDDRHDDDADGKLMLSACCKHFTAYDLEKWGNFTRYDFNAVVTEQDMEDTYQPPFETCIRDGKASCLMCSYNAVNGVPACAQGDLLQKARVEWGFEGYITSDCDAVATIFAYQGYTKSPEEAVADAIKAGVDINCGTYMLRHTQSAIEQGKVSEELVDRALLNLFAVQLRLGLFDGDPRRGQYGKLGSNDICSSDHRKLALEATRQGIVLLKNDHKLLPLNKNHVSSLAIVGPMANNISNMGGTYTGKPCQRKTLFTELLEYVKKTSYASGCSDVSCDSDTGFGEAVAIAKGADFVIVVAGLDLSQETEDKDRVSLSLPGKQKDLVSHVAAVSKKPVILVLTGGGPVDVTFAKNDPRIGSIIWIGYPGETGGQALAEIIFGDFNPGGRLPTTWYPESFTDVAMSDMHMRANSSRGYPGRTYRFYTGPQVYSFGTGLSYTKFEYKILSAPIRLSLSELLPQQSSHKKQLQHGEELRYLQLDDVIVNSCESLRFNVRVHVSNTGEIDGSHVVMLFSKMPPVLSGVPEKQLIGYDRVHVRSNEMMETVFVIDPCKQLSVANDVGKRVIPLGSHVLFLGDLQHSLSVEF

SEQ ID NO: 48062 - protein, 732 aa, Arabidopsis thaliana
  peptide (1)..(732): Ceres Seq. ID no. 12651464
  misc_feature (355)..(587): Pfam Name: Glycosyl hydrolase family 3 C terminal domain Pfam Description: Glycosyl hydrolase family 3 C terminal domain
  misc_feature (1)..(132): Homolog of NCBI NO: 38344900 NR Description: OSJNBb0079B02.3 [Oryza sativa (japonica
  misc_feature (155)..(730): Homolog of NCBI NO: 38344900 NR Description: OSJNBb0079B02.3 [Oryza sativa (japonica
  misc_feature (1)..(132): Homolog of NCBI NO: 15242492 NR Description: glycosyl hydrolase family 3
  misc_feature (154)..(730): Homolog of NCBI NO: 15242492 NR Description: glycosyl hydrolase family 3
  misc_feature (1)..(132): Homolog of NCBI NO: 15237736 NR Description: glycosyl hydrolase family 3; protein id:
  misc_feature (128)..(730): Homolog of NCBI NO: 15237736 NR Description: glycosyl hydrolase family 3; protein id:
  misc_feature (1)..(730): Homolog of NCBI NO: 15218202 NR Description: glycosyl hydrolase family 3
  misc_feature (1)..(729): Homolog of NCBI NO: 18025342 NR Description: beta-D-xylosidase [Hordeum vulgare]
  misc_feature (1)..(131): Homolog of NCBI NO: 38346629 NR Description: OSJNBa0074L08.23 [Oryza sativa (japonica
  misc_feature (151)..(731): Homolog of NCBI NO: 38346629 NR Description: OSJNBa0074L08.23 [Oryza sativa (japonica
MLPEKIGQLSNTAASVPRLGIPPYEWWSESLHGLADNGPGVSFNGSISAATSFPQVIVSAASFNRTLWYEIGSAVAVEGRAMYNGGQAGLTFWAPNINVFRDPRWGRGQETPGEDPKVVSEYGVEFVRGFQEKKKRKVLKRRFSDDVDDDRHDDDADGKLMLSACCKHFTAYDLEKWGNFTRYDFNAVVTEQDMEDTYQPPFETCIRDGKASCLMCSYNAVNGVPACAQGDLLQKARVEWGFEGYITSDCDAVATIFAYQGYTKSPEEAVADAIKAGVDINCGTYMLRHTQSAIEQGKVSEELVDRALLNLFAVQLRLGLFDGDPRRGQYGKLGSNDICSSDHRKLALEATRQGIVLLKNDHKLLPLNKNHVSSLAIVGPMANNISNMGGTYTGKPCQRKTLFTELLEYVKKTSYASGCSDVSCDSDTGFGEAVAIAKGADFVIVVAGLDLSQETEDKDRVSLSLPGKQKDLVSHVAAVSKKPVILVLTGGGPVDVTFAKNDPRIGSIIWIGYPGETGGQALAEIIFGDFNPGGRLPTTWYPESFTDVAMSDMHMRANSSRGYPGRTYRFYTGPQVYSFGTGLSYTKFEYKILSAPIRLSLSELLPQQSSHKKQLQHGEELRYLQLDDVIVNSCESLRFNVRVHVSNTGEIDGSHVVMLFSKMPPVLSGVPEKQLIGYDRVHVRSNEMMETVFVIDPCKQLSVANDVGKRVIPLGSHVLFLGDLQHSLSVEF

SEQ ID NO: 48063 - DNA, 805 bp, Arabidopsis thaliana
  misc_feature (1)..(805): Ceres Seq. ID no. 13649014
  misc_feature: MA Experiment ID: 20000306 Result: Up-regulated in Transcription
  misc_feature: MA Experiment 20000306 PARAMETER Experiment Name: At_Germinating_Seeds_Sub_P Parameter: Age (hr) Value: 6 vs. 0
  misc_feature: MA Experiment 20000306 PARAMETER Experiment Name: At_Germinating_Seeds_Sub_P Parameter: Organism Value: A. thaliana
  misc_feature: MA Experiment 20000306 PARAMETER Experiment Name: At_Germinating_Seeds_Sub_P Parameter: Plant Line Value: WS
  misc_feature: MA Experiment 20000306 PARAMETER Experiment Name: At_Germinating_Seeds_Sub_P Parameter: Tissue Value: Germinating Seeds
  misc_feature: MA Experiment ID: 20000307 Result: Up-regulated in Transcription
  misc_feature: MA Experiment 20000307 PARAMETER Experiment Name: At_Germinating_Seeds_Sub_P Parameter: Age (hr) Value: 24 vs. 0
  misc_feature: MA Experiment 20000307 PARAMETER Experiment Name: At_Germinating_Seeds_Sub_P Parameter: Organism Value: A. thaliana
  misc_feature: MA Experiment 20000307 PARAMETER Experiment Name: At_Germinating_Seeds_Sub_P Parameter: Plant Line Value: WS
  misc_feature: MA Experiment 20000307 PARAMETER Experiment Name: At_Germinating_Seeds_Sub_P Parameter: Tissue Value: Germinating Seeds
  misc_feature: MA Experiment ID: 20000315 Result: Down-regulated in Transcription
  misc_feature: MA Experiment 20000315 PARAMETER Experiment Name: At_14day_Shoots-Roots_Sub_P Parameter: Age (day) Value: 14
  misc_feature: MA Experiment 20000315 PARAMETER Experiment Name: At_14day_Shoots-Roots_Sub_P Parameter: Organism Value: A. thaliana
  misc_feature: MA Experiment 20000315 PARAMETER Experiment Name: At_14day_Shoots-Roots_Sub_P Parameter: Plant Line Value: WS
  misc_feature: MA Experiment 20000315 PARAMETER Experiment Name: At_14day_Shoots-Roots_Sub_P Parameter: Tissue Value: Shoots vs. Whole Plant
gaagaaaaatagctaaactttgaaatccgtcagatcgatttctctctatatcggagccgtcatgaatcatcgtcggagctcgatcgtactattgatcctctcaattttatctcccgtgacactctctatacgatacgagctactttctgggcacacgaaatgcatctcagaggagattcacgcaaacgcaatgaccatcggaaaatacagcattataaaccctcacgaggatcatcctcttccttcttcccataaagtcaccgtcagggtcacatcgccacaagggacggcttatcacgaatcggacggagtagaatcgggacaattctcgtttgtagctgtggaaacaggggattacataagttgcttctccgccgtcgatcacaaaccagagacgacgctgatcattgactttgattggaggacgggtattcataccaaggattggtcgaatgtggcaaagaagagccaagtcgaaacgatggagtttgaggttaagaagttatttgaaaccgtgaatggaatccacgatgagatgttctatctccgcgacagggaagaagaaatgcacaatctgaacatagcgacaaattcgaagatggcatggttgagtttcgtgtcgcttgcagtttgtttatcggtcgcaggtcttcagttttggcacttgaagactttcttccagaaaaagaagcttatctgaaaaccattaccatctcctgagggcagagattgtattgaaaaccctatgactatagctttattacactactgaactcatttttcattttgttactgaatttttcgg

SEQ ID NO: 48064 - protein, 212 aa, Arabidopsis thaliana
  peptide (1)..(212): Ceres Seq. ID no. 13649015
  misc_feature (6)..(212): Pfam Name: emp24/gp25L/p24 family Pfam Description: emp24/gp25L/p24 family
  misc_feature (49)..(212): Homolog of NCBI NO: 26452085 NR Description: unknown protein [Arabidopsis thaliana]
  misc_feature (6)..(212): Homolog of NCBI NO: 33146897 NR Description: putative transmembrane protein
  misc_feature (9)..(212): Homolog of NCBI NO: 22330523 NR Description: emp24/gp25L/p24 family [Arabidopsis thaliana]
  misc_feature (9)..(212): Homolog of NCBI NO: 12597802 NR Description: unknown protein [Arabidopsis thaliana]
  misc_feature (9)..(212): Homolog of NCBI NO: 21618241 NR Description: unknown [Arabidopsis thaliana]
  misc_feature (9)..(212): Homolog of NCBI NO: 18396016 NR Description: emp24/gp25L/p24 family [Arabidopsis thaliana]
  misc_feature (5)..(212): Homolog of NCBI NO: 15227591 NR Description: emp24/gp25L/p24 family [Arabidopsis thaliana]
  misc_feature (1)..(164): Homolog of NCBI NO: 25309546 NR Description: hypothetical protein F7A19.10 [imported] -
  misc_feature (1)..(212): Homolog of NCBI NO: 8778403 NR Description: F16A14.23 [Arabidopsis thaliana]
  misc_feature (1)..(212): Homolog of NCBI NO: 15223027 NR Description: emp24/gp25L/p24 family [Arabidopsis thaliana]
MNHRRSSIVLLILSILSPVTLSIRYELLSGHTKCISEEIHANAMTIGKYSIINPHEDHPLPSSHKVTVRVTSPQGTAYHESDGVESGQFSFVAVETGDYISCFSAVDHKPETTLIIDFDWRTGIHTKDWSNVAKKSQVETMEFEVKKLFETVNGIHDEMFYLRDREEEMHNLNIATNSKMAWLSFVSLAVCLSVAGLQFWHLKTFFQKKKLI

SEQ ID NO: 48065 - protein, 169 aa, Arabidopsis thaliana
  peptide (1)..(169): Ceres Seq. ID no. 13649016
  misc_feature (1)..(169): Pfam Name: emp24/gp25L/p24 family Pfam Description: emp24/gp25L/p24 family
  misc_feature (6)..(169): Homolog of NCBI NO: 26452085 NR Description: unknown protein [Arabidopsis thaliana]
  misc_feature (1)..(169): Homolog of NCBI NO: 33146897 NR Description: putative transmembrane protein
  misc_feature (1)..(169): Homolog of NCBI NO: 22330523 NR Description: emp24/gp25L/p24 family [Arabidopsis thaliana]
  misc_feature (1)..(169): Homolog of NCBI NO: 12597802 NR Description: unknown protein [Arabidopsis thaliana]
  misc_feature (1)..(169): Homolog of NCBI NO: 21618241 NR Description: unknown [Arabidopsis thaliana]
  misc_feature (1)..(169): Homolog of NCBI NO: 18396016 NR Description: emp24/gp25L/p24 family [Arabidopsis thaliana]
  misc_feature (1)..(169): Homolog of NCBI NO: 15227591 NR Description: emp24/gp25L/p24 family [Arabidopsis thaliana]
  misc_feature (1)..(121): Homolog of NCBI NO: 25309546 NR Description: hypothetical protein F7A19.10 [imported] -
  misc_feature (1)..(169): Homolog of NCBI NO: 8778403 NR Description: F16A14.23 [Arabidopsis thaliana]
  misc_feature (1)..(169): Homolog of NCBI NO: 15223027 NR Description: emp24/gp25L/p24 family [Arabidopsis thaliana]
MTIGKYSIINPHEDHPLPSSHKVTVRVTSPQGTAYHESDGVESGQFSFVAVETGDYISCFSAVDHKPETTLIIDFDWRTGIHTKDWSNVAKKSQVETMEFEVKKLFETVNGIHDEMFYLRDREEEMHNLNIATNSKMAWLSFVSLAVCLSVAGLQFWHLKTFFQKKKLI

SEQ ID NO: 48066 - DNA, 2965 bp, Arabidopsis thaliana; identical to SEQ ID NO: 44820
  misc_feature (1)..(2965): Ceres Seq. ID no. 12562108
  misc_feature: MA Experiment ID: 108573 Result: Down-regulated in Transcription
  misc_feature: MA Experiment 108573 PARAMETER Experiment Name: At_Drought_cDNA_P Parameter: Timepoint (hr) Value: 6
  misc_feature: MA Experiment 108573 PARAMETER Experiment Name: At_Drought_cDNA_P Parameter: Tissue Value: Aerial
  misc_feature: MA Experiment 108573 PARAMETER Experiment Name: At_Drought_cDNA_P Parameter: Treatment Value: Drought vs. No Drought
  misc_feature: MA Experiment ID: 108576 Result: Up-regulated in Transcription
  misc_feature: MA Experiment 108576 PARAMETER Experiment Name: At_42deg_Heat_cDNA_P Parameter: Temperature (deg C) Value: 42 vs. 22
  misc_feature: MA Experiment 108576 PARAMETER Experiment Name: At_42deg_Heat_cDNA_P Parameter: Timepoint (hr) Value: 1
  misc_feature: MA Experiment 108576 PARAMETER Experiment Name: At_42deg_Heat_cDNA_P Parameter: Tissue Value: Aerial
  misc_feature: MA Experiment ID: 108577 Result: Up-regulated in Transcription
  misc_feature: MA Experiment 108577 PARAMETER Experiment Name: At_42deg_Heat_cDNA_P Parameter: Temperature (deg C) Value: 42 vs. 22
  misc_feature: MA Experiment 108577 PARAMETER Experiment Name: At_42deg_Heat_cDNA_P Parameter: Timepoint (hr) Value: 6
  misc_feature: MA Experiment 108577 PARAMETER Experiment Name: At_42deg_Heat_cDNA_P Parameter: Tissue Value: Aerial
  misc_feature: MA Experiment ID: 108668 Result: Up-regulated in Transcription
  misc_feature: MA Experiment 108668 PARAMETER Experiment Name: At_2mM_SA_cDNA_P Parameter: Plant Line Value: WS
  misc_feature: MA Experiment 108668 PARAMETER Experiment Name: At_2mM_SA_cDNA_P Parameter: Timepoint (hr) Value: 6
  misc_feature: MA Experiment 108668 PARAMETER Experiment Name: At_2mM_SA_cDNA_P Parameter: Treatment Value: 2mM SA vs. No Treatment
  misc_feature: MA Experiment ID: 20000090 Result: Up-regulated in Transcription
  misc_feature: MA Experiment ID: 20000093 Result: Up-regulated in Transcription
  misc_feature: MA Experiment 20000093 PARAMETER Experiment Name: At_42deg_Heat_cDNA_P Parameter: Temperature (deg C) Value: 42 vs. 22
  misc_feature: MA Experiment 20000093 PARAMETER Experiment Name: At_42deg_Heat_cDNA_P Parameter: Timepoint (hr) Value: 0.5
  misc_feature: MA Experiment 20000093 PARAMETER Experiment Name: At_42deg_Heat_cDNA_P Parameter: Tissue Value: Aerial
  misc_feature: MA Experiment ID: 20000112 Result: Up-regulated in Transcription
  misc_feature: MA Experiment 20000112 PARAMETER Experiment Name: At_42deg_Heat_cDNA_P Parameter: Temperature (deg C) Value: 42 vs. 22
  misc_feature: MA Experiment 20000112 PARAMETER Experiment Name: At_42deg_Heat_cDNA_P Parameter: Timepoint (hr) Value: 2
  misc_feature: MA Experiment 20000112 PARAMETER Experiment Name: At_42deg_Heat_cDNA_P Parameter: Tissue Value: Aerial
  misc_feature: MA Experiment ID: 20000144 Result: Up-regulated in Transcription
  misc_feature: MA Experiment 20000144 PARAMETER Experiment Name: At_42deg_Heat_cDNA_P Parameter: Temperature (deg C) Value: 42 vs. 22
  misc_feature: MA Experiment 20000144 PARAMETER Experiment Name: At_42deg_Heat_cDNA_P Parameter: Timepoint (hr) Value: 1
  misc_feature: MA Experiment 20000144 PARAMETER Experiment Name: At_42deg_Heat_cDNA_P Parameter: Tissue Value: Aerial
  misc_feature: MA Experiment ID: 20000171 Result: Up-regulated in Transcription
  misc_feature: MA Experiment 20000171 PARAMETER Experiment Name: At_42deg_Heat_P Parameter: Age (day) Value: 14
  misc_feature: MA Experiment 20000171 PARAMETER Experiment Name: At_42deg_Heat_P Parameter: Organism Value: A. thaliana
  misc_feature: MA Experiment 20000171 PARAMETER Experiment Name: At_42deg_Heat_P Parameter: Plant Line Value: WS
  misc_feature: MA Experiment 20000171 PARAMETER Experiment Name: At_42deg_Heat_P Parameter: Temperature (deg C) Value: 42 vs. 22
  misc_feature: MA Experiment 20000171 PARAMETER Experiment Name: At_42deg_Heat_P Parameter: Timepoint (hr) Value: 1
  misc_feature: MA Experiment 20000171 PARAMETER Experiment Name: At_42deg_Heat_P Parameter: Tissue Value: Aerial
  misc_feature: MA Experiment ID: 20000173 Result: Up-regulated in Transcription
  misc_feature: MA Experiment 20000173 PARAMETER Experiment Name: At_42deg_Heat_P Parameter: Age (day) Value: 14
  misc_feature: MA Experiment 20000173 PARAMETER Experiment Name: At_42deg_Heat_P Parameter: Organism Value: A. thaliana
  misc_feature: MA Experiment 20000173 PARAMETER Experiment Name: At_42deg_Heat_P Parameter: Plant Line Value: WS
  misc_feature: MA Experiment 20000173 PARAMETER Experiment Name: At_42deg_Heat_P Parameter: Temperature (deg C) Value: 42 vs. 22
  misc_feature: MA Experiment 20000173 PARAMETER Experiment Name: At_42deg_Heat_P Parameter: Timepoint (hr) Value: 6
  misc_feature: MA Experiment 20000173 PARAMETER Experiment Name: At_42deg_Heat_P Parameter: Tissue Value: Aerial
  misc_feature: MA Experiment ID: 20000179 Result: Up-regulated in Transcription
  misc_feature: MA Experiment 20000179 PARAMETER Experiment Name: At_Germinating_Seeds_P Parameter: Age (hr) Value: 6 vs. 0
  misc_feature: MA Experiment 20000179 PARAMETER Experiment Name: At_Germinating_Seeds_P Parameter: Tissue Value: Germinating Seeds
  misc_feature: MA Experiment ID: 20000180 Result: Up-regulated in Transcription
  misc_feature: MA Experiment 20000180 PARAMETER Experiment Name: At_Germinating_Seeds_P Parameter: Age (hr) Value: 24 vs. 0
  misc_feature: MA Experiment 20000180 PARAMETER Experiment Name: At_Germinating_Seeds_P Parameter: Tissue Value: Germinating Seeds
  misc_feature: MA Experiment ID: 20000184 Result: Down-regulated in Transcription
  misc_feature: MA Experiment 20000184 PARAMETER Experiment Name: At_Shoots__P Parameter: Age (day) Value: 7
  misc_feature: MA Experiment 20000184 PARAMETER Experiment Name: At_Shoots__P Parameter: Tissue Value: Shoots vs. Whole Plant
  misc_feature: MA Experiment ID: 20000227 Result: Up-regulated in Transcription
  misc_feature: MA Experiment 20000227 PARAMETER Experiment Name: At_Root-Tips-vs-Tops_P Parameter: Tissue Value: Root Tips vs. Root Tops
  misc_feature: MA Experiment ID: 20000234 Result: Up-regulated in Transcription
  misc_feature: MA Experiment 20000234 PARAMETER Experiment Name: At_Siliques_P Parameter: Age (day) Value: 21
  misc_feature: MA Experiment 20000234 PARAMETER Experiment Name: At_Siliques_P Parameter: Organism Value: A. thaliana
  misc_feature: MA Experiment 20000234 PARAMETER Experiment Name: At_Siliques_P Parameter: Plant Line Value: WS
  misc_feature: MA Experiment 20000234 PARAMETER Experiment Name: At_Siliques_P Parameter: Tissue Value: Less Than 5mm Siliques vs. Whole Plant
  misc_feature: MA Experiment ID: 20001248 Result: Down-regulated in Transcription
  misc_feature: MA Experiment 20001248 PARAMETER Experiment Name: At_Far-red-induction_P Parameter: Age (day) Value: 7
  misc_feature: MA Experiment 20001248 PARAMETER Experiment Name: At_Far-red-induction_P Parameter: Light Value: Far-red vs. White
  misc_feature: MA Experiment 20001248 PARAMETER Experiment Name: At_Far-red-induction_P Parameter: Organism Value: A. thaliana
  misc_feature: MA Experiment 20001248 PARAMETER Experiment Name: At_Far-red-induction_P Parameter: Plant Line Value: Columbia
  misc_feature: MA Experiment 20001248 PARAMETER Experiment Name: At_Far-red-induction_P Parameter: Timepoint (hr) Value: 4
  misc_feature: MA Experiment 20001248 PARAMETER Experiment Name: At_Far-red-induction_P Parameter: Tissue Value: Whole Plant

SEQ ID NO: 48067 - protein, 867 aa, Arabidopsis thaliana; identical to SEQ ID NO: 44821
  peptide (1)..(867): Ceres Seq. ID no. 12562109
  misc_feature (25)..(860): Homolog of NCBI NO: 40788905 NR Description: KIAA0201 [Homo sapiens]
  misc_feature (25)..(846): Homolog of NCBI NO: 30525062 NR Description: heat shock protein 4 [Cyprinus carpio]
  misc_feature (3)..(789): Homolog of NCBI NO: 10720182 NR Description: 150 kDa oxygen-regulated protein precursor
  misc_feature (3)..(789): Homolog of NCBI NO: 40807010 NR Description: Orp150 protein [Rattus norvegicus]
  misc_feature (3)..(850): Homolog of NCBI NO: 28838718 NR Description: Similar to oxygen regulated protein (150kD)
  misc_feature (3)..(425): Homolog of NCBI NO: 28828809 NR Description: similar to heat shock protein
  misc_feature (446)..(866): Homolog of NCBI NO: 28828809 NR Description: similar to heat shock protein
  misc_feature (537)..(826): Homolog of NCBI NO: 7488120 NR Description: probable heat shock protein 110 - Arabidopsis
  misc_feature (537)..(867): Homolog of NCBI NO: 25407544 NR Description: HSP like protein [imported] - Arabidopsis
  misc_feature (2)..(468): Homolog of NCBI NO: 7488118 NR Description: probable growth regulator - Arabidopsis thaliana
  misc_feature (25)..(860): Homolog of NCBI NO: 40788905 NR Description: KIAA0201 [Homo sapiens]
  misc_feature (25)..(846): Homolog of NCBI NO: 30525062 NR Description: heat shock protein 4 [Cyprinus carpio]
  misc_feature (3)..(789): Homolog of NCBI NO: 10720182 NR Description: 150 kDa oxygen-regulated protein precursor
  misc_feature (3)..(789): Homolog of NCBI NO: 40807010 NR Description: Orp150 protein [Rattus norvegicus]
  misc_feature (3)..(850): Homolog of NCBI NO: 28838718 NR Description: Similar to oxygen regulated protein (150kD)
  misc_feature (3)..(425): Homolog of NCBI NO: 28828809 NR Description: similar to heat shock protein
  misc_feature (446)..(866): Homolog of NCBI NO: 28828809 NR Description: similar to heat shock protein
  misc_feature (537)..(826): Homolog of NCBI NO: 7488120 NR Description: probable heat shock protein 110 - Arabidopsis
  misc_feature (537)..(867): Homolog of NCBI NO: 25407544 NR Description: HSP like protein [imported] - Arabidopsis
  misc_feature (2)..(468): Homolog of NCBI NO: 7488118 NR Description: probable growth regulator - Arabidopsis thaliana

SEQ ID NO: 48068 - protein, 811 aa, Arabidopsis thaliana; identical to SEQ ID NO: 44822
  peptide (1)..(811): Ceres Seq. ID no. 12562110
  misc_feature (1)..(804): Homolog of NCBI NO: 40788905 NR Description: KIAA0201 [Homo sapiens]
  misc_feature (1)..(790): Homolog of NCBI NO: 30525062 NR Description: heat shock protein 4 [Cyprinus carpio]
  misc_feature (1)..(733): Homolog of NCBI NO: 10720182 NR Description: 150 kDa oxygen-regulated protein precursor
  misc_feature (1)..(733): Homolog of NCBI NO: 40807010 NR Description: Orp150 protein [Rattus norvegicus]
  misc_feature (1)..(794): Homolog of NCBI NO: 28838718 NR Description: Similar to oxygen regulated protein (150kD)
  misc_feature (1)..(369): Homolog of NCBI NO: 28828809 NR Description: similar to heat shock protein
  misc_feature (390)..(810): Homolog of NCBI NO: 28828809 NR Description: similar to heat shock protein
  misc_feature (481)..(770): Homolog of NCBI NO: 7488120 NR Description: probable heat shock protein 110 - Arabidopsis
  misc_feature (481)..(811): Homolog of NCBI NO: 25407544 NR Description: HSP like protein [imported] - Arabidopsis
  misc_feature (1)..(412): Homolog of NCBI NO: 7488118 NR Description: probable growth regulator - Arabidopsis thaliana
  misc_feature (1)..(804): Homolog of NCBI NO: 40788905 NR Description: KIAA0201 [Homo sapiens]
  misc_feature (1)..(790): Homolog of NCBI NO: 30525062 NR Description: heat shock protein 4 [Cyprinus carpio]
  misc_feature (1)..(733): Homolog of NCBI NO: 10720182 NR Description: 150 kDa oxygen-regulated protein precursor
  misc_feature (1)..(733): Homolog of NCBI NO: 40807010 NR Description: Orp150 protein [Rattus norvegicus]
  misc_feature (1)..(794): Homolog of NCBI NO: 28838718 NR Description: Similar to oxygen regulated protein (150kD)
  misc_feature (1)..(369): Homolog of NCBI NO: 28828809 NR Description: similar to heat shock protein
  misc_feature (390)..(810): Homolog of NCBI NO: 28828809 NR Description: similar to heat shock protein
  misc_feature (481)..(770): Homolog of NCBI NO: 7488120 NR Description: probable heat shock protein 110 - Arabidopsis
  misc_feature (481)..(811): Homolog of NCBI NO: 25407544 NR Description: HSP like protein [imported] - Arabidopsis
  misc_feature (1)..(412): Homolog of NCBI NO: 7488118 NR Description: probable growth regulator - Arabidopsis thaliana

SEQ ID NO: 48069 - protein, 771 aa, Arabidopsis thaliana; identical to SEQ ID NO: 44823
  peptide (1)..(771): Ceres Seq. ID no. 12562111
  misc_feature (1)..(764): Homolog of NCBI NO: 40788905 NR Description: KIAA0201 [Homo sapiens]
  misc_feature (1)..(750): Homolog of NCBI NO: 30525062 NR Description: heat shock protein 4 [Cyprinus carpio]
  misc_feature (1)..(693): Homolog of NCBI NO: 10720182 NR Description: 150 kDa oxygen-regulated protein precursor
  misc_feature (1)..(693): Homolog of NCBI NO: 40807010 NR Description: Orp150 protein [Rattus norvegicus]
  misc_feature (1)..(754): Homolog of NCBI NO: 28838718 NR Description: Similar to oxygen regulated protein (150kD)
  misc_feature (1)..(329): Homolog of NCBI NO: 28828809 NR Description: similar to heat shock protein
  misc_feature (350)..(770): Homolog of NCBI NO: 28828809 NR Description: similar to heat shock protein
  misc_feature (441)..(730): Homolog of NCBI NO: 7488120 NR Description: probable heat shock protein 110 - Arabidopsis
  misc_feature (441)..(771): Homolog of NCBI NO: 25407544 NR Description: HSP like protein [imported] - Arabidopsis
  misc_feature (1)..(372): Homolog of NCBI NO: 7488118 NR Description: probable growth regulator - Arabidopsis thaliana
  misc_feature (1)..(764): Homolog of NCBI NO: 40788905 NR Description: KIAA0201 [Homo sapiens]
  misc_feature (1)..(750): Homolog of NCBI NO: 30525062 NR Description: heat shock protein 4 [Cyprinus carpio]
  misc_feature (1)..(693): Homolog of NCBI NO: 10720182 NR Description: 150 kDa oxygen-regulated protein precursor
  misc_feature (1)..(693): Homolog of NCBI NO: 40807010 NR Description: Orp150 protein [Rattus norvegicus]
  misc_feature (1)..(754): Homolog of NCBI NO: 28838718 NR Description: Similar to oxygen regulated protein (150kD)
  misc_feature (1)..(329): Homolog of NCBI NO: 28828809 NR Description: similar to heat shock protein
  misc_feature (350)..(770): Homolog of NCBI NO: 28828809 NR Description: similar to heat shock protein
  misc_feature (441)..(730): Homolog of NCBI NO: 7488120 NR Description: probable heat shock protein 110 - Arabidopsis
  misc_feature (441)..(771): Homolog of NCBI NO: 25407544 NR Description: HSP like protein [imported] - Arabidopsis
  misc_feature (1)..(372): Homolog of NCBI NO: 7488118 NR Description: probable growth regulator - Arabidopsis thaliana

SEQ ID NO: 48070 - DNA, 1980 bp, Arabidopsis thaliana
  misc_feature (1)..(1980): Ceres Seq. ID no. 13649295
  misc_feature: MA Experiment ID: 20000286 Result: Up-regulated in Transcription
  misc_feature: MA Experiment 20000286 PARAMETER Experiment Name: At_Open_Flower_P Parameter: Age (day) Value: 21
  misc_feature: MA Experiment 20000286 PARAMETER Experiment Name: At_Open_Flower_P Parameter: Plant Line Value: WS
  misc_feature: MA Experiment 20000286 PARAMETER Experiment Name: At_Open_Flower_P Parameter: Tissue Value: Half Open vs. Whole Plant
  misc_feature: MA Experiment ID: 20000441 Result: Down-regulated in Transcription
  misc_feature: MA Experiment 20000441 PARAMETER Experiment Name: At_1uM_BR-BRZ__P Parameter: Tissue Value: Shoot Apices
  misc_feature: MA Experiment 20000441 PARAMETER Experiment Name: At_1uM_BR-BRZ__P Parameter: Treatment Value: 1uM BR vs. No Treatment
  misc_feature: MA Experiment ID: 20000443 Result: Down-regulated in Transcription
  misc_feature: MA Experiment 20000443 PARAMETER Experiment Name: At_1uM_BR-BRZ__P Parameter: Tissue Value: Shoot Apices
  misc_feature: MA Experiment 20000443 PARAMETER Experiment Name: At_1uM_BR-BRZ__P Parameter: Treatment Value: 1uM BRZ vs. No Treatment
gtctagaagtcagacatggctgtttcagttagtaagcagtacatgacaagtcttgtagtgatcttgctcttcatctccttatcatctctctctccaacttcaacttcacacagctgtgaccctgtcgaagaagaagaagaagcctcctccttcggttacgtttgccactcaaacctccaaaagtgccacactttcgccattctcagagccaaacctcccttctattccctctcggacctgagtcgccatcttggtctcgacgcagacgacgagtatgttccgaaaggtcagttactcttgatcccaatagagtgcaggtgtaatggaagcatctacgaggccagtctcattaaaaattgcgttaaaggagacacctttcgctctgtctctcagtctctgcaaggcttgaccacctgcctatctatcagagagaagaatccacatatttccgaagacaagcttggcgacaacattaaactgcgtttggcgatcaggtgctcttgtccacaagaaggcgtttcaaacgctagttttctcgttacgtatccggtgggcgtccgcgacagcgtttcaagcctggcggttaggtttaacacaacagaggatgccattgtctctgcaaacaacaaatctggtgtggttccactcaagcctgctctcatccctcttgatcacaaaccagagaaacaaggatcccggaaaagaaatccatccaagaagaaacggtcaaagatgaagctcatgatcgctgtgagcagcgcgattgctggagtttgcggtcttgtcactctcatggtgtttggttacttacactggaagaaagagacgcagattcaaacgcaaacgcaaaagtggattagcaacaaagaccccgagacgcggcagctgagtctgagcatccgaaccacgagtgacaagaaaatctcgtttgaagggtcgcaggacggttccatcttggattctcacaacaccgtcggcaccacaacgccccgaaaacccgttctggagatttacgcgtttgaagagttagagaaggccacggagaatttcagttcaagcaatcacatcaaaggttcggtttatttcggttcgctcaaaggcaaagacttggctataaagcaagtcaatgcagatgaaatgaaaagattcgatttcgggcttctcaatgatcagtcacactactataaccacaatgtgattagggttcttggaacatgttttagagaaatcgatcaagattcttatctggttttcgagtatgcaaggaatgggtccctgtgggattggattcagaacaaattggccatcaagaatcaattcatcgagtcttgttactgtttcttggcatggaaacagaggatcaagatatgtcacgatgtcgccatcgcgttaaagtatatgcatcggatcaactacgtccacggcaacatcaagagcagaaacatcttcttgaacgaagatctcagaggtaaagtcggaaactttgggatgtcaaagtgcgtaaccaatgaattagccacagaagagaaccttatagagagttcactgtctccagcttctgacatatttgcttacgggataatcgtaatggaggttttgtctggacaaaccccagatatgttgcttggattgcaagaagtagagacaacatcccttgggacacaagaaacttttgtttccgaatggagtagattaagaaggcttctcggggacaaggaaaagctgagggaagtgatggacagcacattgggagagagctattcggttgattctgcgtttgaaatcgcaagtattgcaagagattgtactgcagaagaagccgagtcaaggccgagcgcggttgagattgcagagagggtttcaagattggtggatgacgatgaagatgaagaagatgaggcagtaatagatagagagagtaccttaatttcagagagttcatacaagcctttggtaaagaagagtagtataatagattaa

SEQ ID NO: 48071 - protein, 654 aa, Arabidopsis thaliana
  peptide (1)..(654): Ceres Seq. ID no. 13649296
  misc_feature (117)..(156): Pfam Name: LysM domain Pfam Description: LysM domain
  misc_feature (443)..(636): Homolog of NCBI NO: 37651070 NR Description: SYM10 protein [Pisum sativum]
  misc_feature (443)..(636): Homolog of NCBI NO: 37651066 NR Description: SYM10 protein [Pisum sativum]
  misc_feature (4)..(277): Homolog of NCBI NO: 37651070 NR Description: SYM10 protein [Pisum sativum]
  misc_feature (4)..(277): Homolog of NCBI NO: 37651066 NR Description: SYM10 protein [Pisum sativum]
  misc_feature (96)..(637): Homolog of NCBI NO: 34485516 NR Description: LysM domain-containing receptor-like kinase 3
  misc_feature (13)..(531): Homolog of NCBI NO: 15224061 NR Description: protein kinase -related [Arabidopsis thaliana]
  misc_feature (84)..(639): Homolog of NCBI NO: 37651060 NR Description: Nod-factor receptor 1b [Lotus corniculatus var.
  misc_feature (88)..(611): Homolog of NCBI NO: 5441881 NR Description: Similar to putative receptor kinase. (AC002332)
  misc_feature (84)..(639): Homolog of NCBI NO: 37651058 NR Description: Nod-factor receptor 1a [Lotus corniculatus var.
  misc_feature (88)..(637): Homolog of NCBI NO: 15226133 NR Description: protein kinase -related [Arabidopsis thaliana]
MAVSVSKQYMTSLVVILLFISLSSLSPTSTSHSCDPVEEEEEASSFGYVCHSNLQKCHTFAILRAKPPFYSLSDLSRHLGLDADDEYVPKGQLLLIPIECRCNGSIYEASLIKNCVKGDTFRSVSQSLQGLTTCLSIREKNPHISEDKLGDNIKLRLAIRCSCPQEGVSNASFLVTYPVGVRDSVSSLAVRFNTTEDAIVSANNKSGVVPLKPALIPLDHKPEKQGSRKRNPSKKKRSKMKLMIAVSSAIAGVCGLVTLMVFGYLHWKKETQIQTQTQKWISNKDPETRQLSLSIRTTSDKKISFEGSQDGSILDSHNTVGTTTPRKPVLEIYAFEELEKATENFSSSNHIKGSVYFGSLKGKDLAIKQVNADEMKRFDFGLLNDQSHYYNHNVIRVLGTCFREIDQDSYLVFEYARNGSLWDWIQNKLAIKNQFIESCYCFLAWKQRIKICHDVAIALKYMHRINYVHGNIKSRNIFLNEDLRGKVGNFGMSKCVTNELATEENLIESSLSPASDIFAYGIIVMEVLSGQTPDMLLGLQEVETTSLGTQETFVSEWSRLRRLLGDKEKLREVMDSTLGESYSVDSAFEIASIARDCTAEEAESRPSAVEIAERVSRLVDDDEDEEDEAVIDRESTLISESSYKPLVKKSSIID

SEQ ID NO: 48072 - protein, 645 aa, Arabidopsis thaliana
  peptide (1)..(645): Ceres Seq. ID no. 13649297
  misc_feature (108)..(147): Pfam Name: LysM domain Pfam Description: LysM domain
  misc_feature (434)..(627): Homolog of NCBI NO: 37651070 NR Description: SYM10 protein [Pisum sativum]
  misc_feature (434)..(627): Homolog of NCBI NO: 37651066 NR Description: SYM10 protein [Pisum sativum]
  misc_feature (1)..(268): Homolog of NCBI NO: 37651070 NR Description: SYM10 protein [Pisum sativum]
  misc_feature (1)..(268): Homolog of NCBI NO: 37651066 NR Description: SYM10 protein [Pisum sativum]
  misc_feature (87)..(628): Homolog of NCBI NO: 34485516 NR Description: LysM domain-containing receptor-like kinase 3
  misc_feature (4)..(522): Homolog of NCBI NO: 15224061 NR Description: protein kinase -related [Arabidopsis thaliana]
  misc_feature (75)..(630): Homolog of NCBI NO: 37651060 NR Description: Nod-factor receptor 1b [Lotus corniculatus var.
  misc_feature (79)..(602): Homolog of NCBI NO: 5441881 NR Description: Similar to putative receptor kinase. (AC002332)
  misc_feature (75)..(630): Homolog of NCBI NO: 37651058 NR Description: Nod-factor receptor 1a [Lotus corniculatus var.
  misc_feature (79)..(628): Homolog of NCBI NO: 15226133 NR Description: protein kinase -related [Arabidopsis thaliana]
MTSLVVILLFISLSSLSPTSTSHSCDPVEEEEEASSFGYVCHSNLQKCHTFAILRAKPPFYSLSDLSRHLGLDADDEYVPKGQLLLIPIECRCNGSIYEASLIKNCVKGDTFRSVSQSLQGLTTCLSIREKNPHISEDKLGDNIKLRLAIRCSCPQEGVSNASFLVTYPVGVRDSVSSLAVRFNTTEDAIVSANNKSGVVPLKPALIPLDHKPEKQGSRKRNPSKKKRSKMKLMIAVSSAIAGVCGLVTLMVFGYLHWKKETQIQTQTQKWISNKDPETRQLSLSIRTTSDKKISFEGSQDGSILDSHNTVGTTTPRKPVLEIYAFEELEKATENFSSSNHIKGSVYFGSLKGKDLAIKQVNADEMKRFDFGLLNDQSHYYNHNVIRVLGTCFREIDQDSYLVFEYARNGSLWDWIQNKLAIKNQFIESCYCFLAWKQRIKICHDVAIALKYMHRINYVHGNIKSRNIFLNEDLRGKVGNFGMSKCVTNELATEENLIESSLSPASDIFAYGIIVMEVLSGQTPDMLLGLQEVETTSLGTQETFVSEWSRLRRLLGDKEKLREVMDSTLGESYSVDSAFEIASIARDCTAEEAESRPSAVEIAERVSRLVDDDEDEEDEAVIDRESTLISESSYKPLVKKSSIID

SEQ ID NO: 48073 - protein, 415 aa, Arabidopsis thaliana
  peptide (1)..(415): Ceres Seq. ID no. 13649298
  misc_feature (204)..(397): Homolog of NCBI NO: 37651070 NR Description: SYM10 protein [Pisum sativum]
  misc_feature (204)..(397): Homolog of NCBI NO: 37651066 NR Description: SYM10 protein [Pisum sativum]
  misc_feature (1)..(38): Homolog of NCBI NO: 37651070 NR Description: SYM10 protein [Pisum sativum]
  misc_feature (1)..(38): Homolog of NCBI NO: 37651066 NR Description: SYM10 protein [Pisum sativum]
  misc_feature (1)..(398): Homolog of NCBI NO: 34485516 NR Description: LysM domain-containing receptor-like kinase 3
  misc_feature (1)..(292): Homolog of NCBI NO: 15224061 NR Description: protein kinase -related [Arabidopsis thaliana]
  misc_feature (1)..(400): Homolog of NCBI NO: 37651060 NR Description: Nod-factor receptor 1b [Lotus corniculatus var.
  misc_feature (1)..(372): Homolog of NCBI NO: 5441881 NR Description: Similar to putative receptor kinase. (AC002332)
  misc_feature (1)..(400): Homolog of NCBI NO: 37651058 NR Description: Nod-factor receptor 1a [Lotus corniculatus var.
  misc_feature (1)..(398): Homolog of NCBI NO: 15226133 NR Description: protein kinase -related [Arabidopsis thaliana]
MKLMIAVSSAIAGVCGLVTLMVFGYLHWKKETQIQTQTQKWISNKDPETRQLSLSIRTTSDKKISFEGSQDGSILDSHNTVGTTTPRKPVLEIYAFEELEKATENFSSSNHIKGSVYFGSLKGKDLAIKQVNADEMKRFDFGLLNDQSHYYNHNVIRVLGTCFREIDQDSYLVFEYARNGSLWDWIQNKLAIKNQFIESCYCFLAWKQRIKICHDVAIALKYMHRINYVHGNIKSRNIFLNEDLRGKVGNFGMSKCVTNELATEENLIESSLSPASDIFAYGIIVMEVLSGQTPDMLLGLQEVETTSLGTQETFVSEWSRLRRLLGDKEKLREVMDSTLGESYSVDSAFEIASIARDCTAEEAESRPSAVEIAERVSRLVDDDEDEEDEAVIDRESTLISESSYKPLVKKSSIID

SEQ ID NO: 48074 - DNA, 1254 bp, Arabidopsis thaliana
  misc_feature (1)..(1254): Ceres Seq. ID no. 13649385
  misc_feature: MA Experiment ID: 20000173 Result: Down-regulated in Transcription
  misc_feature: MA Experiment 20000173 PARAMETER Experiment Name: At_42deg_Heat_P Parameter: Age (day) Value: 14
  misc_feature: MA Experiment 20000173 PARAMETER Experiment Name: At_42deg_Heat_P Parameter: Organism Value: A. thaliana
  misc_feature: MA Experiment 20000173 PARAMETER Experiment Name: At_42deg_Heat_P Parameter: Plant Line Value: WS
  misc_feature: MA Experiment 20000173 PARAMETER Experiment Name: At_42deg_Heat_P Parameter: Temperature (deg C) Value: 42 vs. 22
  misc_feature: MA Experiment 20000173 PARAMETER Experiment Name: At_42deg_Heat_P Parameter: Timepoint (hr) Value: 6
  misc_feature: MA Experiment 20000173 PARAMETER Experiment Name: At_42deg_Heat_P Parameter: Tissue Value: Aerial
  misc_feature: MA Experiment ID: 20000184 Result: Down-regulated in Transcription
  misc_feature: MA Experiment 20000184 PARAMETER Experiment Name: At_Shoots__P Parameter: Age (day) Value: 7
  misc_feature: MA Experiment 20000184 PARAMETER Experiment Name: At_Shoots__P Parameter: Tissue Value: Shoots vs. Whole Plant
  misc_feature: MA Experiment ID: 20000235 Result: Up-regulated in Transcription
  misc_feature: MA Experiment 20000235 PARAMETER Experiment Name: At_Siliques_P Parameter: Age (day) Value: 21
  misc_feature: MA Experiment 20000235 PARAMETER Experiment Name: At_Siliques_P Parameter: Organism Value: A. thaliana
  misc_feature: MA Experiment 20000235 PARAMETER Experiment Name: At_Siliques_P Parameter: Plant Line Value: WS
  misc_feature: MA Experiment 20000235 PARAMETER Experiment Name: At_Siliques_P Parameter: Tissue Value: 5-10mm Siliques vs. Whole Plant
  misc_feature: MA Experiment ID: 20001451 Result: Down-regulated in Transcription
  misc_feature: MA Experiment 20001451 PARAMETER Experiment Name: At_Far-red-induction_P Parameter: Age (day) Value: 7
  misc_feature: MA Experiment 20001451 PARAMETER Experiment Name: At_Far-red-induction_P Parameter: Light Value: Far-red vs. White
  misc_feature: MA Experiment 20001451 PARAMETER Experiment Name: At_Far-red-induction_P Parameter: Organism Value: A. thaliana
  misc_feature: MA Experiment 20001451 PARAMETER Experiment Name: At_Far-red-induction_P Parameter: Plant Line Value: Columbia
  misc_feature: MA Experiment 20001451 PARAMETER Experiment Name: At_Far-red-induction_P Parameter: Timepoint (hr) Value: 24
  misc_feature: MA Experiment 20001451 PARAMETER Experiment Name: At_Far-red-induction_P Parameter: Tissue Value: Whole Plant
ccggcaggtgtttgtttatagcgggaactctcacccaaagtaatttcatctccgattttttttttttttggttgttgttcgcatctctgtgtaataaaaagagtaaaaccaaaaccctagaaaaaaaatctccatctttttttattccgccattggaagatcgatcactgagaaggatgagtatggagatggagttgtttgtcactccagagaagcagaggcaacatccttcagtgagcgttgagaaaactccagtgagaaggaaattgattgttgatgatgattctgaaattggatcagagaagaaagggcaatcaagaacttctggaggcgggcttcgtcaattcagtgttatggtttgtcagaagttggaagccaagaagataactacttacaaggaggttgcagacgaaattatttcagattttgccacaattaagcaaaacgcagagaagcctttgaatgaaaatgagtacaatgagaagaacataaggcggagagtctacgatgcgctcaatgtgttcatggcgttggatattattgcaagggataaaaaggaaatccggtggaaaggacttcctattacctgcaaaaaggatgtggaagaagtcaagatggatcgtaataaagttatgagcagtgtgcaaaagaaggctgcttttcttaaagagttgagagaaaaggtctcaagtcttgagagtcttatgtcgagaaatcaagagatggttgtgaagactcaaggcccagcagaaggatttaccttaccattcattctacttgagacaaaccctcacgcagtagtcgaaatcgagatttctgaagatatgcaacttgtacacctcgacttcaatagcacacctttctcggtccatgatgatgcttacattttgaaactgatgcaagaacagaagcaagaacagaacagagtatcttcttcttcatctacacatcaccaatctcaacatagctccgctcattcttcatccagttcttgcattgcttctggaacctcaggcccggtttgctggaactcgggatccattgatactcgctgaccgagcttctattcccaaattcttcaagaagaagaagtaatgatctaattggtatactaaaaaattatacatctggtttagtgttcaattgagagagactgtaaaatcaattcataggccaacaaatgtttgtttatccaattttcctttttattcgaacttgatgcgatatttcaacggaaacagaaactattgtttt

SEQ ID NO: 48075 - protein, 350 aa, Arabidopsis thaliana
  peptide (1)..(350): Ceres Seq. ID no. 13649386
  misc_feature (111)..(349): Pfam Name: Transcription factor E2F/dimerisation partner (TDP) Pfam Description: Transcription factor E2F/dimerisation partner
  misc_feature (100)..(303): Homolog of NCBI NO: 29367575 NR Description: DP protein [Oryza sativa (japonica
  misc_feature (85)..(297): Homolog of NCBI NO: 11877791 NR Description: DP protein [Triticum sp.]
  misc_feature (98)..(317): Homolog of NCBI NO: 11358893 NR Description: transcription factor-like protein - Arabidopsis
  misc_feature (98)..(306): Homolog of NCBI NO: 29371983 NR Description: E2F dimerization factor [Oryza sativa (japonica
  misc_feature (98)..(299): Homolog of NCBI NO: 29367654 NR Description: DP TF [Oryza sativa (japonica cultivar-group)]
  misc_feature (98)..(317): Homolog of NCBI NO: 30680032 NR Description: DPB transcription factor [Arabidopsis thaliana]
  misc_feature (98)..(317): Homolog of NCBI NO: 21554147 NR Description: unknown [Arabidopsis thaliana]
  misc_feature (100)..(340): Homolog of NCBI NO: 32187097 NR Description: DP1 [Populus tremula x Populus tremuloides]
  misc_feature (63)..(350): Homolog of NCBI NO: 11357273 NR Description: DP-2 transcription factor-like - Arabidopsis
  misc_feature (59)..(350): Homolog of NCBI NO: 22326573 NR Description: DPA transcription factor [Arabidopsis thaliana]
GRCLFIAGTLTQSNFISDFFFFWLLFASLCNKKSKTKTLEKKSPSFFIPPLEDRSLRRMSMEMELFVTPEKQRQHPSVSVEKTPVRRKLIVDDDSEIGSEKKGQSRTSGGGLRQFSVMVCQKLEAKKITTYKEVADEIISDFATIKQNAEKPLNENEYNEKNIRRRVYDALNVFMALDIIARDKKEIRWKGLPITCKKDVEEVKMDRNKVMSSVQKKAAFLKELREKVSSLESLMSRNQEMVVKTQGPAEGFTLPFILLETNPHAVVEIEISEDMQLVHLDFNSTPFSVHDDAYILKLMQEQKQEQNRVSSSSSTHHQSQHSSAHSSSSSCIASGTSGPVCWNSGSIDTR

SEQ ID NO: 48076 - protein, 292 aa, Arabidopsis thaliana
  peptide (1)..(292): Ceres Seq. ID no. 13649387
  misc_feature (53)..(291): Pfam Name: Transcription factor E2F/dimerisation partner (TDP) Pfam Description: Transcription factor E2F/dimerisation partner
  misc_feature (42)..(245): Homolog of NCBI NO: 29367575 NR Description: DP protein [Oryza sativa (japonica
  misc_feature (27)..(239): Homolog of NCBI NO: 11877791 NR Description: DP protein [Triticum sp.]
  misc_feature (40)..(259): Homolog of NCBI NO: 11358893 NR Description: transcription factor-like protein - Arabidopsis
  misc_feature (40)..(248): Homolog of NCBI NO: 29371983 NR Description: E2F dimerization factor [Oryza sativa (japonica
  misc_feature (40)..(241): Homolog of NCBI NO: 29367654 NR Description: DP TF [Oryza sativa (japonica cultivar-group)]
  misc_feature (40)..(259): Homolog of NCBI NO: 30680032 NR Description: DPB transcription factor [Arabidopsis thaliana]
  misc_feature (40)..(259): Homolog of NCBI NO: 21554147 NR Description: unknown [Arabidopsis thaliana]
  misc_feature (42)..(282): Homolog of NCBI NO: 32187097 NR Description: DP1 [Populus tremula x Populus tremuloides]
  misc_feature (5)..(292): Homolog of NCBI NO: 11357273 NR Description: DP-2 transcription factor-like - Arabidopsis
  misc_feature (1)..(292): Homolog of NCBI NO: 22326573 NR Description: DPA transcription factor [Arabidopsis thaliana]
MSMEMELFVTPEKQRQHPSVSVEKTPVRRKLIVDDDSEIGSEKKGQSRTSGGGLRQFSVMVCQKLEAKKITTYKEVADEIISDFATIKQNAEKPLNENEYNEKNIRRRVYDALNVFMALDIIARDKKEIRWKGLPITCKKDVEEVKMDRNKVMSSVQKKAAFLKELREKVSSLESLMSRNQEMVVKTQGPAEGFTLPFILLETNPHAVVEIEISEDMQLVHLDFNSTPFSVHDDAYILKLMQEQKQEQNRVSSSSSTHHQSQHSSAHSSSSSCIASGTSGPVCWNSGSIDTR

SEQ ID NO: 48077 - protein, 290 aa, Arabidopsis thaliana
  peptide (1)..(290): Ceres Seq. ID no. 13649388
  misc_feature (51)..(289): Pfam Name: Transcription factor E2F/dimerisation partner (TDP) Pfam Description: Transcription factor E2F/dimerisation partner
  misc_feature (40)..(243): Homolog of NCBI NO: 29367575 NR Description: DP protein [Oryza sativa (japonica
  misc_feature (25)..(237): Homolog of NCBI NO: 11877791 NR Description: DP protein [Triticum sp.]
  misc_feature (38)..(257): Homolog of NCBI NO: 11358893 NR Description: transcription factor-like protein - Arabidopsis
  misc_feature (38)..(246): Homolog of NCBI NO: 29371983 NR Description: E2F dimerization factor [Oryza sativa (japonica
  misc_feature (38)..(239): Homolog of NCBI NO: 29367654 NR Description: DP TF [Oryza sativa (japonica cultivar-group)]
  misc_feature (38)..(257): Homolog of NCBI NO: 30680032 NR Description: DPB transcription factor [Arabidopsis thaliana]
  misc_feature (38)..(257): Homolog of NCBI NO: 21554147 NR Description: unknown [Arabidopsis thaliana]
  misc_feature (40)..(280): Homolog of NCBI NO: 32187097 NR Description: DP1 [Populus tremula x Populus tremuloides]
  misc_feature (3)..(290): Homolog of NCBI NO: 11357273 NR Description: DP-2 transcription factor-like - Arabidopsis
  misc_feature (1)..(290): Homolog of NCBI NO: 22326573 NR Description: DPA transcription factor [Arabidopsis thaliana]
MEMELFVTPEKQRQHPSVSVEKTPVRRKLIVDDDSEIGSEKKGQSRTSGGGLRQFSVMVCQKLEAKKITTYKEVADEIISDFATIKQNAEKPLNENEYNEKNIRRRVYDALNVFMALDIIARDKKEIRWKGLPITCKKDVEEVKMDRNKVMSSVQKKAAFLKELREKVSSLESLMSRNQEMVVKTQGPAEGFTLPFILLETNPHAVVEIEISEDMQLVHLDFNSTPFSVHDDAYILKLMQEQKQEQNRVSSSSSTHHQSQHSSAHSSSSSCIASGTSGPVCWNSGSIDTR

SEQ ID NO: 48078 - DNA, 1972 bp, Arabidopsis thaliana
  misc_feature (1)..(1972): Ceres Seq. ID no. 13647613
  misc_feature: MA Experiment ID: 20000329 Result: Down-regulated in Transcription
  misc_feature: MA Experiment 20000329 PARAMETER Experiment Name: At_4deg_Cold_Sub_P Parameter: Age (day) Value: 14
  misc_feature: MA Experiment 20000329 PARAMETER Experiment Name: At_4deg_Cold_Sub_P Parameter: Organism Value: A. thaliana
  misc_feature: MA Experiment 20000329 PARAMETER Experiment Name: At_4deg_Cold_Sub_P Parameter: Plant Line Value: WS
  misc_feature: MA Experiment 20000329 PARAMETER Experiment Name: At_4deg_Cold_Sub_P Parameter: Temperature (deg C) Value: 4 vs. 22
  misc_feature: MA Experiment 20000329 PARAMETER Experiment Name: At_4deg_Cold_Sub_P Parameter: Timepoint (hr) Value: 6
  misc_feature: MA Experiment 20000329 PARAMETER Experiment Name: At_4deg_Cold_Sub_P Parameter: Tissue Value: Aerial
  misc_feature: MA Experiment ID: 20000440 Result: Down-regulated in Transcription
  misc_feature: MA Experiment 20000440 PARAMETER Experiment Name: At_Closed-Flower__Sub_P Parameter: Tissue Value: Closed Flower vs. Whole Plant
actttttcgtctagatacattcttcgtgaagaaatccaagtgcacacattcattagtgttggacggacccattttattttggatttttttgtataattctttggggtttttttgttaataattcacttctgtctataatatgattatgattgttcatcatattttagctgtaatttcctctcttgaacaaaattattattttcgtgatgtttttaagtacgtgacgaaagatcatttggtgatctcactgacatgatttgcccagcctgtcaggtttacctatggtcaaatatcattttctcgattttgccccaaacggtcaaggcatatatccccaatcttcaaagggtatttatgtacttttcgctattaaccgtgtggctatatgaagccgattcctcataacaactacaaaaaaggaaagcttcttccctccggcaaattcttacgtttctccggcggttagaaaaatgacaccacagatcaaaactcatctcttgccgaagcaagaaccttcttcgtctgagaaccatggatcatcaacctccggcatcgttttcaacgtgtcaacgagtataatcggagccggaataatgtcgatgccggcggcgtttaaagttcttggaatagttccagcgtttttgattatcacgatcatagcttggctttccacaatttccgttggatttctgatgaaatcaactctcgccggagaatcaactacttacgccggagttatgaaagagtcgtttggtaaaacaggatccatcgctgtacagattgctacgatggttgctacttttggttgtatgattatattttcgattattataggagatgtgctttctggtaatgaaaatggtggtcctgaacatattggagttttgcaagaatggtttggttcttactggtggaacacgagaatcttcgctttgttatttgtctacggctttgtcttgcttccattggtcctgcgtagacgagtcgaaagactggcaattagttccgctgtatcgtttcttcttgcggttctatttgttgtcataagctcggtgctggcgatttccgcgctggtgaatggacaaacgaagaatccaagactgtttccggagttgagcaatggaggatcgttctggcaactcttcacagcttcccctgttatagttacagccttcacgtttcacttcaatgttcatccaattggattcgagctcaaagatccattacaagtgatcccagcaactaagatctctgtcatcttgtgtgctgctatctacttcgcaactggactctttggttaccttctctttggagatgcaactatgtcggatattctagtgaactttgaccagagctctggttcttccattggttctcttctcaacgacattgtcagactcagctacgtgcttcacctcatgctggtctttcctctcctgaacttctcattgagagcaaatctcgacgaactcttgtaccccaagaagccgtccttggaaaaagacacaaaaagattcatcggactcactctggctctactgatttgctgtttcttgtctgcaatcgctgtaccagacatttggtacttctttcagttcatgggatcaaccatcacagtctccatagcattcatatttccagccgccattgttctaaggaatatccatggtgtatcaacctcaagagagaagatcgtagctgcaataatgcttgttcttgctgttgccactagcattattgctatctcgacaaatttatacagcctcgcagcaaactagtcgttgaaaaaagttttgcaaacagtcccttccatgatcacttcaaagaaatctgtaaaattattagcttgccgtagcattcatatttatatctttgtgaaataggtttgtcagaaaatgcaatgtaatagctatacaaagtgcaatttttgttgctgcttgaaacagagaaagaggaaatgaacaactcttct

SEQ ID NO: 48079 - protein, 435 aa, Arabidopsis thaliana
  peptide (1)..(435): Ceres Seq. ID no. 13647614
  misc_feature (16)..(309): Homolog of NCBI NO: 24461850 NR Description: CTV.3 [Poncirus trifoliata]
  misc_feature (18)..(432): Homolog of NCBI NO: 18412864 NR Description: amino acid transporter family [Arabidopsis
  misc_feature (6)..(396): Homolog of NCBI NO: 34907894 NR Description: P0439E11.11 [Oryza sativa (japonica
  misc_feature (13)..(432): Homolog of NCBI NO: 15241555 NR Description: amino acid transporter family [Arabidopsis
  misc_feature (13)..(432): Homolog of NCBI NO: 9758059 NR Description: amino acid transporter-like protein [Arabidopsis
  misc_feature (5)..(432): Homolog of NCBI NO: 18406463 NR Description: amino acid transporter family [Arabidopsis
  misc_feature (9)..(432): Homolog of NCBI NO: 34898706 NR Description: hypothetical protein [Oryza sativa (japonica
  misc_feature (46)..(434): Homolog of NCBI NO: 25408697 NR Description: hypothetical protein At2g40420 [imported] -
  misc_feature (1)..(434): Homolog of NCBI NO: 30688270 NR Description: amino acid transporter family [Arabidopsis
  misc_feature (1)..(435): Homolog of NCBI NO: 15228851 NR Description: amino acid transporter family [Arabidopsis
MTPQIKTHLLPKQEPSSSENHGSSTSGIVFNVSTSIIGAGIMSMPAAFKVLGIVPAFLIITIIAWLSTISVGFLMKSTLAGESTTYAGVMKESFGKTGSIAVQIATMVATFGCMIIFSIIIGDVLSGNENGGPEHIGVLQEWFGSYWWNTRIFALLFVYGFVLLPLVLRRRVERLAISSAVSFLLAVLFVVISSVLAISALVNGQTKNPRLFPELSNGGSFWQLFTASPVIVTAFTFHFNVHPIGFELKDPLQVIPATKISVILCAAIYFATGLFGYLLFGDATMSDILVNFDQSSGSSIGSLLNDIVRLSYVLHLMLVFPLLNFSLRANLDELLYPKKPSLEKDTKRFIGLTLALLICCFLSAIAVPDIWYFFQFMGSTITVSIAFIFPAAIVLRNIHGVSTSREKIVAAIMLVLAVATSIIAISTNLYSLAAN

SEQ ID NO: 48080 - protein, 394 aa, Arabidopsis thaliana
  peptide (1)..(394): Ceres Seq. ID no. 13647615
  misc_feature (1)..(268): Homolog of NCBI NO: 24461850 NR Description: CTV.3 [Poncirus trifoliata]
  misc_feature (1)..(391): Homolog of NCBI NO: 18412864 NR Description: amino acid transporter family [Arabidopsis
  misc_feature (1)..(355): Homolog of NCBI NO: 34907894 NR Description: P0439E11.11 [Oryza sativa (japonica
  misc_feature (1)..(391): Homolog of NCBI NO: 15241555 NR Description: amino acid transporter family [Arabidopsis
  misc_feature (1)..(391): Homolog of NCBI NO: 9758059 NR Description: amino acid transporter-like protein [Arabidopsis
  misc_feature (1)..(391): Homolog of NCBI NO: 18406463 NR Description: amino acid transporter family [Arabidopsis
  misc_feature (1)..(391): Homolog of NCBI NO: 34898706 NR Description: hypothetical protein [Oryza sativa (japonica
  misc_feature (5)..(393): Homolog of NCBI NO: 25408697 NR Description: hypothetical protein At2g40420 [imported] -
  misc_feature (1)..(393): Homolog of NCBI NO: 30688270 NR Description: amino acid transporter family [Arabidopsis
  misc_feature (1)..(394): Homolog of NCBI NO: 15228851 NR Description: amino acid transporter family [Arabidopsis
MSMPAAFKVLGIVPAFLIITIIAWLSTISVGFLMKSTLAGESTTYAGVMKESFGKTGSIAVQIATMVATFGCMIIFSIIIGDVLSGNENGGPEHIGVLQEWFGSYWWNTRIFALLFVYGFVLLPLVLRRRVERLAISSAVSFLLAVLFVVISSVLAISALVNGQTKNPRLFPELSNGGSFWQLFTASPVIVTAFTFHFNVHPIGFELKDPLQVIPATKISVILCAAIYFATGLFGYLLFGDATMSDILVNFDQSSGSSIGSLLNDIVRLSYVLHLMLVFPLLNFSLRANLDELLYPKKPSLEKDTKRFIGLTLALLICCFLSAIAVPDIWYFFQFMGSTITVSIAFIFPAAIVLRNIHGVSTSREKIVAAIMLVLAVATSIIAISTNLYSLAAN

SEQ ID NO: 48081 - protein, 392 aa, Arabidopsis thaliana
  peptide (1)..(392): Ceres Seq. ID no. 13647616
  misc_feature (1)..(266): Homolog of NCBI NO: 24461850 NR Description: CTV.3 [Poncirus trifoliata]
  misc_feature (1)..(389): Homolog of NCBI NO: 18412864 NR Description: amino acid transporter family [Arabidopsis
  misc_feature (1)..(353): Homolog of NCBI NO: 34907894 NR Description: P0439E11.11 [Oryza sativa (japonica
  misc_feature (1)..(389): Homolog of NCBI NO: 15241555 NR Description: amino acid transporter family [Arabidopsis
  misc_feature (1)..(389): Homolog of NCBI NO: 9758059 NR Description: amino acid transporter-like protein [Arabidopsis
  misc_feature (1)..(389): Homolog of NCBI NO: 18406463 NR Description: amino acid transporter family [Arabidopsis
  misc_feature (1)..(389): Homolog of NCBI NO: 34898706 NR Description: hypothetical protein [Oryza sativa (japonica
  misc_feature (3)..(391): Homolog of NCBI NO: 25408697 NR Description: hypothetical protein At2g40420 [imported] -
  misc_feature (1)..(391): Homolog of NCBI NO: 30688270 NR Description: amino acid transporter family [Arabidopsis
  misc_feature (1)..(392): Homolog of NCBI NO: 15228851 NR Description: amino acid transporter family [Arabidopsis
MPAAFKVLGIVPAFLIITIIAWLSTISVGFLMKSTLAGESTTYAGVMKESFGKTGSIAVQIATMVATFGCMIIFSIIIGDVLSGNENGGPEHIGVLQEWFGSYWWNTRIFALLFVYGFVLLPLVLRRRVERLAISSAVSFLLAVLFVVISSVLAISALVNGQTKNPRLFPELSNGGSFWQLFTASPVIVTAFTFHFNVHPIGFELKDPLQVIPATKISVILCAAIYFATGLFGYLLFGDATMSDILVNFDQSSGSSIGSLLNDIVRLSYVLHLMLVFPLLNFSLRANLDELLYPKKPSLEKDTKRFIGLTLALLICCFLSAIAVPDIWYFFQFMGSTITVSIAFIFPAAIVLRNIHGVSTSREKIVAAIMLVLAVATSIIAISTNLYSLAAN

SEQ ID NO: 48082 - DNA, 1677 bp, Arabidopsis thaliana
  misc_feature (1)..(1677): Ceres Seq. ID no. 13649087
  misc_feature: MA Experiment ID: 20000180 Result: Down-regulated in Transcription
  misc_feature: MA Experiment 20000180 PARAMETER Experiment Name: At_Germinating_Seeds_P Parameter: Age (hr) Value: 24 vs. 0
  misc_feature: MA Experiment 20000180 PARAMETER Experiment Name: At_Germinating_Seeds_P Parameter: Tissue Value: Germinating Seeds
  misc_feature: MA Experiment ID: 20000184 Result: Down-regulated in Transcription
  misc_feature: MA Experiment 20000184 PARAMETER Experiment Name: At_Shoots__P Parameter: Age (day) Value: 7
  misc_feature: MA Experiment 20000184 PARAMETER Experiment Name: At_Shoots__P Parameter: Tissue Value: Shoots vs. Whole Plant
  misc_feature: MA Experiment ID: 20000496 Result: Up-regulated in Transcription
  misc_feature: MA Experiment 20000496 PARAMETER Experiment Name: At_Guard_Cells_P Parameter: Harvest Date Value: 7/19/2002
  misc_feature: MA Experiment 20000496 PARAMETER Experiment Name: At_Guard_Cells_P Parameter: Organism Value: Canola
  misc_feature: MA Experiment 20000496 PARAMETER Experiment Name: At_Guard_Cells_P Parameter: Tissue Value: Guard Cells vs. Leaves
gaagaaggcgaagaaaatcatcaccaccgtcaacttttctcttgcggacaagacgattctccgattatccccaagaggagaatcctcataatcattttctccgattcgattcgtcttccttggtcctggattgcttcatgaatttctaggacaacaatggaggctcgtccagttcatagatcaggttcgagagacctcacacgcacttcttcaatcccatctacacaaaaaccttcaccagtagaagatagtttcatgagatcagataacaacagtcagttaatgtctagaccattaggacaaacctaccatttactttcatctagtaacggtggagctgttggacatatatgttcttcttcatcatctggttttgcaaccaatctccattactcaactatggtatctcatgagaaacaacaacactacacaggaagcagcagtaataatgctgtgcagacaccaagcaacaacgatagtgcttggtgtcatgattcattgccaggagggtttcttgacttccatgaaaccaacccggcgattcaaaacaactgtcagattgaggatggtggcattgcggctgcttttgatgacattcaaaaacgaagtgattggcatgaatgggctgaccatttgatcactgatgatgatcctttgatgtctactaactggaatgatctcttgcttgaaacaaattccaattcagattcaaaggaccagaagacactgcaaattccgcaacctcagattgttcagcagcaaccttctccgtctgtggaattgcgacctgttagcacaacatcttcaaacagcaataacggaacgggcaaggcacgaatgcgttggacgccagagcttcacgaggcttttgttgaggctgtcaacagtcttggcggtagtgaaagagctactcctaaaggggtactgaagattatgaaagttgaaggcttgactatatatcatgttaaaagccatttacagaaatataggacagctagatatcggccagaaccatcagaaactggttcgccagaaaggaagttgacaccgcttgaacatataacatctcttgatttgaaaggtgggataggtattacagaggctctacgacttcagatggaagtacagaagcaactccatgagcagctcgagattcaaagaaacctgcaactccgaatagaagaacaaggcaagtacctgcaaatgatgttcgagaagcaaaactctggtcttaccaaagggacagcctcaacatcagattccgcagccaaatctgaacaagaagacaagaagactgctgattcgaaggaggttccagaagaagaaaccaggaaatgtgaggaactagaatctccacagccaaagcgtcccaaaatcgataattgaaagtattggtcttttgctggataatctcggagtttcagagttaacagtgatagagagaacgagctcttatcttgaggttcttcaggacttctctctttactgtttaactatttttctgatggaagactctcaactcagctgtgtagacaaacaacagatccccaaggaagaaacaaaacaaaaataaaaagttagtttgggagaatcttcatcattcagtgtaatctaaatgcttaactcatcattagttttacagctacagatttcttatgttaatcttttttagaatat

SEQ ID NO: 48083 - protein, 409 aa, Arabidopsis thaliana
  peptide (1)..(409): Ceres Seq. ID no. 13649088
  misc_feature (227)..(278): Pfam Name: Myb-like DNA-binding domain Pfam Description: Myb-like DNA-binding domain
  misc_feature (52)..(370): Homolog of NCBI NO: 26452281 NR Description: putative transfactor [Arabidopsis thaliana]
  misc_feature (52)..(388): Homolog of NCBI NO: 34394847 NR Description: putative CDPK substrate protein 1
  misc_feature (161)..(387): Homolog of NCBI NO: 4519671 NR Description: transfactor [Nicotiana tabacum]
  misc_feature (119)..(372): Homolog of NCBI NO: 30692110 NR Description: expressed protein [Arabidopsis thaliana]
  misc_feature (119)..(372): Homolog of NCBI NO: 30692105 NR Description: expressed protein [Arabidopsis thaliana]
  misc_feature (119)..(372): Homolog of NCBI NO: 21954075 NR Description: unknown protein [Arabidopsis thaliana]
  misc_feature (119)..(372): Homolog of NCBI NO: 21537366 NR Description: transfactor, putative [Arabidopsis thaliana]
  misc_feature (103)..(383): Homolog of NCBI NO: 30680980 NR Description: myb family transcription factor [Arabidopsis
  misc_feature (1)..(409): Homolog of NCBI NO: 7487685 NR Description: hypothetical protein T5F17.60 - Arabidopsis
  misc_feature (1)..(409): Homolog of NCBI NO: 22329004 NR Description: expressed protein [Arabidopsis thaliana]
MEARPVHRSGSRDLTRTSSIPSTQKPSPVEDSFMRSDNNSQLMSRPLGQTYHLLSSSNGGAVGHICSSSSSGFATNLHYSTMVSHEKQQHYTGSSSNNAVQTPSNNDSAWCHDSLPGGFLDFHETNPAIQNNCQIEDGGIAAAFDDIQKRSDWHEWADHLITDDDPLMSTNWNDLLLETNSNSDSKDQKTLQIPQPQIVQQQPSPSVELRPVSTTSSNSNNGTGKARMRWTPELHEAFVEAVNSLGGSERATPKGVLKIMKVEGLTIYHVKSHLQKYRTARYRPEPSETGSPERKLTPLEHITSLDLKGGIGITEALRLQMEVQKQLHEQLEIQRNLQLRIEEQGKYLQMMFEKQNSGLTKGTASTSDSAAKSEQEDKKTADSKEVPEEETRKCEELESPQPKRPKIDN

SEQ ID NO: 48084 - protein, 376 aa, Arabidopsis thaliana
  peptide (1)..(376): Ceres Seq. ID no. 13649089
  misc_feature (194)..(245): Pfam Name: Myb-like DNA-binding domain Pfam Description: Myb-like DNA-binding domain
  misc_feature (19)..(337): Homolog of NCBI NO: 26452281 NR Description: putative transfactor [Arabidopsis thaliana]
  misc_feature (19)..(355): Homolog of NCBI NO: 34394847 NR Description: putative CDPK substrate protein 1
  misc_feature (128)..(354): Homolog of NCBI NO: 4519671 NR Description: transfactor [Nicotiana tabacum]
  misc_feature (86)..(339): Homolog of NCBI NO: 21954075 NR Description: unknown protein [Arabidopsis thaliana]
  misc_feature (86)..(339): Homolog of NCBI NO: 30692110 NR Description: expressed protein [Arabidopsis thaliana]
  misc_feature (86)..(339): Homolog of NCBI NO: 30692105 NR Description: expressed protein [Arabidopsis thaliana]
  misc_feature (86)..(339): Homolog of NCBI NO: 21537366 NR Description: transfactor, putative [Arabidopsis thaliana]
  misc_feature (70)..(350): Homolog of NCBI NO: 30680980 NR Description: myb family transcription factor [Arabidopsis
  misc_feature (1)..(376): Homolog of NCBI NO: 7487685 NR Description: hypothetical protein T5F17.60 - Arabidopsis
  misc_feature (1)..(376): Homolog of NCBI NO: 22329004 NR Description: expressed protein [Arabidopsis thaliana]
MRSDNNSQLMSRPLGQTYHLLSSSNGGAVGHICSSSSSGFATNLHYSTMVSHEKQQHYTGSSSNNAVQTPSNNDSAWCHDSLPGGFLDFHETNPAIQNNCQIEDGGIAAAFDDIQKRSDWHEWADHLITDDDPLMSTNWNDLLLETNSNSDSKDQKTLQIPQPQIVQQQPSPSVELRPVSTTSSNSNNGTGKARMRWTPELHEAFVEAVNSLGGSERATPKGVLKIMKVEGLTIYHVKSHLQKYRTARYRPEPSETGSPERKLTPLEHITSLDLKGGIGITEALRLQMEVQKQLHEQLEIQRNLQLRIEEQGKYLQMMFEKQNSGLTKGTASTSDSAAKSEQEDKKTADSKEVPEEETRKCEELESPQPKRPKIDN

SEQ ID NO: 48085 - protein, 367 aa, Arabidopsis thaliana
  peptide (1)..(367): Ceres Seq. ID no. 13649090
  misc_feature (185)..(236): Pfam Name: Myb-like DNA-binding domain Pfam Description: Myb-like DNA-binding domain
  misc_feature (10)..(328): Homolog of NCBI NO: 26452281 NR Description: putative transfactor [Arabidopsis thaliana]
  misc_feature (10)..(346): Homolog of NCBI NO: 34394847 NR Description: putative CDPK substrate protein 1
  misc_feature (119)..(345): Homolog of NCBI NO: 4519671 NR Description: transfactor [Nicotiana tabacum]
  misc_feature (77)..(330): Homolog of NCBI NO: 21954075 NR Description: unknown protein [Arabidopsis thaliana]
  misc_feature (77)..(330): Homolog of NCBI NO: 30692105 NR Description: expressed protein [Arabidopsis thaliana]
  misc_feature (77)..(330): Homolog of NCBI NO: 30692110 NR Description: expressed protein [Arabidopsis thaliana]
  misc_feature (77)..(330): Homolog of NCBI NO: 21537366 NR Description: transfactor, putative [Arabidopsis thaliana]
  misc_feature (61)..(341): Homolog of NCBI NO: 30680980 NR Description: myb family transcription factor [Arabidopsis
  misc_feature (1)..(367): Homolog of NCBI NO: 7487685 NR Description: hypothetical protein T5F17.60 - Arabidopsis
  misc_feature (1)..(367): Homolog of NCBI NO: 22329004 NR Description: expressed protein [Arabidopsis thaliana]
MSRPLGQTYHLLSSSNGGAVGHICSSSSSGFATNLHYSTMVSHEKQQHYTGSSSNNAVQTPSNNDSAWCHDSLPGGFLDFHETNPAIQNNCQIEDGGIAAAFDDIQKRSDWHEWADHLITDDDPLMSTNWNDLLLETNSNSDSKDQKTLQIPQPQIVQQQPSPSVELRPVSTTSSNSNNGTGKARMRWTPELHEAFVEAVNSLGGSERATPKGVLKIMKVEGLTIYHVKSHLQKYRTARYRPEPSETGSPERKLTPLEHITSLDLKGGIGITEALRLQMEVQKQLHEQLEIQRNLQLRIEEQGKYLQMMFEKQNSGLTKGTASTSDSAAKSEQEDKKTADSKEVPEEETRKCEELESPQPKRPKIDN

SEQ ID NO: 48086 - DNA, 1457 bp, Arabidopsis thaliana
  misc_feature (1)..(1457): Ceres Seq. ID no. 13649393
  misc_feature: MA Experiment ID: 20000184 Result: Down-regulated in Transcription
  misc_feature: MA Experiment 20000184 PARAMETER Experiment Name: At_Shoots__P Parameter: Age (day) Value: 7
  misc_feature: MA Experiment 20000184 PARAMETER Experiment Name: At_Shoots__P Parameter: Tissue Value: Shoots vs. Whole Plant
  misc_feature: MA Experiment ID: 20000495 Result: Down-regulated in Transcription
  misc_feature: MA Experiment 20000495 PARAMETER Experiment Name: At_Guard_Cells_P Parameter: Harvest Date Value: 8/2/2002
  misc_feature: MA Experiment 20000495 PARAMETER Experiment Name: At_Guard_Cells_P Parameter: Organism Value: A. thaliana
  misc_feature: MA Experiment 20000495 PARAMETER Experiment Name: At_Guard_Cells_P Parameter: Tissue Value: Guard Cells vs. Leaves
  misc_feature: MA Experiment ID: 20000794 Result: Up-regulated in Transcription
  misc_feature: MA Experiment 20000794 PARAMETER Experiment Name: At_Petals_P Parameter: Age (day) Value: 23-25 days
  misc_feature: MA Experiment 20000794 PARAMETER Experiment Name: At_Petals_P Parameter: Plant Line Value: WS
  misc_feature: MA Experiment 20000794 PARAMETER Experiment Name: At_Petals_P Parameter: Tissue Value: Petals vs. Whole plant
ggatcaatttctgtttctttcttttaccgaacagaagtgaatccttcaaggcttcaatggcggcacttagcttttgcagctcttctcctcctcgaattcttcataaacaatccaaatcgagttttttcccttcttctgcctcttcttctttcacacaaaccgtcggagaattatttgcgaaccccttctctgtctcaagacgatttcgtggcgccgttaactccaccgtagtttccgatgaatcgggaaacgcgaaacttccatcttctccggcgaagaagctaaggaatattatgcaatcccctggtgttcttcagggtccatgttgcttcgatgctcttagtgccaaactcatcgaacgagctgggtttccttactgtatcacctctgggttctcgatttcagcgtctcggcttggtttaccggataagggtctaatttcttatggagaaatggttgatcaaggtcaacaaattactcaatctgtatcaattccggtgattggagacggtggcaatggatacggtaatgccatgaatgttaagagaaccgtcaaaggatatattaaagctggctttgcaggaattatcatcaatgatgaagtttgttgtgaaaatactaagagtgagagaagagtggtttctagagaggaagcagtgatgcgtgttaaagctgcggttgatgcacgtagagagtgtgattcggacattgtaattgtagctcaaactgattcccgtgaagcgatatctctggaggaatcactcattagggcaagagcttttacagatgctggagctgatgttctctccgttgattctcttgtttctagagaagagatgaaagcattctgcaatgtctatccactagttcctaaattggctaatatgcttgaaagcggaggaaaaattccaattctaaacccgctggagctagaagagattggatataagctagtggcgtatccaatttcattgattggagtatctattcaagcaatgcaggacgctctattggcaatcaagggtgggcgaattcctccaccaggaagcatggcgtctttagaagaaattggagagattcttggttttgacacttacgaggaagaagagaagcggtacgctacctcgtcatcagatagagaagtgagcagcagtagcgtctatcgtaatcaacgggtggctaaagatgatccagaacagagagaggacctgattgttgaagtcataacacctgaggtttataatgaaccaagaaaccccttttcgcggatctggtcacgatctttgaggatcaaaatcatcggacgcgatgggtttgagaaactcgatgtcagaattccggtaagtccactttcgagggccatttttcgtgttttatctgagctgatgcaaaacttgtcttatggttggaacaggccggattcttggaaggtgtcacaaacattgttccagctttag

SEQ ID NO: 48087 - protein, 484 aa, Arabidopsis thaliana
  peptide (1)..(484): Ceres Seq. ID no. 13649394
  misc_feature (73)..(327): Pfam Name: Isocitrate lyase family Pfam Description: Isocitrate lyase family
  misc_feature (58)..(371): Homolog of NCBI NO: 40739091 NR Description: hypothetical protein AN6882.2 [Aspergillus
  misc_feature (89)..(372): Homolog of NCBI NO: 17229355 NR Description: carboxyphosphonoenolpyruvate phosphonomutase
  misc_feature (75)..(365): Homolog of NCBI NO: 40747280 NR Description: hypothetical protein AN9369.2 [Aspergillus
  misc_feature (89)..(373): Homolog of NCBI NO: 23043034 NR Description: hypothetical protein [Trichodesmium erythraeum
  misc_feature (198)..(484): Homolog of NCBI NO: 25408843 NR Description: probable carboxyphosphonoenolpyruvate mutase
  misc_feature (71)..(388): Homolog of NCBI NO: 38347227 NR Description: OSJNBa0044M19.9 [Oryza sativa (japonica
  misc_feature (61)..(446): Homolog of NCBI NO: 32490267 NR Description: OSJNBb0116K07.9 [Oryza sativa (japonica
  misc_feature (19)..(417): Homolog of NCBI NO: 25408843 NR Description: probable carboxyphosphonoenolpyruvate mutase
  misc_feature (19)..(446): Homolog of NCBI NO: 30689278 NR Description: carboxyphosphonoenolpyruvate mutase -related
  misc_feature (19)..(484): Homolog of NCBI NO: 30689282 NR Description: carboxyphosphonoenolpyruvate mutase -related
INFCFFLLPNRSESFKASMAALSFCSSSPPRILHKQSKSSFFPSSASSSFTQTVGELFANPFSVSRRFRGAVNSTVVSDESGNAKLPSSPAKKLRNIMQSPGVLQGPCCFDALSAKLIERAGFPYCITSGFSISASRLGLPDKGLISYGEMVDQGQQITQSVSIPVIGDGGNGYGNAMNVKRTVKGYIKAGFAGIIINDEVCCENTKSERRVVSREEAVMRVKAAVDARRECDSDIVIVAQTDSREAISLEESLIRARAFTDAGADVLSVDSLVSREEMKAFCNVYPLVPKLANMLESGGKIPILNPLELEEIGYKLVAYPISLIGVSIQAMQDALLAIKGGRIPPPGSMASLEEIGEILGFDTYEEEEKRYATSSSDREVSSSSVYRNQRVAKDDPEQREDLIVEVITPEVYNEPRNPFSRIWSRSLRIKIIGRDGFEKLDVRIPVSPLSRAIFRVLSELMQNLSYGWNRPDSWKVSQTLFQL

SEQ ID NO: 48088 - protein, 466 aa, Arabidopsis thaliana
  peptide (1)..(466): Ceres Seq. ID no. 13649395
  misc_feature (55)..(309): Pfam Name: Isocitrate lyase family Pfam Description: Isocitrate lyase family
  misc_feature (40)..(353): Homolog of NCBI NO: 40739091 NR Description: hypothetical protein AN6882.2 [Aspergillus
  misc_feature (71)..(354): Homolog of NCBI NO: 17229355 NR Description: carboxyphosphonoenolpyruvate phosphonomutase
  misc_feature (57)..(347): Homolog of NCBI NO: 40747280 NR Description: hypothetical protein AN9369.2 [Aspergillus
  misc_feature (71)..(355): Homolog of NCBI NO: 23043034 NR Description: hypothetical protein [Trichodesmium erythraeum
  misc_feature (180)..(466): Homolog of NCBI NO: 25408843 NR Description: probable carboxyphosphonoenolpyruvate mutase
  misc_feature (53)..(370): Homolog of NCBI NO: 38347227 NR Description: OSJNBa0044M19.9 [Oryza sativa (japonica
  misc_feature (43)..(428): Homolog of NCBI NO: 32490267 NR Description: OSJNBb0116K07.9 [Oryza sativa (japonica
  misc_feature (1)..(399): Homolog of NCBI NO: 25408843 NR Description: probable carboxyphosphonoenolpyruvate mutase
  misc_feature (1)..(428): Homolog of NCBI NO: 30689278 NR Description: carboxyphosphonoenolpyruvate mutase -related
  misc_feature (1)..(466): Homolog of NCBI NO: 30689282 NR Description: carboxyphosphonoenolpyruvate mutase -related
MAALSFCSSSPPRILHKQSKSSFFPSSASSSFTQTVGELFANPFSVSRRFRGAVNSTVVSDESGNAKLPSSPAKKLRNIMQSPGVLQGPCCFDALSAKLIERAGFPYCITSGFSISASRLGLPDKGLISYGEMVDQGQQITQSVSIPVIGDGGNGYGNAMNVKRTVKGYIKAGFAGIIINDEVCCENTKSERRVVSREEAVMRVKAAVDARRECDSDIVIVAQTDSREAISLEESLIRARAFTDAGADVLSVDSLVSREEMKAFCNVYPLVPKLANMLESGGKIPILNPLELEEIGYKLVAYPISLIGVSIQAMQDALLAIKGGRIPPPGSMASLEEIGEILGFDTYEEEEKRYATSSSDREVSSSSVYRNQRVAKDDPEQREDLIVEVITPEVYNEPRNPFSRIWSRSLRIKIIGRDGFEKLDVRIPVSPLSRAIFRVLSELMQNLSYGWNRPDSWKVSQTLFQL

SEQ ID NO: 48089 - protein, 387 aa, Arabidopsis thaliana
  peptide (1)..(387): Ceres Seq. ID no. 13649396
  misc_feature (1)..(230): Pfam Name: Isocitrate lyase family Pfam Description: Isocitrate lyase family
  misc_feature (1)..(274): Homolog of NCBI NO: 40739091 NR Description: hypothetical protein AN6882.2 [Aspergillus
  misc_feature (1)..(275): Homolog of NCBI NO: 17229355 NR Description: carboxyphosphonoenolpyruvate phosphonomutase
  misc_feature (1)..(268): Homolog of NCBI NO: 40747280 NR Description: hypothetical protein AN9369.2 [Aspergillus
  misc_feature (1)..(276): Homolog of NCBI NO: 23043034 NR Description: hypothetical protein [Trichodesmium erythraeum
  misc_feature (101)..(387): Homolog of NCBI NO: 25408843 NR Description: probable carboxyphosphonoenolpyruvate mutase
  misc_feature (1)..(291): Homolog of NCBI NO: 38347227 NR Description: OSJNBa0044M19.9 [Oryza sativa (japonica
  misc_feature (1)..(349): Homolog of NCBI NO: 32490267 NR Description: OSJNBb0116K07.9 [Oryza sativa (japonica
  misc_feature (1)..(320): Homolog of NCBI NO: 25408843 NR Description: probable carboxyphosphonoenolpyruvate mutase
  misc_feature (1)..(349): Homolog of NCBI NO: 30689278 NR Description: carboxyphosphonoenolpyruvate mutase -related
  misc_feature (1)..(387): Homolog of NCBI NO: 30689282 NR Description: carboxyphosphonoenolpyruvate mutase -related
MQSPGVLQGPCCFDALSAKLIERAGFPYCITSGFSISASRLGLPDKGLISYGEMVDQGQQITQSVSIPVIGDGGNGYGNAMNVKRTVKGYIKAGFAGIIINDEVCCENTKSERRVVSREEAVMRVKAAVDARRECDSDIVIVAQTDSREAISLEESLIRARAFTDAGADVLSVDSLVSREEMKAFCNVYPLVPKLANMLESGGKIPILNPLELEEIGYKLVAYPISLIGVSIQAMQDALLAIKGGRIPPPGSMASLEEIGEILGFDTYEEEEKRYATSSSDREVSSSSVYRNQRVAKDDPEQREDLIVEVITPEVYNEPRNPFSRIWSRSLRIKIIGRDGFEKLDVRIPVSPLSRAIFRVLSELMQNLSYGWNRPDSWKVSQTLFQL

SEQ ID NO: 48090 - DNA, 1179 bp, Arabidopsis thaliana
  misc_feature (1)..(1179): Ceres Seq. ID no. 13649654
  misc_feature: MA Experiment ID: 20000441 Result: Down-regulated in Transcription
  misc_feature: MA Experiment 20000441 PARAMETER Experiment Name: At_1uM_BR-BRZ__P Parameter: Tissue Value: Shoot Apices
  misc_feature: MA Experiment 20000441 PARAMETER Experiment Name: At_1uM_BR-BRZ__P Parameter: Treatment Value: 1uM BR vs. No Treatment
  misc_feature: MA Experiment ID: 20000444 Result: Up-regulated in Transcription
  misc_feature: MA Experiment 20000444 PARAMETER Experiment Name: At_100uM_NAA__P Parameter: Age (day) Value: 14
  misc_feature: MA Experiment 20000444 PARAMETER Experiment Name: At_100uM_NAA__P Parameter: Organism Value: A. thaliana
  misc_feature: MA Experiment 20000444 PARAMETER Experiment Name: At_100uM_NAA__P Parameter: Plant Line Value: WS
  misc_feature: MA Experiment 20000444 PARAMETER Experiment Name: At_100uM_NAA__P Parameter: Timepoint (hr) Value: 1
  misc_feature: MA Experiment 20000444 PARAMETER Experiment Name: At_100uM_NAA__P Parameter: Tissue Value: Aerial
  misc_feature: MA Experiment 20000444 PARAMETER Experiment Name: At_100uM_NAA__P Parameter: Treatment Value: 100uM NAA vs. No Treatment
  misc_feature: MA Experiment ID: 20001247 Result: Up-regulated in Transcription
  misc_feature: MA Experiment 20001247 PARAMETER Experiment Name: At_Far-red-induction_P Parameter: Age (day) Value: 7
  misc_feature: MA Experiment 20001247 PARAMETER Experiment Name: At_Far-red-induction_P Parameter: Light Value: Far-red vs. White
  misc_feature: MA Experiment 20001247 PARAMETER Experiment Name: At_Far-red-induction_P Parameter: Organism Value: A. thaliana
  misc_feature: MA Experiment 20001247 PARAMETER Experiment Name: At_Far-red-induction_P Parameter: Plant Line Value: Columbia
  misc_feature: MA Experiment 20001247 PARAMETER Experiment Name: At_Far-red-induction_P Parameter: Timepoint (hr) Value: 1
  misc_feature: MA Experiment 20001247 PARAMETER Experiment Name: At_Far-red-induction_P Parameter: Tissue Value: Whole Plant
gatctcctcgcaatactactactcactttactataatctctcaaaatggccgtaagtttcgtaacaacatctcctgaggaagaagacaaaccgaagctaggccttggaaatattcaaactccgttaatcttcaacccttcaatgcttaaccttcaagccaatatcccaaaccaattcatctggcctgacgacgaaaaaccttccatcaacgttctcgagcttgatgttcctctcatcgaccttcaaaaccttctctctgatccatcctccactttagatgcttcgagactgatctctgaggcctgtaagaagcacggtttcttcctcgtggtcaatcacggcatcagcgaggagcttatttcagacgctcatgaatacacgagccgcttctttgatatgcctctctccgaaaaacagagggttcttagaaaatccggtgagagtgttggctacgcaagcagtttcaccggacgcttctccaccaagcttccatggaaggagaccctttctttccggttttgcgacgacatgagccgctcaaaatccgttcaagattacttctgcgatgcgttgggacatgggtttcagccatttgggaaggtgtatcaagagtattgtgaagcaatgagttctctatcactgaagatcatggagcttctggggctaagtttaggcgtaaaacgggactactttagagagtttttcgaagaaaacgattcaataatgagactgaattactaccctccatgtataaaaccagatctcacactaggaacaggacctcattgtgatccaacatctcttaccatccttcaccaagaccatgttaatggccttcaagtctttgtggaaaatcaatggcgctccattcgtcccaaccccaaggcctttgtggtcaatatcggcgatactttcatggctctatcgaacgatagatacaagagctgcttgcaccgggcggtggtgaacagcgagagcgagaggaaatcacttgcattcttcttgtgtccgaaaaaagacagagtagtgacgccaccgagagagcttttggacagcatcacatcaagaagataccctgacttcacatggtctatgttccttgagttcactcagaaacattatagagcagacatgaacactctccaagccttttcagattggctcaccaaacccatctaa

SEQ ID NO: 48091 - protein, 377 aa, Arabidopsis thaliana
  peptide (1)..(377): Ceres Seq. ID no. 13649655
  misc_feature (223)..(322): Pfam Name: 2OG-Fe(II) oxygenase superfamily Pfam Description: 2OG-Fe(II) oxygenase superfamily
  misc_feature (1)..(373): Homolog of NCBI NO: 7433211 NR Description: gibberellin 20-oxidase (EC 1.14.11.-) - garden
  misc_feature (1)..(373): Homolog of NCBI NO: 8919865 NR Description: gibberellin 20-oxidase [Citrus sinensis x
  misc_feature (24)..(373): Homolog of NCBI NO: 7433209 NR Description: gibberellin 20-oxidase (EC 1.14.11.-) - kidney
  misc_feature (1)..(271): Homolog of NCBI NO: 9791188 NR Description: gibberellin 20-oxidase [Arabidopsis thaliana]
  misc_feature (1)..(373): Homolog of NCBI NO: 15242189 NR Description: gibberellin 20-oxidase, putative [Arabidopsis
  misc_feature (1)..(377): Homolog of NCBI NO: 9791187 NR Description: gibberellin 20-oxidase [Arabidopsis thaliana]
  misc_feature (1)..(377): Homolog of NCBI NO: 1581592 NR Description: gibberellin 20-oxidase
  misc_feature (1)..(377): Homolog of NCBI NO: 9791186 NR Description: gibberellin 20-oxidase [Arabidopsis thaliana]
  misc_feature (1)..(377): Homolog of NCBI NO: 1109695 NR Description: gibberellin 20-oxidase [Arabidopsis thaliana]
  misc_feature (1)..(377): Homolog of NCBI NO: 15235072 NR Description: gibberellin 20-oxidase [Arabidopsis thaliana]
MAVSFVTTSPEEEDKPKLGLGNIQTPLIFNPSMLNLQANIPNQFIWPDDEKPSINVLELDVPLIDLQNLLSDPSSTLDASRLISEACKKHGFFLVVNHGISEELISDAHEYTSRFFDMPLSEKQRVLRKSGESVGYASSFTGRFSTKLPWKETLSFRFCDDMSRSKSVQDYFCDALGHGFQPFGKVYQEYCEAMSSLSLKIMELLGLSLGVKRDYFREFFEENDSIMRLNYYPPCIKPDLTLGTGPHCDPTSLTILHQDHVNGLQVFVENQWRSIRPNPKAFVVNIGDTFMALSNDRYKSCLHRAVVNSESERKSLAFFLCPKKDRVVTPPRELLDSITSRRYPDFTWSMFLEFTQKHYRADMNTLQAFSDWLTKPI

SEQ ID NO: 48092 - protein, 345 aa, Arabidopsis thaliana
  peptide (1)..(345): Ceres Seq. ID no. 13649656
  misc_feature (191)..(290): Pfam Name: 2OG-Fe(II) oxygenase superfamily Pfam Description: 2OG-Fe(II) oxygenase superfamily
  misc_feature (1)..(341): Homolog of NCBI NO: 7433211 NR Description: gibberellin 20-oxidase (EC 1.14.11.-) - garden
  misc_feature (1)..(341): Homolog of NCBI NO: 8919865 NR Description: gibberellin 20-oxidase [Citrus sinensis x
  misc_feature (1)..(341): Homolog of NCBI NO: 7433209 NR Description: gibberellin 20-oxidase (EC 1.14.11.-) - kidney
  misc_feature (1)..(239): Homolog of NCBI NO: 9791188 NR Description: gibberellin 20-oxidase [Arabidopsis thaliana]
  misc_feature (1)..(341): Homolog of NCBI NO: 15242189 NR Description: gibberellin 20-oxidase, putative [Arabidopsis
  misc_feature (1)..(345): Homolog of NCBI NO: 9791187 NR Description: gibberellin 20-oxidase [Arabidopsis thaliana]
  misc_feature (1)..(345): Homolog of NCBI NO: 1581592 NR Description: gibberellin 20-oxidase
  misc_feature (1)..(345): Homolog of NCBI NO: 9791186 NR Description: gibberellin 20-oxidase [Arabidopsis thaliana]
  misc_feature (1)..(345): Homolog of NCBI NO: 1109695 NR Description: gibberellin 20-oxidase [Arabidopsis thaliana]
  misc_feature (1)..(345): Homolog of NCBI NO: 15235072 NR Description: gibberellin 20-oxidase [Arabidopsis thaliana]
MLNLQANIPNQFIWPDDEKPSINVLELDVPLIDLQNLLSDPSSTLDASRLISEACKKHGFFLVVNHGISEELISDAHEYTSRFFDMPLSEKQRVLRKSGESVGYASSFTGRFSTKLPWKETLSFRFCDDMSRSKSVQDYFCDALGHGFQPFGKVYQEYCEAMSSLSLKIMELLGLSLGVKRDYFREFFEENDSIMRLNYYPPCIKPDLTLGTGPHCDPTSLTILHQDHVNGLQVFVENQWRSIRPNPKAFVVNIGDTFMALSNDRYKSCLHRAVVNSESERKSLAFFLCPKKDRVVTPPRELLDSITSRRYPDFTWSMFLEFTQKHYRADMNTLQAFSDWLTKPI

SEQ ID NO: 48093 - protein, 260 aa, Arabidopsis thaliana
  peptide (1)..(260): Ceres Seq. ID no. 13649657
  misc_feature (106)..(205): Pfam Name: 2OG-Fe(II) oxygenase superfamily Pfam Description: 2OG-Fe(II) oxygenase superfamily
  misc_feature (1)..(256): Homolog of NCBI NO: 7433211 NR Description: gibberellin 20-oxidase (EC 1.14.11.-) - garden
  misc_feature (1)..(256): Homolog of NCBI NO: 8919865 NR Description: gibberellin 20-oxidase [Citrus sinensis x
  misc_feature (1)..(256): Homolog of NCBI NO: 7433209 NR Description: gibberellin 20-oxidase (EC 1.14.11.-) - kidney
  misc_feature (1)..(154): Homolog of NCBI NO: 9791188 NR Description: gibberellin 20-oxidase [Arabidopsis thaliana]
  misc_feature (1)..(256): Homolog of NCBI NO: 15242189 NR Description: gibberellin 20-oxidase, putative [Arabidopsis
  misc_feature (1)..(260): Homolog of NCBI NO: 9791187 NR Description: gibberellin 20-oxidase [Arabidopsis thaliana]
  misc_feature (1)..(260): Homolog of NCBI NO: 1581592 NR Description: gibberellin 20-oxidase
  misc_feature (1)..(260): Homolog of NCBI NO: 9791186 NR Description: gibberellin 20-oxidase [Arabidopsis thaliana]
  misc_feature (1)..(260): Homolog of NCBI NO: 1109695 NR Description: gibberellin 20-oxidase [Arabidopsis thaliana]
  misc_feature (1)..(260): Homolog of NCBI NO: 15235072 NR Description: gibberellin 20-oxidase [Arabidopsis thaliana]
MPLSEKQRVLRKSGESVGYASSFTGRFSTKLPWKETLSFRFCDDMSRSKSVQDYFCDALGHGFQPFGKVYQEYCEAMSSLSLKIMELLGLSLGVKRDYFREFFEENDSIMRLNYYPPCIKPDLTLGTGPHCDPTSLTILHQDHVNGLQVFVENQWRSIRPNPKAFVVNIGDTFMALSNDRYKSCLHRAVVNSESERKSLAFFLCPKKDRVVTPPRELLDSITSRRYPDFTWSMFLEFTQKHYRADMNTLQAFSDWLTKPI

SEQ ID NO: 48094 - DNA, 1596 bp, Arabidopsis thaliana
  misc_feature (1)..(1596): Ceres Seq. ID no. 12575533
  misc_feature: MA Experiment ID: 20000182 Result: Down-regulated in Transcription
  misc_feature: MA Experiment 20000182 PARAMETER Experiment Name: At_2mM_SA_P Parameter: Age (day) Value: 14
  misc_feature: MA Experiment 20000182 PARAMETER Experiment Name: At_2mM_SA_P Parameter: Organism Value: A. thaliana
  misc_feature: MA Experiment 20000182 PARAMETER Experiment Name: At_2mM_SA_P Parameter: Plant Line Value: WS
  misc_feature: MA Experiment 20000182 PARAMETER Experiment Name: At_2mM_SA_P Parameter: Timepoint (hr) Value: 6
  misc_feature: MA Experiment 20000182 PARAMETER Experiment Name: At_2mM_SA_P Parameter: Tissue Value: Aerial
  misc_feature: MA Experiment 20000182 PARAMETER Experiment Name: At_2mM_SA_P Parameter: Treatment Value: 2mM SA vs. No Treatment
  misc_feature: MA Experiment ID: 20000185 Result: Down-regulated in Transcription
  misc_feature: MA Experiment 20000185 PARAMETER Experiment Name: At_Roots__P Parameter: Age (day) Value: 7 vs. 21
  misc_feature: MA Experiment 20000185 PARAMETER Experiment Name: At_Roots__P Parameter: Organism Value: A. thaliana
  misc_feature: MA Experiment 20000185 PARAMETER Experiment Name: At_Roots__P Parameter: Tissue Value: Roots vs. Whole Plant
  misc_feature: MA Experiment ID: 20000437 Result: Down-regulated in Transcription
  misc_feature: MA Experiment 20000437 PARAMETER Experiment Name: At_Drought_P Parameter: Age (day) Value: 8
  misc_feature: MA Experiment 20000437 PARAMETER Experiment Name: At_Drought_P Parameter: Organism Value: A. thaliana
  misc_feature: MA Experiment 20000437 PARAMETER Experiment Name: At_Drought_P Parameter: Plant Line Value: WS
  misc_feature: MA Experiment 20000437 PARAMETER Experiment Name: At_Drought_P Parameter: Timepoint (hr) Value: 24
  misc_feature: MA Experiment 20000437 PARAMETER Experiment Name: At_Drought_P Parameter: Tissue Value: Whole Plant
  misc_feature: MA Experiment 20000437 PARAMETER Experiment Name: At_Drought_P Parameter: Treatment Value: Drought vs. No Drought
  misc_feature: MA Experiment ID: 20000438 Result: Up-regulated in Transcription
  misc_feature: MA Experiment 20000438 PARAMETER Experiment Name: At_Shoots__P Parameter: Age (day) Value: 14
  misc_feature: MA Experiment 20000438 PARAMETER Experiment Name: At_Shoots__P Parameter: Tissue Value: Shoots vs. Whole Plant
  misc_feature: MA Experiment ID: 20000445 Result: Down-regulated in Transcription
  misc_feature: MA Experiment 20000445 PARAMETER Experiment Name: At_100uM_NAA__P Parameter: Age (day) Value: 14
  misc_feature: MA Experiment 20000445 PARAMETER Experiment Name: At_100uM_NAA__P Parameter: Organism Value: A. thaliana
  misc_feature: MA Experiment 20000445 PARAMETER Experiment Name: At_100uM_NAA__P Parameter: Plant Line Value: WS
  misc_feature: MA Experiment 20000445 PARAMETER Experiment Name: At_100uM_NAA__P Parameter: Timepoint (hr) Value: 6
  misc_feature: MA Experiment 20000445 PARAMETER Experiment Name: At_100uM_NAA__P Parameter: Tissue Value: Aerial
  misc_feature: MA Experiment 20000445 PARAMETER Experiment Name: At_100uM_NAA__P Parameter: Treatment Value: 100uM NAA vs. No Treatment
  misc_feature: MA Experiment ID: 20000451 Result: Up-regulated in Transcription
  misc_feature: MA Experiment 20000451 PARAMETER Experiment Name: At_CS6879_Shoots-Roots_P Parameter: Age (day) Value: 14
  misc_feature: MA Experiment 20000451 PARAMETER Experiment Name: At_CS6879_Shoots-Roots_P Parameter: Organism Value: A. thaliana
  misc_feature: MA Experiment 20000451 PARAMETER Experiment Name: At_CS6879_Shoots-Roots_P Parameter: Plant Line Value: CS6879 vs. WS
  misc_feature: MA Experiment 20000451 PARAMETER Experiment Name: At_CS6879_Shoots-Roots_P Parameter: Tissue Value: Roots
  misc_feature: MA Experiment ID: 20001247 Result: Down-regulated in Transcription
  misc_feature: MA Experiment 20001247 PARAMETER Experiment Name: At_Far-red-induction_P Parameter: Age (day) Value: 7
  misc_feature: MA Experiment 20001247 PARAMETER Experiment Name: At_Far-red-induction_P Parameter: Light Value: Far-red vs. White
  misc_feature: MA Experiment 20001247 PARAMETER Experiment Name: At_Far-red-induction_P Parameter: Organism Value: A. thaliana
  misc_feature: MA Experiment 20001247 PARAMETER Experiment Name: At_Far-red-induction_P Parameter: Plant Line Value: Columbia
  misc_feature: MA Experiment 20001247 PARAMETER Experiment Name: At_Far-red-induction_P Parameter: Timepoint (hr) Value: 1
  misc_feature: MA Experiment 20001247 PARAMETER Experiment Name: At_Far-red-induction_P Parameter: Tissue Value: Whole Plant
  misc_feature: MA Experiment ID: 20001248 Result: Down-regulated in Transcription
  misc_feature: MA Experiment 20001248 PARAMETER Experiment Name: At_Far-red-induction_P Parameter: Age (day) Value: 7
  misc_feature: MA Experiment 20001248 PARAMETER Experiment Name: At_Far-red-induction_P Parameter: Light Value: Far-red vs. White
  misc_feature: MA Experiment 20001248 PARAMETER Experiment Name: At_Far-red-induction_P Parameter: Organism Value: A. thaliana
  misc_feature: MA Experiment 20001248 PARAMETER Experiment Name: At_Far-red-induction_P Parameter: Plant Line Value: Columbia
  misc_feature: MA Experiment 20001248 PARAMETER Experiment Name: At_Far-red-induction_P Parameter: Timepoint (hr) Value: 4
  misc_feature: MA Experiment 20001248 PARAMETER Experiment Name: At_Far-red-induction_P Parameter: Tissue Value: Whole Plant
  misc_feature: MA Experiment ID: 20001450 Result: Down-regulated in Transcription
  misc_feature: MA Experiment 20001450 PARAMETER Experiment Name: At_Far-red-induction_P Parameter: Age (day) Value: 7
  misc_feature: MA Experiment 20001450 PARAMETER Experiment Name: At_Far-red-induction_P Parameter: Light Value: Far-red vs. White
  misc_feature: MA Experiment 20001450 PARAMETER Experiment Name: At_Far-red-induction_P Parameter: Organism Value: A. thaliana
  misc_feature: MA Experiment 20001450 PARAMETER Experiment Name: At_Far-red-induction_P Parameter: Plant Line Value: Columbia
  misc_feature: MA Experiment 20001450 PARAMETER Experiment Name: At_Far-red-induction_P Parameter: Timepoint (hr) Value: 8
  misc_feature: MA Experiment 20001450 PARAMETER Experiment Name: At_Far-red-induction_P Parameter: Tissue Value: Whole Plant
  misc_feature: MA Experiment ID: 20001560 Result: Up-regulated in Transcription
  misc_feature: MA Experiment 20001560 PARAMETER Experiment Name: At_Drought_Soil_Dry_P Parameter: Age (day) Value: 28
  misc_feature: MA Experiment 20001560 PARAMETER Experiment Name: At_Drought_Soil_Dry_P Parameter: Organism Value: A. thaliana
  misc_feature: MA Experiment 20001560 PARAMETER Experiment Name: At_Drought_Soil_Dry_P Parameter: Plant Line Value: WS
  misc_feature: MA Experiment 20001560 PARAMETER Experiment Name: At_Drought_Soil_Dry_P Parameter: Post Timepoint (hr) Value: None
  misc_feature: MA Experiment 20001560 PARAMETER Experiment Name: At_Drought_Soil_Dry_P Parameter: Post-Treatment Value: None
  misc_feature: MA Experiment 20001560 PARAMETER Experiment Name: At_Drought_Soil_Dry_P Parameter: Timepoint (day) Value: 14
  misc_feature: MA Experiment 20001560 PARAMETER Experiment Name: At_Drought_Soil_Dry_P Parameter: Treatment Value: Drought vs. No Drought
  misc_feature: MA Experiment ID: 20001756 Result: Up-regulated in Transcription
  misc_feature: MA Experiment 20001756 PARAMETER Experiment Name: At_50mM_NH4NO3_L-to-H_P Parameter: Timepoint (hr) Value: 4
  misc_feature: MA Experiment 20001756 PARAMETER Experiment Name: At_50mM_NH4NO3_L-to-H_P Parameter: Tissue Value: Leaf
  misc_feature: MA Experiment 20001756 PARAMETER Experiment Name: At_50mM_NH4NO3_L-to-H_P Parameter: Treatment Value: 50mM NH4NO3 vs 100mM Mannitol
  misc_feature: MA Experiment ID: 20001905 Result: Down-regulated in Transcription
  misc_feature: MA Experiment 20001905 PARAMETER Experiment Name: At_Drought_Reproduction_P Parameter: Age (day) Value: 40
  misc_feature: MA Experiment 20001905 PARAMETER Experiment Name: At_Drought_Reproduction_P Parameter: Organism Value: A. thaliana
  misc_feature: MA Experiment 20001905 PARAMETER Experiment Name: At_Drought_Reproduction_P Parameter: Plant Line Value: WS
  misc_feature: MA Experiment 20001905 PARAMETER Experiment Name: At_Drought_Reproduction_P Parameter: Timepoint (day) Value: 10
  misc_feature: MA Experiment 20001905 PARAMETER Experiment Name: At_Drought_Reproduction_P Parameter: Tissue Value: Rosettes
  misc_feature: MA Experiment 20001905 PARAMETER Experiment Name: At_Drought_Reproduction_P Parameter: Treatment Value: Drought vs. No Drought
aggagacacaatatcaacaacttattgttcctttggttcgaacaattttaccaaaaaaatgagtgaagcaaagaagggtcacgtactgttttttccatatccattacaaggccacattaacccaatgatccaactcgctaaacgcttatccaaaaagggcatcaccagcacactcatcatcgcctccaaagaccaccgtgaaccttacacctccgacgactactccatcaccgtccacaccatccacgacggtttctttccacatgaacaccctcacgccaagttcgtagatcttgaccgtttccacaactctacttctcgaagcctgaccgatttcatctctagtgcgaagttgtcggacaatcctccaaaagctctgatctatgatccatttatgccctttgcattggacatagccaaggacttggatctatacgtagtggcatatttcactcaaccatggttggctagtcttgtttactaccatatcaacgaaggcacctacgatgttcccgttgatagacacgagaacccaacacttgcatcgtttcctggtttcccattgttaagccaagatgatctgccttcgttcgcctgcgaaaaagggtcgtaccctcttctacacgagtttgtggttaggcaattctctaatttattgcaagctgattgcattctctgcaacacttttgatcaacttgaaccaaaggtagtgaaatggatgaatgatcaatggccggtgaagaacattggaccggtggttccatcgaagttcttggataaccggttgccagaagacaaagattacgaactcgagaactccaagacagagccagacgagtctgttttgaagtggttgggaaacaggccggcgaagtcggtggtttacgtggcgtttgggacattggtggctttgagcgaaaaacagatgaaggaaattgcaatggcgattagccaaaccggatatcacttcttgtggtctgttagagaatccgagagaagcaaactaccctctggttttatcgaagaggcagaggagaaagactctggacttgtggctaagtgggttcctcagctagaggttttagcacatgaatcaatcgggtgtttcgtgtcacactgtggatggaactcgacattggaggcactatgcttaggggttccaatggtgggcgtgcctcagtggactgatcagcccacaaatgctaagtttatagaggatgtgtggaagattggggttagagtgaggaccgatggagaagggctttcgagtaaagaagagattgcgagatgcattgttgaggtcatggaaggagagagagggaaagagataaggaagaatgttgagaagcttaaggtgttggctcgcgaagctatctctgaaggaggtagttccgacaagaagattgatgagtttgttgctcttttgacttaacaatttgaaactgagatgtcatcagtttgttagttgattacctaataacggcttctttgtcatctaaatttgaattatcctgttggttccattggttgtcccctgcgaacaaatccatatatgaactctgtattaaaaaacggagatgtttgaatttgaagcat

SEQ ID NO: 48095 - protein, 476 aa, Arabidopsis thaliana
  peptide (1)..(476): Ceres Seq. ID no. 12575534
  misc_feature (26)..(476): Pfam Name: UDP-glucoronosyl and UDP-glucosyl transferase Pfam Description: UDP-glucoronosyl and UDP-glucosyl transferase
  misc_feature (25)..(475): Homolog of NCBI NO: 15221668 NR Description: UDP-glycosyltransferase family
  misc_feature (25)..(475): Homolog of NCBI NO: 15824451 NR Description: thiohydroximate S-glucosyltransferase [Brassica
  misc_feature (22)..(473): Homolog of NCBI NO: 15224372 NR Description: putative glucosyltransferase; protein id:
  misc_feature (22)..(473): Homolog of NCBI NO: 15224368 NR Description: putative glucosyltransferase
  misc_feature (24)..(475): Homolog of NCBI NO: 7385017 NR Description: UDP-glucose:salicylic acid glucosyltransferase
  misc_feature (20)..(473): Homolog of NCBI NO: 15225134 NR Description: putative glucosyltransferase
  misc_feature (20)..(473): Homolog of NCBI NO: 21536917 NR Description: putative glucosyltransferase [Arabidopsis
  misc_feature (27)..(459): Homolog of NCBI NO: 15221232 NR Description: putative indole-3-acetate beta-glucosyltransferase
  misc_feature (27)..(474): Homolog of NCBI NO: 15221233 NR Description: putative indole-3-acetate beta-glucosyltransferase
  misc_feature (20)..(476): Homolog of NCBI NO: 15225138 NR Description: UDP-glycosyltransferase family
GDTISTTYCSFGSNNFTKKMSEAKKGHVLFFPYPLQGHINPMIQLAKRLSKKGITSTLIIASKDHREPYTSDDYSITVHTIHDGFFPHEHPHAKFVDLDRFHNSTSRSLTDFISSAKLSDNPPKALIYDPFMPFALDIAKDLDLYVVAYFTQPWLASLVYYHINEGTYDVPVDRHENPTLASFPGFPLLSQDDLPSFACEKGSYPLLHEFVVRQFSNLLQADCILCNTFDQLEPKVVKWMNDQWPVKNIGPVVPSKFLDNRLPEDKDYELENSKTEPDESVLKWLGNRPAKSVVYVAFGTLVALSEKQMKEIAMAISQTGYHFLWSVRESERSKLPSGFIEEAEEKDSGLVAKWVPQLEVLAHESIGCFVSHCGWNSTLEALCLGVPMVGVPQWTDQPTNAKFIEDVWKIGVRVRTDGEGLSSKEEIARCIVEVMEGERGKEIRKNVEKLKVLAREAISEGGSSDKKIDEFVALLT

SEQ ID NO: 48096 - protein, 457 aa, Arabidopsis thaliana
  peptide (1)..(457): Ceres Seq. ID no. 12575535
  misc_feature (7)..(457): Pfam Name: UDP-glucoronosyl and UDP-glucosyl transferase Pfam Description: UDP-glucoronosyl and UDP-glucosyl transferase
  misc_feature (6)..(456): Homolog of NCBI NO: 15221668 NR Description: UDP-glycosyltransferase family
  misc_feature (6)..(456): Homolog of NCBI NO: 15824451 NR Description: thiohydroximate S-glucosyltransferase [Brassica
  misc_feature (3)..(454): Homolog of NCBI NO: 15224372 NR Description: putative glucosyltransferase; protein id:
  misc_feature (3)..(454): Homolog of NCBI NO: 15224368 NR Description: putative glucosyltransferase
  misc_feature (5)..(456): Homolog of NCBI NO: 7385017 NR Description: UDP-glucose:salicylic acid glucosyltransferase
  misc_feature (1)..(454): Homolog of NCBI NO: 15225134 NR Description: putative glucosyltransferase
  misc_feature (1)..(454): Homolog of NCBI NO: 21536917 NR Description: putative glucosyltransferase [Arabidopsis
  misc_feature (8)..(440): Homolog of NCBI NO: 15221232 NR Description: putative indole-3-acetate beta-glucosyltransferase
  misc_feature (8)..(455): Homolog of NCBI NO: 15221233 NR Description: putative indole-3-acetate beta-glucosyltransferase
  misc_feature (1)..(457): Homolog of NCBI NO: 15225138 NR Description: UDP-glycosyltransferase family
MSEAKKGHVLFFPYPLQGHINPMIQLAKRLSKKGITSTLIIASKDHREPYTSDDYSITVHTIHDGFFPHEHPHAKFVDLDRFHNSTSRSLTDFISSAKLSDNPPKALIYDPFMPFALDIAKDLDLYVVAYFTQPWLASLVYYHINEGTYDVPVDRHENPTLASFPGFPLLSQDDLPSFACEKGSYPLLHEFVVRQFSNLLQADCILCNTFDQLEPKVVKWMNDQWPVKNIGPVVPSKFLDNRLPEDKDYELENSKTEPDESVLKWLGNRPAKSVVYVAFGTLVALSEKQMKEIAMAISQTGYHFLWSVRESERSKLPSGFIEEAEEKDSGLVAKWVPQLEVLAHESIGCFVSHCGWNSTLEALCLGVPMVGVPQWTDQPTNAKFIEDVWKIGVRVRTDGEGLSSKEEIARCIVEVMEGERGKEIRKNVEKLKVLAREAISEGGSSDKKIDEFVALLT

SEQ ID NO: 48097 - protein, 435 aa, Arabidopsis thaliana
  peptide (1)..(435): Ceres Seq. ID no. 12575536
  misc_feature (1)..(435): Pfam Name: UDP-glucoronosyl and UDP-glucosyl transferase Pfam Description: UDP-glucoronosyl and UDP-glucosyl transferase
  misc_feature (1)..(434): Homolog of NCBI NO: 15221668 NR Description: UDP-glycosyltransferase family
  misc_feature (1)..(434): Homolog of NCBI NO: 15824451 NR Description: thiohydroximate S-glucosyltransferase [Brassica
  misc_feature (1)..(432): Homolog of NCBI NO: 15224372 NR Description: putative glucosyltransferase; protein id:
  misc_feature (1)..(432): Homolog of NCBI NO: 15224368 NR Description: putative glucosyltransferase
  misc_feature (1)..(434): Homolog of NCBI NO: 7385017 NR Description: UDP-glucose:salicylic acid glucosyltransferase
  misc_feature (1)..(432): Homolog of NCBI NO: 15225134 NR Description: putative glucosyltransferase
  misc_feature (1)..(432): Homolog of NCBI NO: 21536917 NR Description: putative glucosyltransferase [Arabidopsis
  misc_feature (1)..(418): Homolog of NCBI NO: 15221232 NR Description: putative indole-3-acetate beta-glucosyltransferase
  misc_feature (1)..(433): Homolog of NCBI NO: 15221233 NR Description: putative indole-3-acetate beta-glucosyltransferase
  misc_feature (1)..(435): Homolog of NCBI NO: 15225138 NR Description: UDP-glycosyltransferase family
MIQLAKRLSKKGITSTLIIASKDHREPYTSDDYSITVHTIHDGFFPHEHPHAKFVDLDRFHNSTSRSLTDFISSAKLSDNPPKALIYDPFMPFALDIAKDLDLYVVAYFTQPWLASLVYYHINEGTYDVPVDRHENPTLASFPGFPLLSQDDLPSFACEKGSYPLLHEFVVRQFSNLLQADCILCNTFDQLEPKVVKWMNDQWPVKNIGPVVPSKFLDNRLPEDKDYELENSKTEPDESVLKWLGNRPAKSVVYVAFGTLVALSEKQMKEIAMAISQTGYHFLWSVRESERSKLPSGFIEEAEEKDSGLVAKWVPQLEVLAHESIGCFVSHCGWNSTLEALCLGVPMVGVPQWTDQPTNAKFIEDVWKIGVRVRTDGEGLSSKEEIARCIVEVMEGERGKEIRKNVEKLKVLAREAISEGGSSDKKIDEFVALLT

SEQ ID NO: 48098 - DNA, 2537 bp, Arabidopsis thaliana
  misc_feature (1)..(2537): Ceres Seq. ID no. 13649091
  misc_feature: MA Experiment ID: 20000173 Result: Up-regulated in Transcription
  misc_feature: MA Experiment 20000173 PARAMETER Experiment Name: At_42deg_Heat_P Parameter: Age (day) Value: 14
  misc_feature: MA Experiment 20000173 PARAMETER Experiment Name: At_42deg_Heat_P Parameter: Organism Value: A. thaliana
  misc_feature: MA Experiment 20000173 PARAMETER Experiment Name: At_42deg_Heat_P Parameter: Plant Line Value: WS
  misc_feature: MA Experiment 20000173 PARAMETER Experiment Name: At_42deg_Heat_P Parameter: Temperature (deg C) Value: 42 vs. 22
  misc_feature: MA Experiment 20000173 PARAMETER Experiment Name: At_42deg_Heat_P Parameter: Timepoint (hr) Value: 6
  misc_feature: MA Experiment 20000173 PARAMETER Experiment Name: At_42deg_Heat_P Parameter: Tissue Value: Aerial
  misc_feature: MA Experiment ID: 20000185 Result: Down-regulated in Transcription
  misc_feature: MA Experiment 20000185 PARAMETER Experiment Name: At_Roots__P Parameter: Age (day) Value: 7 vs. 21
  misc_feature: MA Experiment 20000185 PARAMETER Experiment Name: At_Roots__P Parameter: Organism Value: A. thaliana
  misc_feature: MA Experiment 20000185 PARAMETER Experiment Name: At_Roots__P Parameter: Tissue Value: Roots vs. Whole Plant
  misc_feature: MA Experiment ID: 20000227 Result: Down-regulated in Transcription
  misc_feature: MA Experiment 20000227 PARAMETER Experiment Name: At_Root-Tips-vs-Tops_P Parameter: Tissue Value: Root Tips vs. Root Tops
  misc_feature: MA Experiment ID: 20000439 Result: Down-regulated in Transcription
  misc_feature: MA Experiment 20000439 PARAMETER Experiment Name: At_Roots__P Parameter: Age (day) Value: 14 vs. 21
  misc_feature: MA Experiment 20000439 PARAMETER Experiment Name: At_Roots__P Parameter: Organism Value: A. thaliana
  misc_feature: MA Experiment 20000439 PARAMETER Experiment Name: At_Roots__P Parameter: Tissue Value: Roots vs. Whole Plant
  misc_feature: MA Experiment ID: 20000495 Result: Down-regulated in Transcription
  misc_feature: MA Experiment 20000495 PARAMETER Experiment Name: At_Guard_Cells_P Parameter: Harvest Date Value: 8/2/2002
  misc_feature: MA Experiment 20000495 PARAMETER Experiment Name: At_Guard_Cells_P Parameter: Organism Value: A. thaliana
  misc_feature: MA Experiment 20000495 PARAMETER Experiment Name: At_Guard_Cells_P Parameter: Tissue Value: Guard Cells vs. Leaves
  misc_feature: MA Experiment ID: 20001451 Result: Down-regulated in Transcription
  misc_feature: MA Experiment 20001451 PARAMETER Experiment Name: At_Far-red-induction_P Parameter: Age (day) Value: 7
  misc_feature: MA Experiment 20001451 PARAMETER Experiment Name: At_Far-red-induction_P Parameter: Light Value: Far-red vs. White
  misc_feature: MA Experiment 20001451 PARAMETER Experiment Name: At_Far-red-induction_P Parameter: Organism Value: A. thaliana
  misc_feature: MA Experiment 20001451 PARAMETER Experiment Name: At_Far-red-induction_P Parameter: Plant Line Value: Columbia
  misc_feature: MA Experiment 20001451 PARAMETER Experiment Name: At_Far-red-induction_P Parameter: Timepoint (hr) Value: 24
  misc_feature: MA Experiment 20001451 PARAMETER Experiment Name: At_Far-red-induction_P Parameter: Tissue Value: Whole Plant
  misc_feature: MA Experiment ID: 20001560 Result: Down-regulated in Transcription
  misc_feature: MA Experiment 20001560 PARAMETER Experiment Name: At_Drought_Soil_Dry_P Parameter: Age (day) Value: 28
  misc_feature: MA Experiment 20001560 PARAMETER Experiment Name: At_Drought_Soil_Dry_P Parameter: Organism Value: A. thaliana
  misc_feature: MA Experiment 20001560 PARAMETER Experiment Name: At_Drought_Soil_Dry_P Parameter: Plant Line Value: WS
  misc_feature: MA Experiment 20001560 PARAMETER Experiment Name: At_Drought_Soil_Dry_P Parameter: Post Timepoint (hr) Value: None
  misc_feature: MA Experiment 20001560 PARAMETER Experiment Name: At_Drought_Soil_Dry_P Parameter: Post-Treatment Value: None
  misc_feature: MA Experiment 20001560 PARAMETER Experiment Name: At_Drought_Soil_Dry_P Parameter: Timepoint (day) Value: 14
  misc_feature: MA Experiment 20001560 PARAMETER Experiment Name: At_Drought_Soil_Dry_P Parameter: Treatment Value: Drought vs. No Drought
  misc_feature: MA Experiment ID: 20001905 Result: Down-regulated in Transcription
  misc_feature: MA Experiment 20001905 PARAMETER Experiment Name: At_Drought_Reproduction_P Parameter: Age (day) Value: 40
  misc_feature: MA Experiment 20001905 PARAMETER Experiment Name: At_Drought_Reproduction_P Parameter: Organism Value: A. thaliana
  misc_feature: MA Experiment 20001905 PARAMETER Experiment Name: At_Drought_Reproduction_P Parameter: Plant Line Value: WS
  misc_feature: MA Experiment 20001905 PARAMETER Experiment Name: At_Drought_Reproduction_P Parameter: Timepoint (day) Value: 10
  misc_feature: MA Experiment 20001905 PARAMETER Experiment Name: At_Drought_Reproduction_P Parameter: Tissue Value: Rosettes
  misc_feature: MA Experiment 20001905 PARAMETER Experiment Name: At_Drought_Reproduction_P Parameter: Treatment Value: Drought vs. No Drought
aaaacgataattaaaaaaaaaaaaaaaaagcttacgaacgccattggagaagagcacgaaaaagaagaagaagactatgcttctcttgcaacaaccaccactggtttcaactagatttcactctctctacttcctcactcaccaccaccaccaccaccaccgcttcttccaaccaccaatctcagctttctctgcaacaacctctgcttctttaccttcaccatctccatcttcttcttcttcttacttctcctcatggaatggtttagatacaaatgaagaagaagacaatgaattctcctccgaggttcaccgtcgctacgacttctctccactcctaaaattcctctcaagattcggaccagtcgagttagctctagattcggaatcggaatcagaagcttcaccggaatcgcttaatccggtagagttcgatctcgtcgagtcatacagagcagtaccagcaccatactggcactctctgataaaatcgttaacctcatcaacatcatctcttggtttagcttacgctgtagtgtcatggctacaaaaacataacctctgtttctcctacgagcttctttactcgattctcatccacgcgcttggccgttccgagaagctttacgaggcgtttcttctctctcagaaacaaacgttaacaccattgacatacaatgccttgattggtgcttgtgctcggaacaacgatatcgaaaaagctcttaatttgatcgctaagatgcgtcaagacggttatcaatccgattttgttaactatagtttggttattcagtcgttgactcgtagcaataagattgattctgttatgttgttgagattgtataaagagattgaaagagataagcttgagcttgatgtgcagttagttaatgatattattatgggttttgctaagtctggtgatccttctaaggctttgcagcttcttggtatggctcaagcgacgggtttgagtgcgaaaaccgctactcttgtatcgattatctctgcgttggcggattcagggaggactttggaggctgaagctttgtttgaggagttgagacagagtgggattaagcctagaacgagagcttacaatgcgttgcttaaagggtatgtgaagacgggtcctttgaaagacgcagagtcaatggtttctgagatggagaagcgaggtgtttcgcctgatgaacatacgtatagtctgcttatcgatgcgtatgttaatgcaggtagatgggaaagtgcgagaattgtgttgaaagagatggaagctggtgatgtacagcctaattcttttgttttcagtagactcttagctggttttcgcgatagaggtgaatggcagaagacatttcaagttcttaaagagatgaagagtatcggtgttaagcccgatagacagttttataacgtggtgatcgatacctttgggaagtttaattgtcttgatcatgccatgacgactttcgatagaatgttaagcgaaggtattgaaccagatagggtgacttggaatacgcttattgattgtcattgtaagcatggtcggcatatcgtagcggaagagatgttcgaggcgatggagaggcgagggtgtttgccttgtgctacaacttataacattatgatcaatagttatggtgatcaagaaagatgggatgatatgaaaagattgttgggaaagatgaagagccaaggtatcctgcctaatgttgtgacacacactacacttgtcgacgtttatggcaaatcgggtaggtttaatgatgcgatagagtgcttggaagagatgaagtcggttgggttgaaaccatcatcgaccatgtacaatgccctcatcaatgcatatgcacaaaggggtttatcggaacaagctgtgaatgcatttagagtgatgacatcggatggactaaagccgagtttattggctctcaattcgctcatcaatgcctttggtgaggatagaagagacgctgaagcctttgccgtgttacagtacatgaaagaaaatggcgtaaaaccagacgtggtcacttacacaacactcatgaaagctctcattcgtgttgataagtttcagaaggtaccggttgtttacgaggagatgatcatgtcaggatgcaaaccagatagaaaagctagatccatgttacggtcagctctaagatacatgaagcagacgttaagagcctcatagaaacatagggaaacaatgcaaaggttttatcttgagctaaagtgatcaaatatttctcgagcttctgatatcgtctcgcaagctcaggaccgatatgtaaacgacacaaaccacacatcacaagaggaagtctttcatacaaatccgcacattctctgtctatgtaaagattcaacctgtacaaatatataagtgtgttgaccaaattggatacggttactgtctgtactacagagatcatgtaggaagttataaaccaaagctcctttacttaagaatatatcacaaatccaaagaattatgttgtcttttcatgagacacaacatttct

SEQ ID NO: 48099 - protein, 709 aa, Arabidopsis thaliana
  peptide (1)..(709): Ceres Seq. ID no. 15219581
  misc_feature (480)..(514): Pfam Name: PPR repeat Pfam Description: PPR repeat
  misc_feature (161)..(705): Homolog of NCBI NO: 33859440 NR Description: PPR protein [Oryza sativa (indica
  misc_feature (199)..(695): Homolog of NCBI NO: 15228763 NR Description: pentatricopeptide (PPR) repeat-containing protein
  misc_feature (199)..(695): Homolog of NCBI NO: 11994279 NR Description: gb|AAD43616.1~gene_id:F16J14.3~strong similarity
  misc_feature (163)..(709): Homolog of NCBI NO: 15240891 NR Description: pentatricopeptide (PPR) repeat-containing protein
  misc_feature (164)..(688): Homolog of NCBI NO: 33859440 NR Description: PPR protein [Oryza sativa (indica
  misc_feature (183)..(688): Homolog of NCBI NO: 15228763 NR Description: pentatricopeptide (PPR) repeat-containing protein
  misc_feature (183)..(688): Homolog of NCBI NO: 11994279 NR Description: gb|AAD43616.1~gene_id:F16J14.3~strong similarity
  misc_feature (1)..(664): Homolog of NCBI NO: 10177016 NR Description: maize crp1 protein-like [Arabidopsis thaliana]
  misc_feature (75)..(703): Homolog of NCBI NO: 34898564 NR Description: putative crp1 protein [Oryza sativa (japonica
  misc_feature (81)..(703): Homolog of NCBI NO: 7489723 NR Description: crp1 protein - maize
MLLLQQPPLVSTRFHSLYFLTHHHHHHHRFFQPPISAFSATTSASLPSPSPSSSSSYFSSWNGLDTNEEEDNEFSSEVHRRYDFSPLLKFLSRFGPVELALDSESESEASPESLNPVEFDLVESYRAVPAPYWHSLIKSLTSSTSSLGLAYAVVSWLQKHNLCFSYELLYSILIHALGRSEKLYEAFLLSQKQTLTPLTYNALIGACARNNDIEKALNLIAKMRQDGYQSDFVNYSLVIQSLTRSNKIDSVMLLRLYKEIERDKLELDVQLVNDIIMGFAKSGDPSKALQLLGMAQATGLSAKTATLVSIISALADSGRTLEAEALFEELRQSGIKPRTRAYNALLKGYVKTGPLKDAESMVSEMEKRGVSPDEHTYSLLIDAYVNAGRWESARIVLKEMEAGDVQPNSFVFSRLLAGFRDRGEWQKTFQVLKEMKSIGVKPDRQFYNVVIDTFGKFNCLDHAMTTFDRMLSEGIEPDRVTWNTLIDCHCKHGRHIVAEEMFEAMERRGCLPCATTYNIMINSYGDQERWDDMKRLLGKMKSQGILPNVVTHTTLVDVYGKSGRFNDAIECLEEMKSVGLKPSSTMYNALINAYAQRGLSEQAVNAFRVMTSDGLKPSLLALNSLINAFGEDRRDAEAFAVLQYMKENGVKPDVVTYTTLMKALIRVDKFQKVPVVYEEMIMSGCKPDRKARSMLRSALRYMKQTLRAS

SEQ ID NO: 48100 - protein, 487 aa, Arabidopsis thaliana
  peptide (1)..(487): Ceres Seq. ID no. 15219582
  misc_feature (258)..(292): Pfam Name: PPR repeat Pfam Description: PPR repeat
  misc_feature (1)..(483): Homolog of NCBI NO: 33859440 NR Description: PPR protein [Oryza sativa (indica
  misc_feature (1)..(473): Homolog of NCBI NO: 15228763 NR Description: pentatricopeptide (PPR) repeat-containing protein
  misc_feature (1)..(473): Homolog of NCBI NO: 11994279 NR Description: gb|AAD43616.1~gene_id:F16J14.3~strong similarity
  misc_feature (1)..(487): Homolog of NCBI NO: 15240891 NR Description: pentatricopeptide (PPR) repeat-containing protein
  misc_feature (1)..(466): Homolog of NCBI NO: 33859440 NR Description: PPR protein [Oryza sativa (indica
  misc_feature (1)..(466): Homolog of NCBI NO: 15228763 NR Description: pentatricopeptide (PPR) repeat-containing protein
  misc_feature (1)..(466): Homolog of NCBI NO: 11994279 NR Description: gb|AAD43616.1~gene_id:F16J14.3~strong similarity
  misc_feature (1)..(442): Homolog of NCBI NO: 10177016 NR Description: maize crp1 protein-like [Arabidopsis thaliana]
  misc_feature (1)..(481): Homolog of NCBI NO: 34898564 NR Description: putative crp1 protein [Oryza sativa (japonica
  misc_feature (1)..(481): Homolog of NCBI NO: 7489723 NR Description: crp1 protein - maize
MRQDGYQSDFVNYSLVIQSLTRSNKIDSVMLLRLYKEIERDKLELDVQLVNDIIMGFAKSGDPSKALQLLGMAQATGLSAKTATLVSIISALADSGRTLEAEALFEELRQSGIKPRTRAYNALLKGYVKTGPLKDAESMVSEMEKRGVSPDEHTYSLLIDAYVNAGRWESARIVLKEMEAGDVQPNSFVFSRLLAGFRDRGEWQKTFQVLKEMKSIGVKPDRQFYNVVIDTFGKFNCLDHAMTTFDRMLSEGIEPDRVTWNTLIDCHCKHGRHIVAEEMFEAMERRGCLPCATTYNIMINSYGDQERWDDMKRLLGKMKSQGILPNVVTHTTLVDVYGKSGRFNDAIECLEEMKSVGLKPSSTMYNALINAYAQRGLSEQAVNAFRVMTSDGLKPSLLALNSLINAFGEDRRDAEAFAVLQYMKENGVKPDVVTYTTLMKALIRVDKFQKVPVVYEEMIMSGCKPDRKARSMLRSALRYMKQTLRAS

SEQ ID NO: 48101 - protein, 458 aa, Arabidopsis thaliana
  peptide (1)..(458): Ceres Seq. ID no. 15219583
  misc_feature (229)..(263): Pfam Name: PPR repeat Pfam Description: PPR repeat
  misc_feature (1)..(454): Homolog of NCBI NO: 33859440 NR Description: PPR protein [Oryza sativa (indica
  misc_feature (1)..(444): Homolog of NCBI NO: 15228763 NR Description: pentatricopeptide (PPR) repeat-containing protein
  misc_feature (1)..(444): Homolog of NCBI NO: 11994279 NR Description: gb|AAD43616.1~gene_id:F16J14.3~strong similarity
  misc_feature (1)..(458): Homolog of NCBI NO: 15240891 NR Description: pentatricopeptide (PPR) repeat-containing protein
  misc_feature (1)..(437): Homolog of NCBI NO: 33859440 NR Description: PPR protein [Oryza sativa (indica
  misc_feature (1)..(437): Homolog of NCBI NO: 15228763 NR Description: pentatricopeptide (PPR) repeat-containing protein
  misc_feature (1)..(437): Homolog of NCBI NO: 11994279 NR Description: gb|AAD43616.1~gene_id:F16J14.3~strong similarity
  misc_feature (1)..(413): Homolog of NCBI NO: 10177016 NR Description: maize crp1 protein-like [Arabidopsis thaliana]
  misc_feature (1)..(452): Homolog of NCBI NO: 34898564 NR Description: putative crp1 protein [Oryza sativa (japonica
  misc_feature (1)..(452): Homolog of NCBI NO: 7489723 NR Description: crp1 protein - maize
MLLRLYKEIERDKLELDVQLVNDIIMGFAKSGDPSKALQLLGMAQATGLSAKTATLVSIISALADSGRTLEAEALFEELRQSGIKPRTRAYNALLKGYVKTGPLKDAESMVSEMEKRGVSPDEHTYSLLIDAYVNAGRWESARIVLKEMEAGDVQPNSFVFSRLLAGFRDRGEWQKTFQVLKEMKSIGVKPDRQFYNVVIDTFGKFNCLDHAMTTFDRMLSEGIEPDRVTWNTLIDCHCKHGRHIVAEEMFEAMERRGCLPCATTYNIMINSYGDQERWDDMKRLLGKMKSQGILPNVVTHTTLVDVYGKSGRFNDAIECLEEMKSVGLKPSSTMYNALINAYAQRGLSEQAVNAFRVMTSDGLKPSLLALNSLINAFGEDRRDAEAFAVLQYMKENGVKPDVVTYTTLMKALIRVDKFQKVPVVYEEMIMSGCKPDRKARSMLRSALRYMKQTLRAS

SEQ ID NO: 48102 - DNA, 1299 bp, Arabidopsis thaliana
  misc_feature (1)..(1299): Ceres Seq. ID no. 12662749
  misc_feature: MA Experiment ID: 20000315 Result: Down-regulated in Transcription
  misc_feature: MA Experiment 20000315 PARAMETER Experiment Name: At_14day_Shoots-Roots_Sub_P Parameter: Age (day) Value: 14
  misc_feature: MA Experiment 20000315 PARAMETER Experiment Name: At_14day_Shoots-Roots_Sub_P Parameter: Organism Value: A. thaliana
  misc_feature: MA Experiment 20000315 PARAMETER Experiment Name: At_14day_Shoots-Roots_Sub_P Parameter: Plant Line Value: WS
  misc_feature: MA Experiment 20000315 PARAMETER Experiment Name: At_14day_Shoots-Roots_Sub_P Parameter: Tissue Value: Shoots vs. Whole Plant
  misc_feature: MA Experiment ID: 20000328 Result: Down-regulated in Transcription
  misc_feature: MA Experiment 20000328 PARAMETER Experiment Name: At_42deg_Heat_Sub_P Parameter: Age (day) Value: 14
  misc_feature: MA Experiment 20000328 PARAMETER Experiment Name: At_42deg_Heat_Sub_P Parameter: Organism Value: A. thaliana
  misc_feature: MA Experiment 20000328 PARAMETER Experiment Name: At_42deg_Heat_Sub_P Parameter: Plant Line Value: WS
  misc_feature: MA Experiment 20000328 PARAMETER Experiment Name: At_42deg_Heat_Sub_P Parameter: Temperature (deg C) Value: 42 vs. 22
  misc_feature: MA Experiment 20000328 PARAMETER Experiment Name: At_42deg_Heat_Sub_P Parameter: Timepoint (hr) Value: 6
  misc_feature: MA Experiment 20000328 PARAMETER Experiment Name: At_42deg_Heat_Sub_P Parameter: Tissue Value: Aerial
atgaagctaaaatgggaatcaatctctaatcttcaacaaaacacatatctcataaaactcgtcgctgcaacacttataacttgtctcgcttttcgtttcttcgtcttccgcttcggccaattttccccagttcaagtgtcggtgaccggaaactccaattcccagatttctccgacgtctgttatcttatcggataacgaagatcaaattcccgtcgatattgaggtggagaagtgtgatctatttactgggaaatggattaaagatcctttgggaccaatctacacgaatgagtcatgtggtatcgttgtagatgctcaccagaattgcatcactaatggtcgacctgattctggttttctcaattggaaatggaagcctaatgactgttccttgcctcggtttgattctctgagatttctgcagcttatgaggaataaatcttgggctataatcggtgactccattgctcgtaaccatgtcgagtctttgctttgtatgctatctacagttgaaaaacctgttgaagtgtatcacgatgagaactatagatcgaagcgttggcattttccttcgtataactttacggtatccaacatttggtcaccttttcttgttcaagctgatatctttgaagactcaaatggtgtctcatcagctgcagttcagcttcatctagataaactcgacaatacatggactgatctattcccgagccttgactatgcgatcatctcttcaggggaatggttcttgaaaactgcggtataccacgagaatgctaatcccgttggatgccatggctgcccggagagttcgaacatgacggatttaggattcgactatgcttacaatacgtcgttgcgccatgttatggacttcatagcgaaatctaaaactaaaggcatgatctttttccggacttcgatacctgatcattttgaagatggggaatggcataacggtgggacttgtaagaaaacagaaccggtgggtgaagaggcagtcgagatgaaagttctgaacaagatattgagagatgttgagattaatcaattcgagagagtggttacggagatgggtcaggagagtgagaatctaaagcttctggattttgctggcatgttgctgactcgacccgatggtcatccgggtccatatagagagtttaggccgtttgataaagataagaacgctacggtacagaacgattgtctgcattggtgcttgcctggtccgattgatcacttgaacgatgtcatattggagatcatagtgaatggtcgaaccggtaaataa

SEQ ID NO: 48103 - protein, 432 aa, Arabidopsis thaliana
  peptide (1)..(432): Ceres Seq. ID no. 12662750
  misc_feature (251)..(425): Pfam Name: Arabidopsis proteins of unknown function Pfam Description: Arabidopsis proteins of unknown function
  misc_feature (77)..(425): Homolog of NCBI NO: 15237213 NR Description: putative protein; protein id: At5g15900.1
  misc_feature (51)..(425): Homolog of NCBI NO: 15237211 NR Description: putative protein; protein id: At5g15890.1
  misc_feature (10)..(425): Homolog of NCBI NO: 15223079 NR Description: unknown protein
  misc_feature (9)..(427): Homolog of NCBI NO: 25518737 NR Description: hypothetical protein F6F3.23 [imported] -
  misc_feature (32)..(427): Homolog of NCBI NO: 28393189 NR Description: unknown protein [Arabidopsis thaliana]
  misc_feature (32)..(427): Homolog of NCBI NO: 15234058 NR Description: hypothetical protein; protein id: At4g01080.1
  misc_feature (9)..(427): Homolog of NCBI NO: 30678135 NR Description: expressed protein [Arabidopsis thaliana]
  misc_feature (13)..(428): Homolog of NCBI NO: 7486743 NR Description: hypothetical protein F9D16.260 - Arabidopsis
  misc_feature (1)..(428): Homolog of NCBI NO: 30686312 NR Description: expressed protein [Arabidopsis thaliana]
  misc_feature (1)..(432): Homolog of NCBI NO: 15237044 NR Description: putative protein; protein id: At4g11090.1
MKLKWESISNLQQNTYLIKLVAATLITCLAFRFFVFRFGQFSPVQVSVTGNSNSQISPTSVILSDNEDQIPVDIEVEKCDLFTGKWIKDPLGPIYTNESCGIVVDAHQNCITNGRPDSGFLNWKWKPNDCSLPRFDSLRFLQLMRNKSWAIIGDSIARNHVESLLCMLSTVEKPVEVYHDENYRSKRWHFPSYNFTVSNIWSPFLVQADIFEDSNGVSSAAVQLHLDKLDNTWTDLFPSLDYAIISSGEWFLKTAVYHENANPVGCHGCPESSNMTDLGFDYAYNTSLRHVMDFIAKSKTKGMIFFRTSIPDHFEDGEWHNGGTCKKTEPVGEEAVEMKVLNKILRDVEINQFERVVTEMGQESENLKLLDFAGMLLTRPDGHPGPYREFRPFDKDKNATVQNDCLHWCLPGPIDHLNDVILEIIVNGRTGK

SEQ ID NO: 48104 - protein, 289 aa, Arabidopsis thaliana
  peptide (1)..(289): Ceres Seq. ID no. 12662751
  misc_feature (108)..(282): Pfam Name: Arabidopsis proteins of unknown function Pfam Description: Arabidopsis proteins of unknown function
  misc_feature (1)..(282): Homolog of NCBI NO: 15237213 NR Description: putative protein; protein id: At5g15900.1
  misc_feature (1)..(282): Homolog of NCBI NO: 15237211 NR Description: putative protein; protein id: At5g15890.1
  misc_feature (1)..(282): Homolog of NCBI NO: 15223079 NR Description: unknown protein
  misc_feature (1)..(284): Homolog of NCBI NO: 25518737 NR Description: hypothetical protein F6F3.23 [imported] -
  misc_feature (1)..(284): Homolog of NCBI NO: 28393189 NR Description: unknown protein [Arabidopsis thaliana]
  misc_feature (1)..(284): Homolog of NCBI NO: 15234058 NR Description: hypothetical protein; protein id: At4g01080.1
  misc_feature (1)..(284): Homolog of NCBI NO: 30678135 NR Description: expressed protein [Arabidopsis thaliana]
  misc_feature (1)..(285): Homolog of NCBI NO: 7486743 NR Description: hypothetical protein F9D16.260 - Arabidopsis
  misc_feature (1)..(285): Homolog of NCBI NO: 30686312 NR Description: expressed protein [Arabidopsis thaliana]
  misc_feature (1)..(289): Homolog of NCBI NO: 15237044 NR Description: putative protein; protein id: At4g11090.1
MRNKSWAIIGDSIARNHVESLLCMLSTVEKPVEVYHDENYRSKRWHFPSYNFTVSNIWSPFLVQADIFEDSNGVSSAAVQLHLDKLDNTWTDLFPSLDYAIISSGEWFLKTAVYHENANPVGCHGCPESSNMTDLGFDYAYNTSLRHVMDFIAKSKTKGMIFFRTSIPDHFEDGEWHNGGTCKKTEPVGEEAVEMKVLNKILRDVEINQFERVVTEMGQESENLKLLDFAGMLLTRPDGHPGPYREFRPFDKDKNATVQNDCLHWCLPGPIDHLNDVILEIIVNGRTGK

SEQ ID NO: 48105 - protein, 266 aa, Arabidopsis thaliana
  peptide (1)..(266): Ceres Seq. ID no. 12662752
  misc_feature (85)..(259): Pfam Name: Arabidopsis proteins of unknown function Pfam Description: Arabidopsis proteins of unknown function
  misc_feature (1)..(259): Homolog of NCBI NO: 15237213 NR Description: putative protein; protein id: At5g15900.1
  misc_feature (1)..(259): Homolog of NCBI NO: 15237211 NR Description: putative protein; protein id: At5g15890.1
  misc_feature (1)..(259): Homolog of NCBI NO: 15223079 NR Description: unknown protein
  misc_feature (1)..(261): Homolog of NCBI NO: 25518737 NR Description: hypothetical protein F6F3.23 [imported] -
  misc_feature (1)..(261): Homolog of NCBI NO: 28393189 NR Description: unknown protein [Arabidopsis thaliana]
  misc_feature (1)..(261): Homolog of NCBI NO: 15234058 NR Description: hypothetical protein; protein id: At4g01080.1
  misc_feature (1)..(261): Homolog of NCBI NO: 30678135 NR Description: expressed protein [Arabidopsis thaliana]
  misc_feature (1)..(262): Homolog of NCBI NO: 7486743 NR Description: hypothetical protein F9D16.260 - Arabidopsis
  misc_feature (1)..(262): Homolog of NCBI NO: 30686312 NR Description: expressed protein [Arabidopsis thaliana]
  misc_feature (1)..(266): Homolog of NCBI NO: 15237044 NR Description: putative protein; protein id: At4g11090.1
MLSTVEKPVEVYHDENYRSKRWHFPSYNFTVSNIWSPFLVQADIFEDSNGVSSAAVQLHLDKLDNTWTDLFPSLDYAIISSGEWFLKTAVYHENANPVGCHGCPESSNMTDLGFDYAYNTSLRHVMDFIAKSKTKGMIFFRTSIPDHFEDGEWHNGGTCKKTEPVGEEAVEMKVLNKILRDVEINQFERVVTEMGQESENLKLLDFAGMLLTRPDGHPGPYREFRPFDKDKNATVQNDCLHWCLPGPIDHLNDVILEIIVNGRTGK

SEQ ID NO: 48106 - DNA, 1236 bp, Arabidopsis thaliana
  misc_feature (1)..(1236): Ceres Seq. ID no. 13649096
  misc_feature: MA Experiment ID: 20000179 Result: Down-regulated in Transcription
  misc_feature: MA Experiment 20000179 PARAMETER Experiment Name: At_Germinating_Seeds_P Parameter: Age (hr) Value: 6 vs. 0
  misc_feature: MA Experiment 20000179 PARAMETER Experiment Name: At_Germinating_Seeds_P Parameter: Tissue Value: Germinating Seeds
  misc_feature: MA Experiment ID: 20000180 Result: Down-regulated in Transcription
  misc_feature: MA Experiment 20000180 PARAMETER Experiment Name: At_Germinating_Seeds_P Parameter: Age (hr) Value: 24 vs. 0
  misc_feature: MA Experiment 20000180 PARAMETER Experiment Name: At_Germinating_Seeds_P Parameter: Tissue Value: Germinating Seeds
  misc_feature: MA Experiment ID: 20001911 Result: Up-regulated in Transcription
  misc_feature: MA Experiment 20001911 PARAMETER Experiment Name: At_Drought_Reproduction_P Parameter: Age (day) Value: 40
  misc_feature: MA Experiment 20001911 PARAMETER Experiment Name: At_Drought_Reproduction_P Parameter: Organism Value: A. thaliana
  misc_feature: MA Experiment 20001911 PARAMETER Experiment Name: At_Drought_Reproduction_P Parameter: Plant Line Value: WS
  misc_feature: MA Experiment 20001911 PARAMETER Experiment Name: At_Drought_Reproduction_P Parameter: Timepoint (day) Value: 10
  misc_feature: MA Experiment 20001911 PARAMETER Experiment Name: At_Drought_Reproduction_P Parameter: Tissue Value: Flowers
  misc_feature: MA Experiment 20001911 PARAMETER Experiment Name: At_Drought_Reproduction_P Parameter: Treatment Value: Drought vs. No Drought
atggatcctaacgaaagccaccatcaccaccaacaacaacagctccatcacctccaccaacagcaacagcaacagcagcagcagcaacgactcacttctccttacttccaccaccaactacagcaccatcaccaccttccaaccaccgtagcaaccaccgcttctaccggaaacgccgttccatcttccaacaatgggcttttccctccgcagcctcagccacagcaccagcctaatgatgggtcatcttctctcgcggtgtaccctcattcagttccgtcctcggctgtgacggcgccgatggagccggtaaagaggaagaggggtcgaccaagaaagtatgtgacgccggaacaagccctagcggctaagaaattggcgtcttctgcgagtagttcgtctgctaaacagaggcgagagcttgctgctgttaccggtggtacggtatcgactaattccgggtcatccaagaaatctcagcttggttctgtcgggaaaactggacaatgttttactccgcatattgttaatatagctcctggcgaggatgtggtccagaaaattatgatgttcgcaaaccaaagcaagcatgaactatgcgttctttctgcatcaggcactatctctaatgcatccttgcgccaaccggctccatcaggaggcaacttaccatatgagggtcaatacgagattctctcactatctggatcctatatccgaactgaacaaggtggtaaatccggcggccttagcgtttctttatctgcttcagatggtcagatcatcggtggagcgattggtagccatctcacagctgctggcccggttcaggtgattcttggtacgtttcagcttgatagaaagaaggatgccgccgggagtggtgggaaaggggatgcttcaaacagtggaagtcggttaacttctcctgtaagctctggacagttgcttggcatgggtttccctcctggtatggaatctacgggaagaaatccaatgaggggaaacgacgagcaacatgatcatcatcatcatcaagccggtttgggtggacctcatcatttcatgatgcaagcgccgcaggggatacacatgacacattccaggccatctgaatggcgcggaggaggcaacagcggtcatgatggcagaggcggtggcgggtatgatttgtcaggaaggataggacatgagtcgtcggagaatggagattacgagcagcaaataccggattag

SEQ ID NO: 48107 - protein, 411 aa, Arabidopsis thaliana
  peptide (1)..(411): Ceres Seq. ID no. 13649097
  misc_feature (3)..(66): Pfam Name: Atrophin-1 family Pfam Description: Atrophin-1 family
  misc_feature (18)..(360): Homolog of NCBI NO: 18403332 NR Description: AT-hook DNA-binding protein (AHP1) [Arabidopsis
  misc_feature (18)..(360): Homolog of NCBI NO: 2598227 NR Description: AT-hook protein 1 [Arabidopsis thaliana]
  misc_feature (1)..(77): Homolog of NCBI NO: 7487767 NR Description: hypothetical protein T6K21.130 - Arabidopsis
  misc_feature (80)..(341): Homolog of NCBI NO: 7487767 NR Description: hypothetical protein T6K21.130 - Arabidopsis
  misc_feature (18)..(360): Homolog of NCBI NO: 14326504 NR Description: At2g33620/F4P9.39 [Arabidopsis thaliana]
  misc_feature (252)..(377): Homolog of NCBI NO: 9502163 NR Description: contains similarity to Antirrhinum majus SAP1
  misc_feature (64)..(353): Homolog of NCBI NO: 4165183 NR Description: SAP1 protein [Antirrhinum majus]
  misc_feature (1)..(304): Homolog of NCBI NO: 30679183 NR Description: expressed protein [Arabidopsis thaliana]
  misc_feature (1)..(411): Homolog of NCBI NO: 6175163 NR Description: unknown protein [Arabidopsis thaliana]
  misc_feature (1)..(411): Homolog of NCBI NO: 30679188 NR Description: expressed protein [Arabidopsis thaliana]
MDPNESHHHHQQQQLHHLHQQQQQQQQQQRLTSPYFHHQLQHHHHLPTTVATTASTGNAVPSSNNGLFPPQPQPQHQPNDGSSSLAVYPHSVPSSAVTAPMEPVKRKRGRPRKYVTPEQALAAKKLASSASSSSAKQRRELAAVTGGTVSTNSGSSKKSQLGSVGKTGQCFTPHIVNIAPGEDVVQKIMMFANQSKHELCVLSASGTISNASLRQPAPSGGNLPYEGQYEILSLSGSYIRTEQGGKSGGLSVSLSASDGQIIGGAIGSHLTAAGPVQVILGTFQLDRKKDAAGSGGKGDASNSGSRLTSPVSSGQLLGMGFPPGMESTGRNPMRGNDEQHDHHHHQAGLGGPHHFMMQAPQGIHMTHSRPSEWRGGGNSGHDGRGGGGYDLSGRIGHESSENGDYEQQIPD

SEQ ID NO: 48108 - protein, 311 aa, Arabidopsis thaliana
  peptide (1)..(311): Ceres Seq. ID no. 13649098
  misc_feature (54)..(279): Homolog of NCBI NO: 18414996 NR Description: expressed protein [Arabidopsis thaliana]
  misc_feature (1)..(260): Homolog of NCBI NO: 18403332 NR Description: AT-hook DNA-binding protein (AHP1) [Arabidopsis
  misc_feature (1)..(260): Homolog of NCBI NO: 2598227 NR Description: AT-hook protein 1 [Arabidopsis thaliana]
  misc_feature (1)..(241): Homolog of NCBI NO: 7487767 NR Description: hypothetical protein T6K21.130 - Arabidopsis
  misc_feature (1)..(260): Homolog of NCBI NO: 14326504 NR Description: At2g33620/F4P9.39 [Arabidopsis thaliana]
  misc_feature (152)..(277): Homolog of NCBI NO: 9502163 NR Description: contains similarity to Antirrhinum majus SAP1
  misc_feature (1)..(253): Homolog of NCBI NO: 4165183 NR Description: SAP1 protein [Antirrhinum majus]
  misc_feature (1)..(204): Homolog of NCBI NO: 30679183 NR Description: expressed protein [Arabidopsis thaliana]
  misc_feature (1)..(311): Homolog of NCBI NO: 6175163 NR Description: unknown protein [Arabidopsis thaliana]
  misc_feature (1)..(311): Homolog of NCBI NO: 30679188 NR Description: expressed protein [Arabidopsis thaliana]
MEPVKRKRGRPRKYVTPEQALAAKKLASSASSSSAKQRRELAAVTGGTVSTNSGSSKKSQLGSVGKTGQCFTPHIVNIAPGEDVVQKIMMFANQSKHELCVLSASGTISNASLRQPAPSGGNLPYEGQYEILSLSGSYIRTEQGGKSGGLSVSLSASDGQIIGGAIGSHLTAAGPVQVILGTFQLDRKKDAAGSGGKGDASNSGSRLTSPVSSGQLLGMGFPPGMESTGRNPMRGNDEQHDHHHHQAGLGGPHHFMMQAPQGIHMTHSRPSEWRGGGNSGHDGRGGGGYDLSGRIGHESSENGDYEQQIPD

SEQ ID NO: 48109 - protein, 223 aa, Arabidopsis thaliana
  peptide (1)..(223): Ceres Seq. ID no. 13649099
  misc_feature (1)..(191): Homolog of NCBI NO: 18414996 NR Description: expressed protein [Arabidopsis thaliana]
  misc_feature (1)..(172): Homolog of NCBI NO: 18403332 NR Description: AT-hook DNA-binding protein (AHP1) [Arabidopsis
  misc_feature (1)..(172): Homolog of NCBI NO: 2598227 NR Description: AT-hook protein 1 [Arabidopsis thaliana]
  misc_feature (1)..(153): Homolog of NCBI NO: 7487767 NR Description: hypothetical protein T6K21.130 - Arabidopsis
  misc_feature (1)..(172): Homolog of NCBI NO: 14326504 NR Description: At2g33620/F4P9.39 [Arabidopsis thaliana]
  misc_feature (64)..(189): Homolog of NCBI NO: 9502163 NR Description: contains similarity to Antirrhinum majus SAP1
  misc_feature (1)..(165): Homolog of NCBI NO: 4165183 NR Description: SAP1 protein [Antirrhinum majus]
  misc_feature (1)..(116): Homolog of NCBI NO: 30679183 NR Description: expressed protein [Arabidopsis thaliana]
  misc_feature (1)..(223): Homolog of NCBI NO: 6175163 NR Description: unknown protein [Arabidopsis thaliana]
  misc_feature (1)..(223): Homolog of NCBI NO: 30679188 NR Description: expressed protein [Arabidopsis thaliana]
MMFANQSKHELCVLSASGTISNASLRQPAPSGGNLPYEGQYEILSLSGSYIRTEQGGKSGGLSVSLSASDGQIIGGAIGSHLTAAGPVQVILGTFQLDRKKDAAGSGGKGDASNSGSRLTSPVSSGQLLGMGFPPGMESTGRNPMRGNDEQHDHHHHQAGLGGPHHFMMQAPQGIHMTHSRPSEWRGGGNSGHDGRGGGGYDLSGRIGHESSENGDYEQQIPD

SEQ ID NO: 48110 - DNA, 709 bp, Arabidopsis thaliana
  misc_feature (1)..(709): Ceres Seq. ID no. 13649954
  misc_feature: MA Experiment ID: 20000265 Result: Up-regulated in Transcription
  misc_feature: MA Experiment 20000265 PARAMETER Experiment Name: At_Open_Flower_P Parameter: Age (day) Value: 21
  misc_feature: MA Experiment 20000265 PARAMETER Experiment Name: At_Open_Flower_P Parameter: Plant Line Value: WS
  misc_feature: MA Experiment 20000265 PARAMETER Experiment Name: At_Open_Flower_P Parameter: Tissue Value: Closed Flower vs. Whole Plant
  misc_feature: MA Experiment ID: 20000286 Result: Up-regulated in Transcription
  misc_feature: MA Experiment 20000286 PARAMETER Experiment Name: At_Open_Flower_P Parameter: Age (day) Value: 21
  misc_feature: MA Experiment 20000286 PARAMETER Experiment Name: At_Open_Flower_P Parameter: Plant Line Value: WS
  misc_feature: MA Experiment 20000286 PARAMETER Experiment Name: At_Open_Flower_P Parameter: Tissue Value: Half Open vs. Whole Plant
atgactgaggagagcccagaagaagatcatgggtctcctggagtagctgaaacaaatccaggaagcccttcttcaaagaccaacaacaacaacaacaacaacaaagaacaagaccggtttcttcccattgcgaatgtcggaaggatcatgaaaaaagttcttcccggtaacggtaagatctcaaaagacgctaaagaaaccgttcaagaatgtgtctcggagttcattagtttcgtcactggtgaagcttctgacaagtgtcaaagagaaaagaggaagaccatcaatggagatgatatcatttgggctatcacaactctcggtttcgaagactacgtggctccattaaaggtctacctctgcaaatatagagacaccgaaggagagaaagttaacagcccaaaacaacaacaacaaagacaacaacaacagcagattcaacaacagaatcatcataattatcagtttcaagaacaagaccaaaacaataacaacatgtcatgtactagttacatctctcatcatcatccttctccattcctaccagtggatcatcaaccttttcccaatattgctttctctcctaaatcattgcagaaacagttcccgcagcagcatgataataacattgattcaattcactggtgagagagacatttgctttttttcttctttcttttcacatattatatgcttttctttacctttt

SEQ ID NO: 48111 - protein, 215 aa, Arabidopsis thaliana
  peptide (1)..(215): Ceres Seq. ID no. 15219600
  misc_feature (15)..(135): Homolog of NCBI NO: 25299604 NR Description: hypothetical protein At2g38880 [imported] -
  misc_feature (35)..(129): Homolog of NCBI NO: 30409461 NR Description: NF-YB [Oryza sativa (japonica cultivar-group)]
  misc_feature (35)..(167): Homolog of NCBI NO: 17979253 NR Description: At2g37060/T2N18.18 [Arabidopsis thaliana]
  misc_feature (15)..(135): Homolog of NCBI NO: 18404885 NR Description: CCAAT-binding transcription factor subunit
  misc_feature (28)..(137): Homolog of NCBI NO: 2398529 NR Description: Transcription factor [Arabidopsis thaliana]
  misc_feature (4)..(129): Homolog of NCBI NO: 115840 NR Description: CCAAT-BINDING TRANSCRIPTION FACTOR SUBUNIT A (NF-Y PROTEIN CHAIN B) (NF-YB) (CAAT-BOX DNA BINDING PROTEIN
  misc_feature (4)..(129): Homolog of NCBI NO: 22380 NR Description: CAAT-box DNA binding protein subunit B (NF-YB)
  misc_feature (14)..(137): Homolog of NCBI NO: 15238156 NR Description: expressed protein [Arabidopsis thaliana]
  misc_feature (15)..(141): Homolog of NCBI NO: 15233475 NR Description: CCAAT-binding transcription factor subunit
  misc_feature (1)..(215): Homolog of NCBI NO: 15225440 NR Description: CCAAT-box binding trancription factor -related
MTEESPEEDHGSPGVAETNPGSPSSKTNNNNNNNKEQDRFLPIANVGRIMKKVLPGNGKISKDAKETVQECVSEFISFVTGEASDKCQREKRKTINGDDIIWAITTLGFEDYVAPLKVYLCKYRDTEGEKVNSPKQQQQRQQQQQIQQQNHHNYQFQEQDQNNNNMSCTSYISHHHPSPFLPVDHQPFPNIAFSPKSLQKQFPQQHDNNIDSIHW

SEQ ID NO: 48112 - protein, 166 aa, Arabidopsis thaliana
  peptide (1)..(166): Ceres Seq. ID no. 15219601
  misc_feature (1)..(86): Homolog of NCBI NO: 25299604 NR Description: hypothetical protein At2g38880 [imported] -
  misc_feature (1)..(80): Homolog of NCBI NO: 30409461 NR Description: NF-YB [Oryza sativa (japonica cultivar-group)]
  misc_feature (1)..(118): Homolog of NCBI NO: 17979253 NR Description: At2g37060/T2N18.18 [Arabidopsis thaliana]
  misc_feature (1)..(86): Homolog of NCBI NO: 18404885 NR Description: CCAAT-binding transcription factor subunit
  misc_feature (1)..(88): Homolog of NCBI NO: 2398529 NR Description: Transcription factor [Arabidopsis thaliana]
  misc_feature (1)..(80): Homolog of NCBI NO: 115840 NR Description: CCAAT-BINDING TRANSCRIPTION FACTOR SUBUNIT A (NF-Y PROTEIN CHAIN B) (NF-YB) (CAAT-BOX DNA BINDING PROTEIN
  misc_feature (1)..(80): Homolog of NCBI NO: 22380 NR Description: CAAT-box DNA binding protein subunit B (NF-YB)
  misc_feature (1)..(88): Homolog of NCBI NO: 15238156 NR Description: expressed protein [Arabidopsis thaliana]
  misc_feature (1)..(92): Homolog of NCBI NO: 15233475 NR Description: CCAAT-binding transcription factor subunit
  misc_feature (1)..(166): Homolog of NCBI NO: 15225440 NR Description: CCAAT-box binding trancription factor -related
MKKVLPGNGKISKDAKETVQECVSEFISFVTGEASDKCQREKRKTINGDDIIWAITTLGFEDYVAPLKVYLCKYRDTEGEKVNSPKQQQQRQQQQQIQQQNHHNYQFQEQDQNNNNMSCTSYISHHHPSPFLPVDHQPFPNIAFSPKSLQKQFPQQHDNNIDSIHW

SEQ ID NO: 48113 - DNA, 2553 bp, Arabidopsis thaliana
  misc_feature (1)..(2553): Ceres Seq. ID no. 13649718
  misc_feature: MA Experiment ID: 20000184 Result: Down-regulated in Transcription
  misc_feature: MA Experiment 20000184 PARAMETER Experiment Name: At_Shoots__P Parameter: Age (day) Value: 7
  misc_feature: MA Experiment 20000184 PARAMETER Experiment Name: At_Shoots__P Parameter: Tissue Value: Shoots vs. Whole Plant
  misc_feature: MA Experiment ID: 20000794 Result: Up-regulated in Transcription
  misc_feature: MA Experiment 20000794 PARAMETER Experiment Name: At_Petals_P Parameter: Age (day) Value: 23-25 days
  misc_feature: MA Experiment 20000794 PARAMETER Experiment Name: At_Petals_P Parameter: Plant Line Value: WS
  misc_feature: MA Experiment 20000794 PARAMETER Experiment Name: At_Petals_P Parameter: Tissue Value: Petals vs. Whole plant
  misc_feature: MA Experiment ID: 20001911 Result: Up-regulated in Transcription
  misc_feature: MA Experiment 20001911 PARAMETER Experiment Name: At_Drought_Reproduction_P Parameter: Age (day) Value: 40
  misc_feature: MA Experiment 20001911 PARAMETER Experiment Name: At_Drought_Reproduction_P Parameter: Organism Value: A. thaliana
  misc_feature: MA Experiment 20001911 PARAMETER Experiment Name: At_Drought_Reproduction_P Parameter: Plant Line Value: WS
  misc_feature: MA Experiment 20001911 PARAMETER Experiment Name: At_Drought_Reproduction_P Parameter: Timepoint (day) Value: 10
  misc_feature: MA Experiment 20001911 PARAMETER Experiment Name: At_Drought_Reproduction_P Parameter: Tissue Value: Flowers
  misc_feature: MA Experiment 20001911 PARAMETER Experiment Name: At_Drought_Reproduction_P Parameter: Treatment Value: Drought vs. No Drought
atgttttcgtttgtgggtttcgtggtgttcctctctggatttttcctgggaattctcgccgtcttatccgctgaagctgcgggatttatgtatctcctgaagcgattgaatcgcaagagagatcgtattgagtcaaaacccgtctctgatccatctatcaaggattttaatcctcgcgaatccatcgatttctgtatcaacaaacagggagtggtatggattttggaattggatgaaggtctgaagaactggatgaaggaaaagttaccaaaagagcagaagaggaagagaggcttattggagattcatccacttcgaaagttcgctcgaatcaaagatcacaagcttatcttgtcagatgctgatagcactcagagtgagactaccgtttctttaataggttgcagtattgaggctgtttcaggctctgatctccctacaagaaaatgggccaaaaggtttccaataaaagttgaaagcaagatttctccagccttatacaagggaaaccaggtgttttacatctatctggagacttcttgggaaaaggaatcatggtgtaaagcccttcgtcttgcttcttgtgaaaatcaggaaaggtttatttggtactccaccaaattgaaagaagatttccgtaattatgtgacttctcttaatgttgcatatccttcatttatgaaaccatcacttggctttagttttgagacacttgacaaagggaacagaacggatggttcatcctcaaaggttcgcttgttcttgaagaaattttctagaaagcgatcaaatcgtgaagacaggaaaacctattcacatcatggaagtagctcagggaagtgctttccaggaaagaataatatgacagatgatactgatgtgcctattttttcacgttctgtgagccatagcagtcatatttctggggtcagtcatctttctggggtttcagatggagactctgaagaaaaggttgacatggatgaaggaacattagcgttgaacttgctcatttctaggctatttttcgatctcaaacggaaaacaggagtgaagaattcagtgcaagcacgaattcagcggttgttatctaacatgaggactccgagctacataggcgaactaatctgctccgatgttgacactggaaatctcccacctcatatacatgctacacgggttcttccaatggagatgagtggtgtgtgggcattcgaactagatattgaatactctggtgacgtggtgattgacgttgaaacacgggttgacatccgtgaggtggatctgcaacaaggcataaccgatacaaggttgcagccaaggtcttcaggggtagtcccgtcaaattttgctgaaggtgttgaagattttgaaaagcaattagtcttccctgtggaaactgttaatgcaggagaagtgaaaaatgatgaatccaagagctcaagaggtacgaaggcagctccaaatggtgtatccaggtggaagtctattcttaaaacaattgctgaacaagtttctcaggtgcctatctctttgtcaatacgggtgtcttctcttcgagggacactgcgggtacacatgaagccgcctccttctgatcaattatggtttggattcacgagcatgccggatatcgaattcgatctcgcatcttctgttggggaacacaaaatcaccaacagccatgttgcaatgttcttgatcaaccggtttaagacggcaatacgagaagcggtggttcttcccaactgtgaaagcctaacgattccttggatgattgctgaaaaagatgattgggttcaacgcaaagccgctccattcatgtggctgaatcaagaaaacgatcacaatacctcccatgcaacagaagcgagatctaaatctgacaagccaccgacttcgttctcatgtcttcaagctgagcaaatgcagagaactgcaaacgccacccagaagattatttctgaaatagggacattggcttcttcctcctgtgctcagtctgagcaagtgcagaaagcggccactgctttccagaaacagaatactgaagcagaagctattatgtctacgccattgtcaaactccacaactgtaacaatagagaatgataaatccttggaagaactgaaaactccactactggtacccagcagcagtaacaagcaggagacgaactcaagagggagtagcagagaggtttctgctgttcagtcaccatctaggtctgtagcttcaagcgaagaagatgattcaagggggaaaaaacagggaagaagagcaagaatgttggatcttgggaagaaaatgggggagaaattggaggagaagaggcgtcacatggaggagaagagtagacagattgttgaaaagatgagaggaccttcttaacatgagaaggaagaagcttttgcaggtttcagatgcaaaaactgatttatagaaacagaggaagttaggcattgttacatatgtacagagatgtgagagaaagccatagatgtccccatatttatccgatcatttgaaaatcttattattctgtaagat

SEQ ID NO: 48114 - protein, 797 aa, Arabidopsis thaliana
  peptide (1)..(797): Ceres Seq. ID no. 13649719
  misc_feature (509)..(794): Homolog of NCBI NO: 19112656 NR Description: hypothetical protein [Schizosaccharomyces pombe]
  misc_feature (333)..(591): Homolog of NCBI NO: 39596987 NR Description: Hypothetical protein CBG02527 [Caenorhabditis
  misc_feature (334)..(428): Homolog of NCBI NO: 34873954 NR Description: similar to putative protein of eukaryotic origin
  misc_feature (499)..(598): Homolog of NCBI NO: 34873954 NR Description: similar to putative protein of eukaryotic origin
  misc_feature (499)..(598): Homolog of NCBI NO: 38091890 NR Description: testis expressed gene 2 [Mus musculus]
  misc_feature (294)..(428): Homolog of NCBI NO: 38091890 NR Description: testis expressed gene 2 [Mus musculus]
  misc_feature (499)..(598): Homolog of NCBI NO: 34783705 NR Description: Unknown (protein for MGC:62520) [Mus musculus]
  misc_feature (294)..(428): Homolog of NCBI NO: 34783705 NR Description: Unknown (protein for MGC:62520) [Mus musculus]
  misc_feature (669)..(796): Homolog of NCBI NO: 15219405 NR Description: hypothetical protein [Arabidopsis thaliana]
  misc_feature (1)..(730): Homolog of NCBI NO: 15219405 NR Description: hypothetical protein [Arabidopsis thaliana]
MFSFVGFVVFLSGFFLGILAVLSAEAAGFMYLLKRLNRKRDRIESKPVSDPSIKDFNPRESIDFCINKQGVVWILELDEGLKNWMKEKLPKEQKRKRGLLEIHPLRKFARIKDHKLILSDADSTQSETTVSLIGCSIEAVSGSDLPTRKWAKRFPIKVESKISPALYKGNQVFYIYLETSWEKESWCKALRLASCENQERFIWYSTKLKEDFRNYVTSLNVAYPSFMKPSLGFSFETLDKGNRTDGSSSKVRLFLKKFSRKRSNREDRKTYSHHGSSSGKCFPGKNNMTDDTDVPIFSRSVSHSSHISGVSHLSGVSDGDSEEKVDMDEGTLALNLLISRLFFDLKRKTGVKNSVQARIQRLLSNMRTPSYIGELICSDVDTGNLPPHIHATRVLPMEMSGVWAFELDIEYSGDVVIDVETRVDIREVDLQQGITDTRLQPRSSGVVPSNFAEGVEDFEKQLVFPVETVNAGEVKNDESKSSRGTKAAPNGVSRWKSILKTIAEQVSQVPISLSIRVSSLRGTLRVHMKPPPSDQLWFGFTSMPDIEFDLASSVGEHKITNSHVAMFLINRFKTAIREAVVLPNCESLTIPWMIAEKDDWVQRKAAPFMWLNQENDHNTSHATEARSKSDKPPTSFSCLQAEQMQRTANATQKIISEIGTLASSSCAQSEQVQKAATAFQKQNTEAEAIMSTPLSNSTTVTIENDKSLEELKTPLLVPSSSNKQETNSRGSSREVSAVQSPSRSVASSEEDDSRGKKQGRRARMLDLGKKMGEKLEEKRRHMEEKSRQIVEKMRGPS

SEQ ID NO: 48115 - protein, 768 aa, Arabidopsis thaliana
  peptide (1)..(768): Ceres Seq. ID no. 13649720
  misc_feature (480)..(765): Homolog of NCBI NO: 19112656 NR Description: hypothetical protein [Schizosaccharomyces pombe]
  misc_feature (304)..(562): Homolog of NCBI NO: 39596987 NR Description: Hypothetical protein CBG02527 [Caenorhabditis
  misc_feature (305)..(399): Homolog of NCBI NO: 34873954 NR Description: similar to putative protein of eukaryotic origin
  misc_feature (470)..(569): Homolog of NCBI NO: 34873954 NR Description: similar to putative protein of eukaryotic origin
  misc_feature (470)..(569): Homolog of NCBI NO: 38091890 NR Description: testis expressed gene 2 [Mus musculus]
  misc_feature (265)..(399): Homolog of NCBI NO: 38091890 NR Description: testis expressed gene 2 [Mus musculus]
  misc_feature (470)..(569): Homolog of NCBI NO: 34783705 NR Description: Unknown (protein for MGC:62520) [Mus musculus]
  misc_feature (265)..(399): Homolog of NCBI NO: 34783705 NR Description: Unknown (protein for MGC:62520) [Mus musculus]
  misc_feature (640)..(767): Homolog of NCBI NO: 15219405 NR Description: hypothetical protein [Arabidopsis thaliana]
  misc_feature (1)..(701): Homolog of NCBI NO: 15219405 NR Description: hypothetical protein [Arabidopsis thaliana]
MYLLKRLNRKRDRIESKPVSDPSIKDFNPRESIDFCINKQGVVWILELDEGLKNWMKEKLPKEQKRKRGLLEIHPLRKFARIKDHKLILSDADSTQSETTVSLIGCSIEAVSGSDLPTRKWAKRFPIKVESKISPALYKGNQVFYIYLETSWEKESWCKALRLASCENQERFIWYSTKLKEDFRNYVTSLNVAYPSFMKPSLGFSFETLDKGNRTDGSSSKVRLFLKKFSRKRSNREDRKTYSHHGSSSGKCFPGKNNMTDDTDVPIFSRSVSHSSHISGVSHLSGVSDGDSEEKVDMDEGTLALNLLISRLFFDLKRKTGVKNSVQARIQRLLSNMRTPSYIGELICSDVDTGNLPPHIHATRVLPMEMSGVWAFELDIEYSGDVVIDVETRVDIREVDLQQGITDTRLQPRSSGVVPSNFAEGVEDFEKQLVFPVETVNAGEVKNDESKSSRGTKAAPNGVSRWKSILKTIAEQVSQVPISLSIRVSSLRGTLRVHMKPPPSDQLWFGFTSMPDIEFDLASSVGEHKITNSHVAMFLINRFKTAIREAVVLPNCESLTIPWMIAEKDDWVQRKAAPFMWLNQENDHNTSHATEARSKSDKPPTSFSCLQAEQMQRTANATQKIISEIGTLASSSCAQSEQVQKAATAFQKQNTEAEAIMSTPLSNSTTVTIENDKSLEELKTPLLVPSSSNKQETNSRGSSREVSAVQSPSRSVASSEEDDSRGKKQGRRARMLDLGKKMGEKLEEKRRHMEEKSRQIVEKMRGPS

SEQ ID NO: 48116 - protein, 713 aa, Arabidopsis thaliana
  peptide (1)..(713): Ceres Seq. ID no. 13649721
  misc_feature (425)..(710): Homolog of NCBI NO: 19112656 NR Description: hypothetical protein [Schizosaccharomyces pombe]
  misc_feature (249)..(507): Homolog of NCBI NO: 39596987 NR Description: Hypothetical protein CBG02527 [Caenorhabditis
  misc_feature (250)..(344): Homolog of NCBI NO: 34873954 NR Description: similar to putative protein of eukaryotic origin
  misc_feature (415)..(514): Homolog of NCBI NO: 34873954 NR Description: similar to putative protein of eukaryotic origin
  misc_feature (415)..(514): Homolog of NCBI NO: 38091890 NR Description: testis expressed gene 2 [Mus musculus]
  misc_feature (210)..(344): Homolog of NCBI NO: 38091890 NR Description: testis expressed gene 2 [Mus musculus]
  misc_feature (415)..(514): Homolog of NCBI NO: 34783705 NR Description: Unknown (protein for MGC:62520) [Mus musculus]
  misc_feature (210)..(344): Homolog of NCBI NO: 34783705 NR Description: Unknown (protein for MGC:62520) [Mus musculus]
  misc_feature (585)..(712): Homolog of NCBI NO: 15219405 NR Description: hypothetical protein [Arabidopsis thaliana]
  misc_feature (1)..(646): Homolog of NCBI NO: 15219405 NR Description: hypothetical protein [Arabidopsis thaliana]
MKEKLPKEQKRKRGLLEIHPLRKFARIKDHKLILSDADSTQSETTVSLIGCSIEAVSGSDLPTRKWAKRFPIKVESKISPALYKGNQVFYIYLETSWEKESWCKALRLASCENQERFIWYSTKLKEDFRNYVTSLNVAYPSFMKPSLGFSFETLDKGNRTDGSSSKVRLFLKKFSRKRSNREDRKTYSHHGSSSGKCFPGKNNMTDDTDVPIFSRSVSHSSHISGVSHLSGVSDGDSEEKVDMDEGTLALNLLISRLFFDLKRKTGVKNSVQARIQRLLSNMRTPSYIGELICSDVDTGNLPPHIHATRVLPMEMSGVWAFELDIEYSGDVVIDVETRVDIREVDLQQGITDTRLQPRSSGVVPSNFAEGVEDFEKQLVFPVETVNAGEVKNDESKSSRGTKAAPNGVSRWKSILKTIAEQVSQVPISLSIRVSSLRGTLRVHMKPPPSDQLWFGFTSMPDIEFDLASSVGEHKITNSHVAMFLINRFKTAIREAVVLPNCESLTIPWMIAEKDDWVQRKAAPFMWLNQENDHNTSHATEARSKSDKPPTSFSCLQAEQMQRTANATQKIISEIGTLASSSCAQSEQVQKAATAFQKQNTEAEAIMSTPLSNSTTVTIENDKSLEELKTPLLVPSSSNKQETNSRGSSREVSAVQSPSRSVASSEEDDSRGKKQGRRARMLDLGKKMGEKLEEKRRHMEEKSRQIVEKMRGPS

SEQ ID NO: 48117 - DNA, 2152 bp, Arabidopsis thaliana; identical to SEQ ID NO: 45499
  misc_feature (1)..(2152): Ceres Seq. ID no. 13576317
  misc_feature: MA Experiment ID: 20000171 Result: Down-regulated in Transcription
  misc_feature: MA Experiment 20000171 PARAMETER Experiment Name: At_42deg_Heat_P Parameter: Age (day) Value: 14
  misc_feature: MA Experiment 20000171 PARAMETER Experiment Name: At_42deg_Heat_P Parameter: Organism Value: A. thaliana
  misc_feature: MA Experiment 20000171 PARAMETER Experiment Name: At_42deg_Heat_P Parameter: Plant Line Value: WS
  misc_feature: MA Experiment 20000171 PARAMETER Experiment Name: At_42deg_Heat_P Parameter: Temperature (deg C) Value: 42 vs. 22
  misc_feature: MA Experiment 20000171 PARAMETER Experiment Name: At_42deg_Heat_P Parameter: Timepoint (hr) Value: 1
  misc_feature: MA Experiment 20000171 PARAMETER Experiment Name: At_42deg_Heat_P Parameter: Tissue Value: Aerial
  misc_feature: MA Experiment ID: 20000173 Result: Down-regulated in Transcription
  misc_feature: MA Experiment 20000173 PARAMETER Experiment Name: At_42deg_Heat_P Parameter: Age (day) Value: 14
  misc_feature: MA Experiment 20000173 PARAMETER Experiment Name: At_42deg_Heat_P Parameter: Organism Value: A. thaliana
  misc_feature: MA Experiment 20000173 PARAMETER Experiment Name: At_42deg_Heat_P Parameter: Plant Line Value: WS
  misc_feature: MA Experiment 20000173 PARAMETER Experiment Name: At_42deg_Heat_P Parameter: Temperature (deg C) Value: 42 vs. 22
  misc_feature: MA Experiment 20000173 PARAMETER Experiment Name: At_42deg_Heat_P Parameter: Timepoint (hr) Value: 6
  misc_feature: MA Experiment 20000173 PARAMETER Experiment Name: At_42deg_Heat_P Parameter: Tissue Value: Aerial
  misc_feature: MA Experiment ID: 20000179 Result: Down-regulated in Transcription
  misc_feature: MA Experiment 20000179 PARAMETER Experiment Name: At_Germinating_Seeds_P Parameter: Age (hr) Value: 6 vs. 0
  misc_feature: MA Experiment 20000179 PARAMETER Experiment Name: At_Germinating_Seeds_P Parameter: Tissue Value: Germinating Seeds
  misc_feature: MA Experiment ID: 20000180 Result: Down-regulated in Transcription
  misc_feature: MA Experiment 20000180 PARAMETER Experiment Name: At_Germinating_Seeds_P Parameter: Age (hr) Value: 24 vs. 0
  misc_feature: MA Experiment 20000180 PARAMETER Experiment Name: At_Germinating_Seeds_P Parameter: Tissue Value: Germinating Seeds
  misc_feature: MA Experiment ID: 20000234 Result: Up-regulated in Transcription
  misc_feature: MA Experiment 20000234 PARAMETER Experiment Name: At_Siliques_P Parameter: Age (day) Value: 21
  misc_feature: MA Experiment 20000234 PARAMETER Experiment Name: At_Siliques_P Parameter: Organism Value: A. thaliana
  misc_feature: MA Experiment 20000234 PARAMETER Experiment Name: At_Siliques_P Parameter: Plant Line Value: WS
  misc_feature: MA Experiment 20000234 PARAMETER Experiment Name: At_Siliques_P Parameter: Tissue Value: Less Than 5mm Siliques vs. Whole Plant
  misc_feature: MA Experiment ID: 20000235 Result: Up-regulated in Transcription
  misc_feature: MA Experiment 20000235 PARAMETER Experiment Name: At_Siliques_P Parameter: Age (day) Value: 21
  misc_feature: MA Experiment 20000235 PARAMETER Experiment Name: At_Siliques_P Parameter: Organism Value: A. thaliana
  misc_feature: MA Experiment 20000235 PARAMETER Experiment Name: At_Siliques_P Parameter: Plant Line Value: WS
  misc_feature: MA Experiment 20000235 PARAMETER Experiment Name: At_Siliques_P Parameter: Tissue Value: 5-10mm Siliques vs. Whole Plant
  misc_feature: MA Experiment ID: 20000265 Result: Down-regulated in Transcription
  misc_feature: MA Experiment 20000265 PARAMETER Experiment Name: At_Open_Flower_P Parameter: Age (day) Value: 21
  misc_feature: MA Experiment 20000265 PARAMETER Experiment Name: At_Open_Flower_P Parameter: Plant Line Value: WS
  misc_feature: MA Experiment 20000265 PARAMETER Experiment Name: At_Open_Flower_P Parameter: Tissue Value: Closed Flower vs. Whole Plant
  misc_feature: MA Experiment ID: 20000439 Result: Down-regulated in Transcription
  misc_feature: MA Experiment 20000439 PARAMETER Experiment Name: At_Roots__P Parameter: Age (day) Value: 14 vs. 21
  misc_feature: MA Experiment 20000439 PARAMETER Experiment Name: At_Roots__P Parameter: Organism Value: A. thaliana
  misc_feature: MA Experiment 20000439 PARAMETER Experiment Name: At_Roots__P Parameter: Tissue Value: Roots vs. Whole Plant
  misc_feature: MA Experiment ID: 20000709 Result: Up-regulated in Transcription
  misc_feature: MA Experiment 20000709 PARAMETER Experiment Name: At_15mM_NH4NO3_L-to-H_P Parameter: Age (hr) Value: 14
  misc_feature: MA Experiment 20000709 PARAMETER Experiment Name: At_15mM_NH4NO3_L-to-H_P Parameter: Organism Value: A. thaliana
  misc_feature: MA Experiment 20000709 PARAMETER Experiment Name: At_15mM_NH4NO3_L-to-H_P Parameter: Plant Line Value: WS
  misc_feature: MA Experiment 20000709 PARAMETER Experiment Name: At_15mM_NH4NO3_L-to-H_P Parameter: Timepoint (hr) Value: 4
  misc_feature: MA Experiment 20000709 PARAMETER Experiment Name: At_15mM_NH4NO3_L-to-H_P Parameter: Tissue Value: Aerial
  misc_feature: MA Experiment 20000709 PARAMETER Experiment Name: At_15mM_NH4NO3_L-to-H_P Parameter: Treatment Value: 15mM NH4NO3 vs. 30mM Mannitol
  misc_feature: MA Experiment ID: 20001451 Result: Up-regulated in Transcription
  misc_feature: MA Experiment 20001451 PARAMETER Experiment Name: At_Far-red-induction_P Parameter: Age (day) Value: 7
  misc_feature: MA Experiment 20001451 PARAMETER Experiment Name: At_Far-red-induction_P Parameter: Light Value: Far-red vs. White
  misc_feature: MA Experiment 20001451 PARAMETER Experiment Name: At_Far-red-induction_P Parameter: Organism Value: A. thaliana
  misc_feature: MA Experiment 20001451 PARAMETER Experiment Name: At_Far-red-induction_P Parameter: Plant Line Value: Columbia
  misc_feature: MA Experiment 20001451 PARAMETER Experiment Name: At_Far-red-induction_P Parameter: Timepoint (hr) Value: 24
  misc_feature: MA Experiment 20001451 PARAMETER Experiment Name: At_Far-red-induction_P Parameter: Tissue Value: Whole Plant
  misc_feature: MA Experiment ID: 20001560 Result: Up-regulated in Transcription
  misc_feature: MA Experiment 20001560 PARAMETER Experiment Name: At_Drought_Soil_Dry_P Parameter: Age (day) Value: 28
  misc_feature: MA Experiment 20001560 PARAMETER Experiment Name: At_Drought_Soil_Dry_P Parameter: Organism Value: A. thaliana
  misc_feature: MA Experiment 20001560 PARAMETER Experiment Name: At_Drought_Soil_Dry_P Parameter: Plant Line Value: WS
  misc_feature: MA Experiment 20001560 PARAMETER Experiment Name: At_Drought_Soil_Dry_P Parameter: Post Timepoint (hr) Value: None
  misc_feature: MA Experiment 20001560 PARAMETER Experiment Name: At_Drought_Soil_Dry_P Parameter: Post-Treatment Value: None
  misc_feature: MA Experiment 20001560 PARAMETER Experiment Name: At_Drought_Soil_Dry_P Parameter: Timepoint (day) Value: 14
  misc_feature: MA Experiment 20001560 PARAMETER Experiment Name: At_Drought_Soil_Dry_P Parameter: Treatment Value: Drought vs. No Drought

SEQ ID NO: 48118 - protein, 633 aa, Arabidopsis thaliana; identical to SEQ ID NO: 45500
  peptide (1)..(633): Ceres Seq. ID no. 13576318
  misc_feature (105)..(619): Pfam Name: Putative methyltransferase Pfam Description: Putative methyltransferase
  misc_feature (105)..(619): Pfam Name: Putative methyltransferase Pfam Description: Putative methyltransferase
  misc_feature (105)..(619): Pfam Name: Putative methyltransferase Pfam Description: Putative methyltransferase
  misc_feature (10)..(622): Homolog of NCBI NO: 18071395 NR Description: hypothetical protein [Oryza sativa]
  misc_feature (71)..(626): Homolog of NCBI NO: 9665165 NR Description: Unknown Protein [Arabidopsis thaliana]
  misc_feature (17)..(632): Homolog of NCBI NO: 15235080 NR Description: dehydration-induced protein family [Arabidopsis
  misc_feature (31)..(629): Homolog of NCBI NO: 24413975 NR Description: hypothetical protein~similar to Oryza sativa
  misc_feature (71)..(626): Homolog of NCBI NO: 18398763 NR Description: dehydration-induced protein family [Arabidopsis
  misc_feature (10)..(622): Homolog of NCBI NO: 18071395 NR Description: hypothetical protein [Oryza sativa]
  misc_feature (17)..(632): Homolog of NCBI NO: 15235080 NR Description: dehydration-induced protein family [Arabidopsis
  misc_feature (71)..(626): Homolog of NCBI NO: 18398763 NR Description: dehydration-induced protein family [Arabidopsis
  misc_feature (31)..(629): Homolog of NCBI NO: 24413975 NR Description: hypothetical protein~similar to Oryza sativa
  misc_feature (17)..(632): Homolog of NCBI NO: 15235080 NR Description: dehydration-induced protein family [Arabidopsis
  misc_feature (71)..(626): Homolog of NCBI NO: 9665165 NR Description: Unknown Protein [Arabidopsis thaliana]
  misc_feature (10)..(622): Homolog of NCBI NO: 18071395 NR Description: hypothetical protein [Oryza sativa]
  misc_feature (11)..(633): Homolog of NCBI NO: 15225560 NR Description: dehydration-induced protein family [Arabidopsis
  misc_feature (73)..(623): Homolog of NCBI NO: 38567915 NR Description: OSJNBa0088I22.11 [Oryza sativa (japonica
  misc_feature (8)..(69): Homolog of NCBI NO: 38567915 NR Description: OSJNBa0088I22.11 [Oryza sativa (japonica
  misc_feature (15)..(624): Homolog of NCBI NO: 34898042 NR Description: OSJNBa0038F22.19 [Oryza sativa (japonica
  misc_feature (9)..(629): Homolog of NCBI NO: 37535962 NR Description: unknown protein [Oryza sativa (japonica
  misc_feature (11)..(633): Homolog of NCBI NO: 15225560 NR Description: dehydration-induced protein family [Arabidopsis
  misc_feature (73)..(623): Homolog of NCBI NO: 38567915 NR Description: OSJNBa0088I22.11 [Oryza sativa (japonica
  misc_feature (8)..(69): Homolog of NCBI NO: 38567915 NR Description: OSJNBa0088I22.11 [Oryza sativa (japonica
  misc_feature (15)..(624): Homolog of NCBI NO: 34898042 NR Description: OSJNBa0038F22.19 [Oryza sativa (japonica
  misc_feature (9)..(629): Homolog of NCBI NO: 37535962 NR Description: unknown protein [Oryza sativa (japonica
  misc_feature (71)..(626): Homolog of NCBI NO: 18398763 NR Description: dehydration-induced protein family [Arabidopsis
  misc_feature (31)..(629): Homolog of NCBI NO: 24413975 NR Description: hypothetical protein~similar to Oryza sativa
  misc_feature (71)..(626): Homolog of NCBI NO: 9665165 NR Description: Unknown Protein [Arabidopsis thaliana]
  misc_feature (9)..(629): Homolog of NCBI NO: 37535962 NR Description: unknown protein [Oryza sativa (japonica
  misc_feature (15)..(624): Homolog of NCBI NO: 34898042 NR Description: OSJNBa0038F22.19 [Oryza sativa (japonica
  misc_feature (8)..(69): Homolog of NCBI NO: 38567915 NR Description: OSJNBa0088I22.11 [Oryza sativa (japonica
  misc_feature (73)..(623): Homolog of NCBI NO: 38567915 NR Description: OSJNBa0088I22.11 [Oryza sativa (japonica
  misc_feature (11)..(633): Homolog of NCBI NO: 15225560 NR Description: dehydration-induced protein family [Arabidopsis

SEQ ID NO: 48119 - protein, 439 aa, Arabidopsis thaliana; identical to SEQ ID NO: 45501
  peptide (1)..(439): Ceres Seq. ID no. 13576319
  misc_feature (1)..(425): Pfam Name: Putative methyltransferase Pfam Description: Putative methyltransferase
  misc_feature (1)..(425): Pfam Name: Putative methyltransferase Pfam Description: Putative methyltransferase
  misc_feature (1)..(425): Pfam Name: Putative methyltransferase Pfam Description: Putative methyltransferase
  misc_feature (1)..(428): Homolog of NCBI NO: 18396075 NR Description: dehydration-induced protein family [Arabidopsis
  misc_feature (1)..(428): Homolog of NCBI NO: 18071395 NR Description: hypothetical protein [Oryza sativa]
  misc_feature (1)..(432): Homolog of NCBI NO: 9665165 NR Description: Unknown Protein [Arabidopsis thaliana]
  misc_feature (1)..(438): Homolog of NCBI NO: 15235080 NR Description: dehydration-induced protein family [Arabidopsis
  misc_feature (1)..(435): Homolog of NCBI NO: 24413975 NR Description: hypothetical protein~similar to Oryza sativa
  misc_feature (1)..(428): Homolog of NCBI NO: 18396075 NR Description: dehydration-induced protein family [Arabidopsis
  misc_feature (1)..(432): Homolog of NCBI NO: 9665165 NR Description: Unknown Protein [Arabidopsis thaliana]
  misc_feature (1)..(435): Homolog of NCBI NO: 24413975 NR Description: hypothetical protein~similar to Oryza sativa
  misc_feature (1)..(438): Homolog of NCBI NO: 15235080 NR Description: dehydration-induced protein family [Arabidopsis
  misc_feature (1)..(432): Homolog of NCBI NO: 9665165 NR Description: Unknown Protein [Arabidopsis thaliana]
  misc_feature (1)..(428): Homolog of NCBI NO: 18071395 NR Description: hypothetical protein [Oryza sativa]
  misc_feature (1)..(428): Homolog of NCBI NO: 18396075 NR Description: dehydration-induced protein family [Arabidopsis
  misc_feature (1)..(439): Homolog of NCBI NO: 15225560 NR Description: dehydration-induced protein family [Arabidopsis
  misc_feature (1)..(429): Homolog of NCBI NO: 38567915 NR Description: OSJNBa0088I22.11 [Oryza sativa (japonica
  misc_feature (1)..(430): Homolog of NCBI NO: 34898042 NR Description: OSJNBa0038F22.19 [Oryza sativa (japonica
  misc_feature (1)..(435): Homolog of NCBI NO: 37535962 NR Description: unknown protein [Oryza sativa (japonica
  misc_feature (1)..(432): Homolog of NCBI NO: 18398763 NR Description: dehydration-induced protein family [Arabidopsis
  misc_feature (1)..(439): Homolog of NCBI NO: 15225560 NR Description: dehydration-induced protein family [Arabidopsis
  misc_feature (1)..(429): Homolog of NCBI NO: 38567915 NR Description: OSJNBa0088I22.11 [Oryza sativa (japonica
  misc_feature (1)..(430): Homolog of NCBI NO: 34898042 NR Description: OSJNBa0038F22.19 [Oryza sativa (japonica
  misc_feature (1)..(435): Homolog of NCBI NO: 37535962 NR Description: unknown protein [Oryza sativa (japonica
  misc_feature (1)..(432): Homolog of NCBI NO: 18398763 NR Description: dehydration-induced protein family [Arabidopsis
  misc_feature (1)..(435): Homolog of NCBI NO: 24413975 NR Description: hypothetical protein~similar to Oryza sativa
  misc_feature (1)..(438): Homolog of NCBI NO: 15235080 NR Description: dehydration-induced protein family [Arabidopsis
  misc_feature (1)..(428): Homolog of NCBI NO: 18071395 NR Description: hypothetical protein [Oryza sativa]
  misc_feature (1)..(432): Homolog of NCBI NO: 18398763 NR Description: dehydration-induced protein family [Arabidopsis
  misc_feature (1)..(435): Homolog of NCBI NO: 37535962 NR Description: unknown protein [Oryza sativa (japonica
  misc_feature (1)..(430): Homolog of NCBI NO: 34898042 NR Description: OSJNBa0038F22.19 [Oryza sativa (japonica
  misc_feature (1)..(429): Homolog of NCBI NO: 38567915 NR Description: OSJNBa0088I22.11 [Oryza sativa (japonica
  misc_feature (1)..(439): Homolog of NCBI NO: 15225560 NR Description: dehydration-induced protein family [Arabidopsis

SEQ ID NO: 48120 - protein, 398 aa, Arabidopsis thaliana; identical to SEQ ID NO: 45502
  peptide (1)..(398): Ceres Seq. ID no. 13576320
  misc_feature (1)..(384): Pfam Name: Putative methyltransferase Pfam Description: Putative methyltransferase
  misc_feature (1)..(384): Pfam Name: Putative methyltransferase Pfam Description: Putative methyltransferase
  misc_feature (1)..(384): Pfam Name: Putative methyltransferase Pfam Description: Putative methyltransferase
  misc_feature (1)..(387): Homolog of NCBI NO: 18396075 NR Description: dehydration-induced protein family [Arabidopsis
  misc_feature (1)..(387): Homolog of NCBI NO: 18071395 NR Description: hypothetical protein [Oryza sativa]
  misc_feature (1)..(391): Homolog of NCBI NO: 9665165 NR Description: Unknown Protein [Arabidopsis thaliana]
  misc_feature (1)..(397): Homolog of NCBI NO: 15235080 NR Description: dehydration-induced protein family [Arabidopsis
  misc_feature (1)..(394): Homolog of NCBI NO: 24413975 NR Description: hypothetical protein~similar to Oryza sativa
  misc_feature (1)..(387): Homolog of NCBI NO: 18396075 NR Description: dehydration-induced protein family [Arabidopsis
  misc_feature (1)..(391): Homolog of NCBI NO: 9665165 NR Description: Unknown Protein [Arabidopsis thaliana]
  misc_feature (1)..(394): Homolog of NCBI NO: 24413975 NR Description: hypothetical protein~similar to Oryza sativa
  misc_feature (1)..(397): Homolog of NCBI NO: 15235080 NR Description: dehydration-induced protein family [Arabidopsis
  misc_feature (1)..(391): Homolog of NCBI NO: 9665165 NR Description: Unknown Protein [Arabidopsis thaliana]
  misc_feature (1)..(387): Homolog of NCBI NO: 18071395 NR Description: hypothetical protein [Oryza sativa]
  misc_feature (1)..(387): Homolog of NCBI NO: 18396075 NR Description: dehydration-induced protein family [Arabidopsis
  misc_feature (1)..(398): Homolog of NCBI NO: 15225560 NR Description: dehydration-induced protein family [Arabidopsis
  misc_feature (1)..(388): Homolog of NCBI NO: 38567915 NR Description: OSJNBa0088I22.11 [Oryza sativa (japonica
  misc_feature (1)..(389): Homolog of NCBI NO: 34898042 NR Description: OSJNBa0038F22.19 [Oryza sativa (japonica
  misc_feature (1)..(394): Homolog of NCBI NO: 37535962 NR Description: unknown protein [Oryza sativa (japonica
  misc_feature (1)..(391): Homolog of NCBI NO: 18398763 NR Description: dehydration-induced protein family [Arabidopsis
  misc_feature (1)..(398): Homolog of NCBI NO: 15225560 NR Description: dehydration-induced protein family [Arabidopsis
  misc_feature (1)..(388): Homolog of NCBI NO: 38567915 NR Description: OSJNBa0088I22.11 [Oryza sativa (japonica
  misc_feature (1)..(389): Homolog of NCBI NO: 34898042 NR Description: OSJNBa0038F22.19 [Oryza sativa (japonica
  misc_feature (1)..(394): Homolog of NCBI NO: 37535962 NR Description: unknown protein [Oryza sativa (japonica
  misc_feature (1)..(391): Homolog of NCBI NO: 18398763 NR Description: dehydration-induced protein family [Arabidopsis
  misc_feature (1)..(394): Homolog of NCBI NO: 24413975 NR Description: hypothetical protein~similar to Oryza sativa
  misc_feature (1)..(397): Homolog of NCBI NO: 15235080 NR Description: dehydration-induced protein family [Arabidopsis
  misc_feature (1)..(387): Homolog of NCBI NO: 18071395 NR Description: hypothetical protein [Oryza sativa]
  misc_feature (1)..(391): Homolog of NCBI NO: 18398763 NR Description: dehydration-induced protein family [Arabidopsis
  misc_feature (1)..(394): Homolog of NCBI NO: 37535962 NR Description: unknown protein [Oryza sativa (japonica
  misc_feature (1)..(389): Homolog of NCBI NO: 34898042 NR Description: OSJNBa0038F22.19 [Oryza sativa (japonica
  misc_feature (1)..(388): Homolog of NCBI NO: 38567915 NR Description: OSJNBa0088I22.11 [Oryza sativa (japonica
  misc_feature (1)..(398): Homolog of NCBI NO: 15225560 NR Description: dehydration-induced protein family [Arabidopsis

SEQ ID NO: 48121 - DNA, 1784 bp, Arabidopsis thaliana
  misc_feature (1)..(1784): Ceres Seq. ID no. 13649106
  misc_feature: MA Experiment ID: 20000286 Result: Up-regulated in Transcription
  misc_feature: MA Experiment 20000286 PARAMETER Experiment Name: At_Open_Flower_P Parameter: Age (day) Value: 21
  misc_feature: MA Experiment 20000286 PARAMETER Experiment Name: At_Open_Flower_P Parameter: Plant Line Value: WS
  misc_feature: MA Experiment 20000286 PARAMETER Experiment Name: At_Open_Flower_P Parameter: Tissue Value: Half Open vs. Whole Plant
  misc_feature: MA Experiment ID: 20001247 Result: Down-regulated in Transcription
  misc_feature: MA Experiment 20001247 PARAMETER Experiment Name: At_Far-red-induction_P Parameter: Age (day) Value: 7
  misc_feature: MA Experiment 20001247 PARAMETER Experiment Name: At_Far-red-induction_P Parameter: Light Value: Far-red vs. White
  misc_feature: MA Experiment 20001247 PARAMETER Experiment Name: At_Far-red-induction_P Parameter: Organism Value: A. thaliana
  misc_feature: MA Experiment 20001247 PARAMETER Experiment Name: At_Far-red-induction_P Parameter: Plant Line Value: Columbia
  misc_feature: MA Experiment 20001247 PARAMETER Experiment Name: At_Far-red-induction_P Parameter: Timepoint (hr) Value: 1
  misc_feature: MA Experiment 20001247 PARAMETER Experiment Name: At_Far-red-induction_P Parameter: Tissue Value: Whole Plant
  misc_feature: MA Experiment ID: 20001558 Result: Up-regulated in Transcription
  misc_feature: MA Experiment 20001558 PARAMETER Experiment Name: At_Drought_Soil_Dry_P Parameter: Age (day) Value: 27
  misc_feature: MA Experiment 20001558 PARAMETER Experiment Name: At_Drought_Soil_Dry_P Parameter: Organism Value: A. thaliana
  misc_feature: MA Experiment 20001558 PARAMETER Experiment Name: At_Drought_Soil_Dry_P Parameter: Plant Line Value: WS
  misc_feature: MA Experiment 20001558 PARAMETER Experiment Name: At_Drought_Soil_Dry_P Parameter: Post Timepoint (hr) Value: 6
  misc_feature: MA Experiment 20001558 PARAMETER Experiment Name: At_Drought_Soil_Dry_P Parameter: Post-Treatment Value: Re-Water vs. No Drought
  misc_feature: MA Experiment 20001558 PARAMETER Experiment Name: At_Drought_Soil_Dry_P Parameter: Timepoint (day) Value: 13
  misc_feature: MA Experiment 20001558 PARAMETER Experiment Name: At_Drought_Soil_Dry_P Parameter: Treatment Value: Drought vs. No Drought
  misc_feature: MA Experiment ID: 20001757 Result: Up-regulated in Transcription
  misc_feature: MA Experiment 20001757 PARAMETER Experiment Name: At_50mM_NH4NO3_L-to-H_P Parameter: Timepoint (hr) Value: 6
  misc_feature: MA Experiment 20001757 PARAMETER Experiment Name: At_50mM_NH4NO3_L-to-H_P Parameter: Tissue Value: Leaf
  misc_feature: MA Experiment 20001757 PARAMETER Experiment Name: At_50mM_NH4NO3_L-to-H_P Parameter: Treatment Value: 50mM NH4NO3 vs 100mM Mannitol
aaaaataaaaatcaaaacccttcgataaacctcccggaggagaggagacacccgaaatgttcgccgtatcaccgtcgtcattctcgccgacaaccatttctccgcgccgtagtggacagaggaacgaacctcgaaaattctcggtggtgagagctggagctaagagaatactatacggtaaagatagcagagagaaactccaagccggaatcgataagttagctgatgctgtttccatcaccttaggccctagagggcgtaatgtagtgcttgctgaaaaagatacaatcaaagtgattaacgatggtgtcaccattgctaaatctattgagcttcctgacactattgagaacgctggagcaacattaatccaagaggttgcgattaaaatgaacgaatcagcgggtgacgggacaaccactgcaatcattttggctagagaaatgatcaaagctggttctttggctattgcttttggagctaatgctgtttctgtgaagaatggaatgaataagactgttaaagagttggtcagggtgttgcagatgaaaagtattcctgttcaagggaagaatgatattaaagctgtggcttcaatctctgctggtaacgatgaatttgtggggaatttgattgctgagactgtggaaaagattggccctgatggtgtcatctccattgaatcatcttccacttcagaaacgtctgttatagttgaggaaggaatgaagtttgacaagggctatatgtcgcctcatttcatcacaaatcaggagaaatctacggtggaattcgacaaagctaaaattcttgtgacggatcagaaaatcacttcagccaaagaattagttccgttactggagaaaacctcacaactgagtgttccgctccttataattgcagaagatatctctgcggaagtgcttgagatactggtggtgaacaagaagcaaggtttgatcaatgtcgcagttgtgaaatgtccaggaatgttggatgggaaaaaggctttgctacaagacattgcactcatgacaggagctgattatctttccggagatttaggcatgtcgctcatgggtgcaacttcagatcagctgggtgtttctcgtagagtagtaattacagctaattcaacaactatagtcgcagacgcttctactaaaccagagattcaggcaagaattgctcagatgaagaaggatctagctgagacagataattcatatctttcaaaaaaaatagcagagagaattgctaagctcacaggaggcgtggctgtaataaaggttggaggccacactgaaacagaacttgaggacagaaaactaagaatagaggacgcgaagaatgctacatttgcagccatgagagaaggtatagttccaggtggtggtgctacttatatccatcttttagatgagataccgagaatcaagaagaatctaatggaagattcatacgaacaaataggtgcagatattgtagcaatggcactcactgcacctgcaatggccatagcaaccaatgctggggttgatggatcagttgtggtgcagaaaaccagagaactcgaatggagaagtggttacaacgcaatgtctggaaagtatgaggatcttctaaacgctggaatcgcagatccttgtcgggtttcaagattcgcccttcaaaacgcagtttccgttgccggcattattctcacaactcaagcagtactcgtggagaagatcaagcaacctaaacctgctgttcctcaagttcctggcatacccacatcataa

SEQ ID NO: 48122 - protein, 575 aa, Arabidopsis thaliana
  peptide (1)..(575): Ceres Seq. ID no. 13649107
  misc_feature (55)..(558): Pfam Name: TCP-1/cpn60 chaperonin family Pfam Description: TCP-1/cpn60 chaperonin family
  misc_feature (3)..(567): Homolog of NCBI NO: 3790441 NR Description: chaperonin 60 alpha subunit [Canavalia lineata]
  misc_feature (17)..(572): Homolog of NCBI NO: 464727 NR Description: RuBisCO subunit binding-protein alpha subunit,
  misc_feature (26)..(567): Homolog of NCBI NO: 99801 NR Description: chaperonine 60K alpha chain - rape (fragment)
  misc_feature (17)..(572): Homolog of NCBI NO: 21554572 NR Description: putative rubisco subunit binding-protein alpha
  misc_feature (17)..(572): Homolog of NCBI NO: 15226314 NR Description: RuBisCO subunit binding-protein alpha subunit/60
  misc_feature (33)..(568): Homolog of NCBI NO: 134102 NR Description: RuBisCO subunit binding-protein alpha subunit,
  misc_feature (27)..(567): Homolog of NCBI NO: 1351030 NR Description: RuBisCO subunit binding-protein alpha subunit,
  misc_feature (5)..(570): Homolog of NCBI NO: 1710807 NR Description: RuBisCO subunit binding-protein alpha subunit,
  misc_feature (15)..(570): Homolog of NCBI NO: 31193919 NR Description: putative rubisco subunit binding-protein alpha
  misc_feature (1)..(575): Homolog of NCBI NO: 15239580 NR Description: chaperonin, putative [Arabidopsis thaliana]
MFAVSPSSFSPTTISPRRSGQRNEPRKFSVVRAGAKRILYGKDSREKLQAGIDKLADAVSITLGPRGRNVVLAEKDTIKVINDGVTIAKSIELPDTIENAGATLIQEVAIKMNESAGDGTTTAIILAREMIKAGSLAIAFGANAVSVKNGMNKTVKELVRVLQMKSIPVQGKNDIKAVASISAGNDEFVGNLIAETVEKIGPDGVISIESSSTSETSVIVEEGMKFDKGYMSPHFITNQEKSTVEFDKAKILVTDQKITSAKELVPLLEKTSQLSVPLLIIAEDISAEVLEILVVNKKQGLINVAVVKCPGMLDGKKALLQDIALMTGADYLSGDLGMSLMGATSDQLGVSRRVVITANSTTIVADASTKPEIQARIAQMKKDLAETDNSYLSKKIAERIAKLTGGVAVIKVGGHTETELEDRKLRIEDAKNATFAAMREGIVPGGGATYIHLLDEIPRIKKNLMEDSYEQIGADIVAMALTAPAMAIATNAGVDGSVVVQKTRELEWRSGYNAMSGKYEDLLNAGIADPCRVSRFALQNAVSVAGIILTTQAVLVEKIKQPKPAVPQVPGIPTS

SEQ ID NO: 48123 - protein, 464 aa, Arabidopsis thaliana
  peptide (1)..(464): Ceres Seq. ID no. 13649108
  misc_feature (1)..(447): Pfam Name: TCP-1/cpn60 chaperonin family Pfam Description: TCP-1/cpn60 chaperonin family
  misc_feature (1)..(456): Homolog of NCBI NO: 3790441 NR Description: chaperonin 60 alpha subunit [Canavalia lineata]
  misc_feature (1)..(461): Homolog of NCBI NO: 464727 NR Description: RuBisCO subunit binding-protein alpha subunit,
  misc_feature (1)..(456): Homolog of NCBI NO: 99801 NR Description: chaperonine 60K alpha chain - rape (fragment)
  misc_feature (1)..(461): Homolog of NCBI NO: 21554572 NR Description: putative rubisco subunit binding-protein alpha
  misc_feature (1)..(461): Homolog of NCBI NO: 15226314 NR Description: RuBisCO subunit binding-protein alpha subunit/60
  misc_feature (1)..(457): Homolog of NCBI NO: 134102 NR Description: RuBisCO subunit binding-protein alpha subunit,
  misc_feature (1)..(456): Homolog of NCBI NO: 1351030 NR Description: RuBisCO subunit binding-protein alpha subunit,
  misc_feature (1)..(459): Homolog of NCBI NO: 1710807 NR Description: RuBisCO subunit binding-protein alpha subunit,
  misc_feature (1)..(459): Homolog of NCBI NO: 31193919 NR Description: putative rubisco subunit binding-protein alpha
  misc_feature (1)..(464): Homolog of NCBI NO: 15239580 NR Description: chaperonin, putative [Arabidopsis thaliana]
MNESAGDGTTTAIILAREMIKAGSLAIAFGANAVSVKNGMNKTVKELVRVLQMKSIPVQGKNDIKAVASISAGNDEFVGNLIAETVEKIGPDGVISIESSSTSETSVIVEEGMKFDKGYMSPHFITNQEKSTVEFDKAKILVTDQKITSAKELVPLLEKTSQLSVPLLIIAEDISAEVLEILVVNKKQGLINVAVVKCPGMLDGKKALLQDIALMTGADYLSGDLGMSLMGATSDQLGVSRRVVITANSTTIVADASTKPEIQARIAQMKKDLAETDNSYLSKKIAERIAKLTGGVAVIKVGGHTETELEDRKLRIEDAKNATFAAMREGIVPGGGATYIHLLDEIPRIKKNLMEDSYEQIGADIVAMALTAPAMAIATNAGVDGSVVVQKTRELEWRSGYNAMSGKYEDLLNAGIADPCRVSRFALQNAVSVAGIILTTQAVLVEKIKQPKPAVPQVPGIPTS

SEQ ID NO: 48124 - protein, 446 aa, Arabidopsis thaliana
  peptide (1)..(446): Ceres Seq. ID no. 13649109
  misc_feature (1)..(429): Pfam Name: TCP-1/cpn60 chaperonin family Pfam Description: TCP-1/cpn60 chaperonin family
  misc_feature (1)..(438): Homolog of NCBI NO: 3790441 NR Description: chaperonin 60 alpha subunit [Canavalia lineata]
  misc_feature (1)..(443): Homolog of NCBI NO: 464727 NR Description: RuBisCO subunit binding-protein alpha subunit,
  misc_feature (1)..(438): Homolog of NCBI NO: 99801 NR Description: chaperonine 60K alpha chain - rape (fragment)
  misc_feature (1)..(443): Homolog of NCBI NO: 21554572 NR Description: putative rubisco subunit binding-protein alpha
  misc_feature (1)..(443): Homolog of NCBI NO: 15226314 NR Description: RuBisCO subunit binding-protein alpha subunit/60
  misc_feature (1)..(439): Homolog of NCBI NO: 134102 NR Description: RuBisCO subunit binding-protein alpha subunit,
  misc_feature (1)..(438): Homolog of NCBI NO: 1351030 NR Description: RuBisCO subunit binding-protein alpha subunit,
  misc_feature (1)..(441): Homolog of NCBI NO: 1710807 NR Description: RuBisCO subunit binding-protein alpha subunit,
  misc_feature (1)..(441): Homolog of NCBI NO: 31193919 NR Description: putative rubisco subunit binding-protein alpha
  misc_feature (1)..(446): Homolog of NCBI NO: 15239580 NR Description: chaperonin, putative [Arabidopsis thaliana]
MIKAGSLAIAFGANAVSVKNGMNKTVKELVRVLQMKSIPVQGKNDIKAVASISAGNDEFVGNLIAETVEKIGPDGVISIESSSTSETSVIVEEGMKFDKGYMSPHFITNQEKSTVEFDKAKILVTDQKITSAKELVPLLEKTSQLSVPLLIIAEDISAEVLEILVVNKKQGLINVAVVKCPGMLDGKKALLQDIALMTGADYLSGDLGMSLMGATSDQLGVSRRVVITANSTTIVADASTKPEIQARIAQMKKDLAETDNSYLSKKIAERIAKLTGGVAVIKVGGHTETELEDRKLRIEDAKNATFAAMREGIVPGGGATYIHLLDEIPRIKKNLMEDSYEQIGADIVAMALTAPAMAIATNAGVDGSVVVQKTRELEWRSGYNAMSGKYEDLLNAGIADPCRVSRFALQNAVSVAGIILTTQAVLVEKIKQPKPAVPQVPGIPTS

SEQ ID NO: 48125 - DNA, 1658 bp, Arabidopsis thaliana
  misc_feature (1)..(1658): Ceres Seq. ID no. 12720936
  misc_feature: MA Experiment ID: 20000451 Result: Down-regulated in Transcription
  misc_feature: MA Experiment 20000451 PARAMETER Experiment Name: At_CS6879_Shoots-Roots_P Parameter: Age (day) Value: 14
  misc_feature: MA Experiment 20000451 PARAMETER Experiment Name: At_CS6879_Shoots-Roots_P Parameter: Organism Value: A. thaliana
  misc_feature: MA Experiment 20000451 PARAMETER Experiment Name: At_CS6879_Shoots-Roots_P Parameter: Plant Line Value: CS6879 vs. WS
  misc_feature: MA Experiment 20000451 PARAMETER Experiment Name: At_CS6879_Shoots-Roots_P Parameter: Tissue Value: Roots
  misc_feature: MA Experiment ID: 20001558 Result: Down-regulated in Transcription
  misc_feature: MA Experiment 20001558 PARAMETER Experiment Name: At_Drought_Soil_Dry_P Parameter: Age (day) Value: 27
  misc_feature: MA Experiment 20001558 PARAMETER Experiment Name: At_Drought_Soil_Dry_P Parameter: Organism Value: A. thaliana
  misc_feature: MA Experiment 20001558 PARAMETER Experiment Name: At_Drought_Soil_Dry_P Parameter: Plant Line Value: WS
  misc_feature: MA Experiment 20001558 PARAMETER Experiment Name: At_Drought_Soil_Dry_P Parameter: Post Timepoint (hr) Value: 6
  misc_feature: MA Experiment 20001558 PARAMETER Experiment Name: At_Drought_Soil_Dry_P Parameter: Post-Treatment Value: Re-Water vs. No Drought
  misc_feature: MA Experiment 20001558 PARAMETER Experiment Name: At_Drought_Soil_Dry_P Parameter: Timepoint (day) Value: 13
  misc_feature: MA Experiment 20001558 PARAMETER Experiment Name: At_Drought_Soil_Dry_P Parameter: Treatment Value: Drought vs. No Drought
  misc_feature: MA Experiment ID: 20001757 Result: Down-regulated in Transcription
  misc_feature: MA Experiment 20001757 PARAMETER Experiment Name: At_50mM_NH4NO3_L-to-H_P Parameter: Timepoint (hr) Value: 6
  misc_feature: MA Experiment 20001757 PARAMETER Experiment Name: At_50mM_NH4NO3_L-to-H_P Parameter: Tissue Value: Leaf
  misc_feature: MA Experiment 20001757 PARAMETER Experiment Name: At_50mM_NH4NO3_L-to-H_P Parameter: Treatment Value: 50mM NH4NO3 vs 100mM Mannitol
aaatcaaggaaaaagggacaaacttcagaaaagcttatggatccgatggaatctttgcccgaagctgccgcacagatcgatctttgggatgatcttgcggcttcccttgtcaaaatctcgaaatcacatgcctttgtgccggaggagcagctattgaaatttgtcgattaccttgagataaaactttcctctgtgcaatatctatggctggacatgttcaaagggtctccttgccccaagctgatagatatgattgatgttccattatctcatattcctgtatctgtctacgacacatcagtcgagtggctcgacaaattttctattgggttactctgtgcctttgtagtgtggtcgttgaatcgtcttctcacgattttggaaccaccacaacagggaggtcaccagcgacgtactacttccaaatttcacgtagcagtatttgttgcactagcaatggtattgcgtaatgaacctaatactttggttattgtattgccgactctcaaggaagacgagtatcaaggacatgacaagcttccgattttagtttggatgatggctcaggcctcccaaggtgatttatctgtaggcttgtattcatggtcgtgtaacttgttaccagtattttaccaagaaaacttgttaccagtatcccgtagcaactctcagtcaatggatctcatcctgcagttggctgagatgattttgtctaatcttgatgctcggactatacttgtaaacggaaccgttatagataaacagcgactgatttcaccttatgcatttgagctcttgatgcggcttacattccctgcttcatctgaaagagtaaaggctacagagaggtttgaggcaatttatcccttgttgaaggaagtggctcttgcctgtgaaccaggaagcgagttaatgaaacaagtcactcaacaaatattccattattctttgataatagctggaagaagaaatcttgttttagccaaggaagctacagcaatcgctgtctggtctctgaccgaaaacgtagattgctgcaagcagtgggaaaaactctattgggagaataaagaagctagtgttgctgttcttaaaaagcttgtagatgaaaggggtgatatttccatcaaactagcatcatcaccgagtcataaattcacactcaatcaaactatggagagcatcaggctaaaaaacgaaaaagccatcactgaaggaggaaccattggttctcgttacaaagaagctgacaagtcctgcaaagtgatgtcgggtagattcttccctgaaaatgcctgcctcaaaggtacagccattattactgctgtggttctagctgctgtagctgtactagcttccaacctgtaggctgaagaagatggtggactcattggttctgcacctatacttcaatgcaaacacctcagctttgaagaactaagagagatataccattgtccttgctttccttttgctaggagtttgtgaatatattgagatatgtcgtcaatcttgttgttgggtattgttcactcaaatagacgtttgacaaaaaaaaagtatatttaggcgatagcttttcttttagctcgtgacttatgtggattttagttactctaaattatgtggtatttaactatttatagagtattcgtgtt

SEQ ID NO: 48126 - protein, 455 aa, Arabidopsis thaliana
  peptide (1)..(455): Ceres Seq. ID no. 12720937
  misc_feature (297)..(447): Homolog of NCBI NO: 25518112 NR Description: T26J12.6 protein - Arabidopsis thaliana
  misc_feature (87)..(294): Homolog of NCBI NO: 25518112 NR Description: T26J12.6 protein - Arabidopsis thaliana
  misc_feature (10)..(455): Homolog of NCBI NO: 34895518 NR Description: unnamed protein product [Oryza sativa (japonica
  misc_feature (87)..(447): Homolog of NCBI NO: 15220663 NR Description: unknown protein; protein id: At1g23170.1
  misc_feature (10)..(454): Homolog of NCBI NO: 15223242 NR Description: unknown protein; protein id: At1g70770.1
  misc_feature (13)..(455): Homolog of NCBI NO: 18399392 NR Description: expressed protein
  misc_feature (1)..(455): Homolog of NCBI NO: 6671944 NR Description: unknown protein [Arabidopsis thaliana]
KSRKKGQTSEKLMDPMESLPEAAAQIDLWDDLAASLVKISKSHAFVPEEQLLKFVDYLEIKLSSVQYLWLDMFKGSPCPKLIDMIDVPLSHIPVSVYDTSVEWLDKFSIGLLCAFVVWSLNRLLTILEPPQQGGHQRRTTSKFHVAVFVALAMVLRNEPNTLVIVLPTLKEDEYQGHDKLPILVWMMAQASQGDLSVGLYSWSCNLLPVFYQENLLPVSRSNSQSMDLILQLAEMILSNLDARTILVNGTVIDKQRLISPYAFELLMRLTFPASSERVKATERFEAIYPLLKEVALACEPGSELMKQVTQQIFHYSLIIAGRRNLVLAKEATAIAVWSLTENVDCCKQWEKLYWENKEASVAVLKKLVDERGDISIKLASSPSHKFTLNQTMESIRLKNEKAITEGGTIGSRYKEADKSCKVMSGRFFPENACLKGTAIITAVVLAAVAVLASNL

SEQ ID NO: 48127 - protein, 443 aa, Arabidopsis thaliana
  peptide (1)..(443): Ceres Seq. ID no. 12720938
  misc_feature (285)..(435): Homolog of NCBI NO: 25518112 NR Description: T26J12.6 protein - Arabidopsis thaliana
  misc_feature (75)..(282): Homolog of NCBI NO: 25518112 NR Description: T26J12.6 protein - Arabidopsis thaliana
  misc_feature (1)..(443): Homolog of NCBI NO: 34895518 NR Description: unnamed protein product [Oryza sativa (japonica
  misc_feature (75)..(435): Homolog of NCBI NO: 15220663 NR Description: unknown protein; protein id: At1g23170.1
  misc_feature (1)..(442): Homolog of NCBI NO: 15223242 NR Description: unknown protein; protein id: At1g70770.1
  misc_feature (1)..(443): Homolog of NCBI NO: 18399392 NR Description: expressed protein
  misc_feature (1)..(443): Homolog of NCBI NO: 6671944 NR Description: unknown protein [Arabidopsis thaliana]
MDPMESLPEAAAQIDLWDDLAASLVKISKSHAFVPEEQLLKFVDYLEIKLSSVQYLWLDMFKGSPCPKLIDMIDVPLSHIPVSVYDTSVEWLDKFSIGLLCAFVVWSLNRLLTILEPPQQGGHQRRTTSKFHVAVFVALAMVLRNEPNTLVIVLPTLKEDEYQGHDKLPILVWMMAQASQGDLSVGLYSWSCNLLPVFYQENLLPVSRSNSQSMDLILQLAEMILSNLDARTILVNGTVIDKQRLISPYAFELLMRLTFPASSERVKATERFEAIYPLLKEVALACEPGSELMKQVTQQIFHYSLIIAGRRNLVLAKEATAIAVWSLTENVDCCKQWEKLYWENKEASVAVLKKLVDERGDISIKLASSPSHKFTLNQTMESIRLKNEKAITEGGTIGSRYKEADKSCKVMSGRFFPENACLKGTAIITAVVLAAVAVLASNL

SEQ ID NO: 48128 - protein, 440 aa, Arabidopsis thaliana
  peptide (1)..(440): Ceres Seq. ID no. 12720939
  misc_feature (282)..(432): Homolog of NCBI NO: 25518112 NR Description: T26J12.6 protein - Arabidopsis thaliana
  misc_feature (72)..(279): Homolog of NCBI NO: 25518112 NR Description: T26J12.6 protein - Arabidopsis thaliana
  misc_feature (1)..(440): Homolog of NCBI NO: 34895518 NR Description: unnamed protein product [Oryza sativa (japonica
  misc_feature (72)..(432): Homolog of NCBI NO: 15220663 NR Description: unknown protein; protein id: At1g23170.1
  misc_feature (1)..(439): Homolog of NCBI NO: 15223242 NR Description: unknown protein; protein id: At1g70770.1
  misc_feature (1)..(440): Homolog of NCBI NO: 18399392 NR Description: expressed protein
  misc_feature (1)..(440): Homolog of NCBI NO: 6671944 NR Description: unknown protein [Arabidopsis thaliana]
MESLPEAAAQIDLWDDLAASLVKISKSHAFVPEEQLLKFVDYLEIKLSSVQYLWLDMFKGSPCPKLIDMIDVPLSHIPVSVYDTSVEWLDKFSIGLLCAFVVWSLNRLLTILEPPQQGGHQRRTTSKFHVAVFVALAMVLRNEPNTLVIVLPTLKEDEYQGHDKLPILVWMMAQASQGDLSVGLYSWSCNLLPVFYQENLLPVSRSNSQSMDLILQLAEMILSNLDARTILVNGTVIDKQRLISPYAFELLMRLTFPASSERVKATERFEAIYPLLKEVALACEPGSELMKQVTQQIFHYSLIIAGRRNLVLAKEATAIAVWSLTENVDCCKQWEKLYWENKEASVAVLKKLVDERGDISIKLASSPSHKFTLNQTMESIRLKNEKAITEGGTIGSRYKEADKSCKVMSGRFFPENACLKGTAIITAVVLAAVAVLASNL

SEQ ID NO: 48129 - DNA, 1884 bp, Arabidopsis thaliana
  misc_feature (1)..(1884): Ceres Seq. ID no. 13649756
  misc_feature: MA Experiment ID: 20000185 Result: Up-regulated in Transcription
  misc_feature: MA Experiment 20000185 PARAMETER Experiment Name: At_Roots__P Parameter: Age (day) Value: 7 vs. 21
  misc_feature: MA Experiment 20000185 PARAMETER Experiment Name: At_Roots__P Parameter: Organism Value: A. thaliana
  misc_feature: MA Experiment 20000185 PARAMETER Experiment Name: At_Roots__P Parameter: Tissue Value: Roots vs. Whole Plant
  misc_feature: MA Experiment ID: 20000227 Result: Down-regulated in Transcription
  misc_feature: MA Experiment 20000227 PARAMETER Experiment Name: At_Root-Tips-vs-Tops_P Parameter: Tissue Value: Root Tips vs. Root Tops
  misc_feature: MA Experiment ID: 20000439 Result: Up-regulated in Transcription
  misc_feature: MA Experiment 20000439 PARAMETER Experiment Name: At_Roots__P Parameter: Age (day) Value: 14 vs. 21
  misc_feature: MA Experiment 20000439 PARAMETER Experiment Name: At_Roots__P Parameter: Organism Value: A. thaliana
  misc_feature: MA Experiment 20000439 PARAMETER Experiment Name: At_Roots__P Parameter: Tissue Value: Roots vs. Whole Plant
atggcttctacttcaataatgctttcttccttcttctccttcttcttcttgactttttttgtcacttatgctcagcaaaacgtcaccgttcacacaatttgctactacgatggaggtaacttcacatccaacacttcatattcccttaatctcaaccgtctgatctcgtctttacctgatctaactccaaccatcaacggcttctacaatatctccatcaatggagaagtcaacgccatagctttatgcagaggagatgtcaagccaaatcaagattgcatcagttgcatcaccaccgccgcaaagcagctcgtagagagctgtccaaacatcatcgaagccaatatttggcttgagaaatgcatgtttcgttacacaagtcgaattatcttaggtcaaatggagccggttcctttttcttatacatcaagtaatgttagtgtgacagacaaggaaggtttcagcaagggtttaggtgacctattggattcattaggagcaaaaatcgatgctgcgaatgagaccaaagaggttaagtttgcagcaggagtgaaaggaacgatctacgcgttggctcagtgtacaccagatttgtctgaatcagattgtagaatctgtcttgctcagatctttgctggagttcccacttgttgtgatggaaagacaggtggatggtggactaatccaagttgctatttcaggtttgaagtgtatccgtttttcgatctttcagttacttcagaacagaagcaacctctttcttctcataataataacaccagaagaagtgatcaaggaaaaagtaaagaccggtctaaaactctcatctttgcggtggttcccattgtggcgatcatattaggtcttgtgtttctctttatctacttaaagaggaggaggaaaaagaagaccctgaaggaaaatgctgaaaatgaatttgagagtacagactcattgcattttgattttgagaccataagagtagcaacagatgatttttccttaacgaataagatcggtgaaggtggttttggcgttgtctacaagtctctcattcgatcttttctccttccgatgattagcttttctctgtttcatttctttcctctgctaatgaatctagatcctatcaagcagaagcaactagactgggaaaaacggtacaatatcatcgtaggagtttcccggggattgctttacctacacgaaggctcggagtttccgataatccaccgtgatctcaaatcctccaatgtgcttttagatgaacaaatgctacctaagatctcagattttggaatggcaagacaattcgatttcgataatactcaagcagtaacaagaagagttgttggaacttatggatatatggctccagagtatgcaatgcacggaagattctcagtgaaaacagatgtttatagctttggagttcttgtacttgagatcattacaggtaaaagaaacagtggattaggtcttggtgaaggaacagatctccccacatttgcttggcaaaattggattgaaggaacatcaatggaactaatagatcctgttcttctgcaaactcacgacaagaaagaatcaatgcaatgcttagaaattgctctgtcttgtgttcaagagaatcctacaaaaagaccaactatggattcagttgtttcaatgcttagctctgattctgagtctcgtcagcttccaaaaccatcgcagcctggtttcttcagaagatcagcgtcgttttcgatttctttaaatgatgtttctctcacagatttgtctgcacgttaggtttttgcagtcacacaatggaggaagatcaatttttaaaccctaaatttacttttataggaatggttatgtattctgctaaagtttaat

SEQ ID NO: 48130 - protein, 597 aa, Arabidopsis thaliana
  peptide (1)..(597): Ceres Seq. ID no. 13649757
  misc_feature (378)..(558): Pfam Name: Protein kinase domain Pfam Description: Protein kinase domain
  misc_feature (363)..(597): Homolog of NCBI NO: 18076589 NR Description: putative receptor-like serine-threonine protein
  misc_feature (39)..(354): Homolog of NCBI NO: 18076589 NR Description: putative receptor-like serine-threonine protein
  misc_feature (363)..(597): Homolog of NCBI NO: 18076585 NR Description: putative receptor-like serine-threonine protein
  misc_feature (39)..(354): Homolog of NCBI NO: 18076585 NR Description: putative receptor-like serine-threonine protein
  misc_feature (375)..(597): Homolog of NCBI NO: 22328852 NR Description: serine threonine kinase - like protein
  misc_feature (11)..(351): Homolog of NCBI NO: 22328852 NR Description: serine threonine kinase - like protein
  misc_feature (375)..(584): Homolog of NCBI NO: 4530126 NR Description: receptor-like protein kinase homolog RK20-1
  misc_feature (24)..(349): Homolog of NCBI NO: 4530126 NR Description: receptor-like protein kinase homolog RK20-1
  misc_feature (375)..(585): Homolog of NCBI NO: 15234824 NR Description: receptor-related protein kinase - like protein
  misc_feature (7)..(352): Homolog of NCBI NO: 15234824 NR Description: receptor-related protein kinase - like protein
MASTSIMLSSFFSFFFLTFFVTYAQQNVTVHTICYYDGGNFTSNTSYSLNLNRLISSLPDLTPTINGFYNISINGEVNAIALCRGDVKPNQDCISCITTAAKQLVESCPNIIEANIWLEKCMFRYTSRIILGQMEPVPFSYTSSNVSVTDKEGFSKGLGDLLDSLGAKIDAANETKEVKFAAGVKGTIYALAQCTPDLSESDCRICLAQIFAGVPTCCDGKTGGWWTNPSCYFRFEVYPFFDLSVTSEQKQPLSSHNNNTRRSDQGKSKDRSKTLIFAVVPIVAIILGLVFLFIYLKRRRKKKTLKENAENEFESTDSLHFDFETIRVATDDFSLTNKIGEGGFGVVYKSLIRSFLLPMISFSLFHFFPLLMNLDPIKQKQLDWEKRYNIIVGVSRGLLYLHEGSEFPIIHRDLKSSNVLLDEQMLPKISDFGMARQFDFDNTQAVTRRVVGTYGYMAPEYAMHGRFSVKTDVYSFGVLVLEIITGKRNSGLGLGEGTDLPTFAWQNWIEGTSMELIDPVLLQTHDKKESMQCLEIALSCVQENPTKRPTMDSVVSMLSSDSESRQLPKPSQPGFFRRSASFSISLNDVSLTDLSAR

SEQ ID NO: 48131 - protein, 591 aa, Arabidopsis thaliana
  peptide (1)..(591): Ceres Seq. ID no. 13649758
  misc_feature (372)..(552): Pfam Name: Protein kinase domain Pfam Description: Protein kinase domain
  misc_feature (357)..(591): Homolog of NCBI NO: 18076589 NR Description: putative receptor-like serine-threonine protein
  misc_feature (33)..(348): Homolog of NCBI NO: 18076589 NR Description: putative receptor-like serine-threonine protein
  misc_feature (357)..(591): Homolog of NCBI NO: 18076585 NR Description: putative receptor-like serine-threonine protein
  misc_feature (33)..(348): Homolog of NCBI NO: 18076585 NR Description: putative receptor-like serine-threonine protein
  misc_feature (369)..(591): Homolog of NCBI NO: 22328852 NR Description: serine threonine kinase - like protein
  misc_feature (5)..(345): Homolog of NCBI NO: 22328852 NR Description: serine threonine kinase - like protein
  misc_feature (369)..(578): Homolog of NCBI NO: 4530126 NR Description: receptor-like protein kinase homolog RK20-1
  misc_feature (18)..(343): Homolog of NCBI NO: 4530126 NR Description: receptor-like protein kinase homolog RK20-1
  misc_feature (369)..(579): Homolog of NCBI NO: 15234824 NR Description: receptor-related protein kinase - like protein
  misc_feature (1)..(346): Homolog of NCBI NO: 15234824 NR Description: receptor-related protein kinase - like protein
MLSSFFSFFFLTFFVTYAQQNVTVHTICYYDGGNFTSNTSYSLNLNRLISSLPDLTPTINGFYNISINGEVNAIALCRGDVKPNQDCISCITTAAKQLVESCPNIIEANIWLEKCMFRYTSRIILGQMEPVPFSYTSSNVSVTDKEGFSKGLGDLLDSLGAKIDAANETKEVKFAAGVKGTIYALAQCTPDLSESDCRICLAQIFAGVPTCCDGKTGGWWTNPSCYFRFEVYPFFDLSVTSEQKQPLSSHNNNTRRSDQGKSKDRSKTLIFAVVPIVAIILGLVFLFIYLKRRRKKKTLKENAENEFESTDSLHFDFETIRVATDDFSLTNKIGEGGFGVVYKSLIRSFLLPMISFSLFHFFPLLMNLDPIKQKQLDWEKRYNIIVGVSRGLLYLHEGSEFPIIHRDLKSSNVLLDEQMLPKISDFGMARQFDFDNTQAVTRRVVGTYGYMAPEYAMHGRFSVKTDVYSFGVLVLEIITGKRNSGLGLGEGTDLPTFAWQNWIEGTSMELIDPVLLQTHDKKESMQCLEIALSCVQENPTKRPTMDSVVSMLSSDSESRQLPKPSQPGFFRRSASFSISLNDVSLTDLSAR

SEQ ID NO: 48132 - protein, 476 aa, Arabidopsis thaliana
  peptide (1)..(476): Ceres Seq. ID no. 13649759
  misc_feature (257)..(437): Pfam Name: Protein kinase domain Pfam Description: Protein kinase domain
  misc_feature (242)..(476): Homolog of NCBI NO: 18076589 NR Description: putative receptor-like serine-threonine protein
  misc_feature (1)..(233): Homolog of NCBI NO: 18076589 NR Description: putative receptor-like serine-threonine protein
  misc_feature (242)..(476): Homolog of NCBI NO: 18076585 NR Description: putative receptor-like serine-threonine protein
  misc_feature (1)..(233): Homolog of NCBI NO: 18076585 NR Description: putative receptor-like serine-threonine protein
  misc_feature (254)..(476): Homolog of NCBI NO: 22328852 NR Description: serine threonine kinase - like protein
  misc_feature (1)..(230): Homolog of NCBI NO: 22328852 NR Description: serine threonine kinase - like protein
  misc_feature (254)..(463): Homolog of NCBI NO: 4530126 NR Description: receptor-like protein kinase homolog RK20-1
  misc_feature (1)..(228): Homolog of NCBI NO: 4530126 NR Description: receptor-like protein kinase homolog RK20-1
  misc_feature (254)..(464): Homolog of NCBI NO: 15234824 NR Description: receptor-related protein kinase - like protein
  misc_feature (1)..(231): Homolog of NCBI NO: 15234824 NR Description: receptor-related protein kinase - like protein
MFRYTSRIILGQMEPVPFSYTSSNVSVTDKEGFSKGLGDLLDSLGAKIDAANETKEVKFAAGVKGTIYALAQCTPDLSESDCRICLAQIFAGVPTCCDGKTGGWWTNPSCYFRFEVYPFFDLSVTSEQKQPLSSHNNNTRRSDQGKSKDRSKTLIFAVVPIVAIILGLVFLFIYLKRRRKKKTLKENAENEFESTDSLHFDFETIRVATDDFSLTNKIGEGGFGVVYKSLIRSFLLPMISFSLFHFFPLLMNLDPIKQKQLDWEKRYNIIVGVSRGLLYLHEGSEFPIIHRDLKSSNVLLDEQMLPKISDFGMARQFDFDNTQAVTRRVVGTYGYMAPEYAMHGRFSVKTDVYSFGVLVLEIITGKRNSGLGLGEGTDLPTFAWQNWIEGTSMELIDPVLLQTHDKKESMQCLEIALSCVQENPTKRPTMDSVVSMLSSDSESRQLPKPSQPGFFRRSASFSISLNDVSLTDLSAR

SEQ ID NO: 48133 - DNA, 1400 bp, Arabidopsis thaliana
  misc_feature (1)..(1400): Ceres Seq. ID no. 13650057
  misc_feature: MA Experiment ID: 20000438 Result: Up-regulated in Transcription
  misc_feature: MA Experiment 20000438 PARAMETER Experiment Name: At_Shoots__P Parameter: Age (day) Value: 14
  misc_feature: MA Experiment 20000438 PARAMETER Experiment Name: At_Shoots__P Parameter: Tissue Value: Shoots vs. Whole Plant
  misc_feature: MA Experiment ID: 20000527 Result: Down-regulated in Transcription
  misc_feature: MA Experiment 20000527 PARAMETER Experiment Name: At_10percent_PEG_P Parameter: Age (day) Value: 20
  misc_feature: MA Experiment 20000527 PARAMETER Experiment Name: At_10percent_PEG_P Parameter: Organism Value: A. thaliana
  misc_feature: MA Experiment 20000527 PARAMETER Experiment Name: At_10percent_PEG_P Parameter: Plant Line Value: WS
  misc_feature: MA Experiment 20000527 PARAMETER Experiment Name: At_10percent_PEG_P Parameter: Timepoint (day) Value: 20
  misc_feature: MA Experiment 20000527 PARAMETER Experiment Name: At_10percent_PEG_P Parameter: Tissue Value: Whole Plant
  misc_feature: MA Experiment 20000527 PARAMETER Experiment Name: At_10percent_PEG_P Parameter: Treatment Value: 10percent PEG vs. No Treatment
  misc_feature: MA Experiment ID: 20000794 Result: Up-regulated in Transcription
  misc_feature: MA Experiment 20000794 PARAMETER Experiment Name: At_Petals_P Parameter: Age (day) Value: 23-25 days
  misc_feature: MA Experiment 20000794 PARAMETER Experiment Name: At_Petals_P Parameter: Plant Line Value: WS
  misc_feature: MA Experiment 20000794 PARAMETER Experiment Name: At_Petals_P Parameter: Tissue Value: Petals vs. Whole plant
  misc_feature: MA Experiment ID: 20001247 Result: Up-regulated in Transcription
  misc_feature: MA Experiment 20001247 PARAMETER Experiment Name: At_Far-red-induction_P Parameter: Age (day) Value: 7
  misc_feature: MA Experiment 20001247 PARAMETER Experiment Name: At_Far-red-induction_P Parameter: Light Value: Far-red vs. White
  misc_feature: MA Experiment 20001247 PARAMETER Experiment Name: At_Far-red-induction_P Parameter: Organism Value: A. thaliana
  misc_feature: MA Experiment 20001247 PARAMETER Experiment Name: At_Far-red-induction_P Parameter: Plant Line Value: Columbia
  misc_feature: MA Experiment 20001247 PARAMETER Experiment Name: At_Far-red-induction_P Parameter: Timepoint (hr) Value: 1
  misc_feature: MA Experiment 20001247 PARAMETER Experiment Name: At_Far-red-induction_P Parameter: Tissue Value: Whole Plant
  misc_feature: MA Experiment ID: 20001248 Result: Up-regulated in Transcription
  misc_feature: MA Experiment 20001248 PARAMETER Experiment Name: At_Far-red-induction_P Parameter: Age (day) Value: 7
  misc_feature: MA Experiment 20001248 PARAMETER Experiment Name: At_Far-red-induction_P Parameter: Light Value: Far-red vs. White
  misc_feature: MA Experiment 20001248 PARAMETER Experiment Name: At_Far-red-induction_P Parameter: Organism Value: A. thaliana
  misc_feature: MA Experiment 20001248 PARAMETER Experiment Name: At_Far-red-induction_P Parameter: Plant Line Value: Columbia
  misc_feature: MA Experiment 20001248 PARAMETER Experiment Name: At_Far-red-induction_P Parameter: Timepoint (hr) Value: 4
  misc_feature: MA Experiment 20001248 PARAMETER Experiment Name: At_Far-red-induction_P Parameter: Tissue Value: Whole Plant
  misc_feature: MA Experiment ID: 20001450 Result: Up-regulated in Transcription
  misc_feature: MA Experiment 20001450 PARAMETER Experiment Name: At_Far-red-induction_P Parameter: Age (day) Value: 7
  misc_feature: MA Experiment 20001450 PARAMETER Experiment Name: At_Far-red-induction_P Parameter: Light Value: Far-red vs. White
  misc_feature: MA Experiment 20001450 PARAMETER Experiment Name: At_Far-red-induction_P Parameter: Organism Value: A. thaliana
  misc_feature: MA Experiment 20001450 PARAMETER Experiment Name: At_Far-red-induction_P Parameter: Plant Line Value: Columbia
  misc_feature: MA Experiment 20001450 PARAMETER Experiment Name: At_Far-red-induction_P Parameter: Timepoint (hr) Value: 8
  misc_feature: MA Experiment 20001450 PARAMETER Experiment Name: At_Far-red-induction_P Parameter: Tissue Value: Whole Plant
  misc_feature: MA Experiment ID: 20001554 Result: Down-regulated in Transcription
  misc_feature: MA Experiment 20001554 PARAMETER Experiment Name: At_Drought_Soil_Dry_P Parameter: Age (day) Value: 21
  misc_feature: MA Experiment 20001554 PARAMETER Experiment Name: At_Drought_Soil_Dry_P Parameter: Organism Value: A. thaliana
  misc_feature: MA Experiment 20001554 PARAMETER Experiment Name: At_Drought_Soil_Dry_P Parameter: Plant Line Value: WS
  misc_feature: MA Experiment 20001554 PARAMETER Experiment Name: At_Drought_Soil_Dry_P Parameter: Post Timepoint (hr) Value: None
  misc_feature: MA Experiment 20001554 PARAMETER Experiment Name: At_Drought_Soil_Dry_P Parameter: Post-Treatment Value: None
  misc_feature: MA Experiment 20001554 PARAMETER Experiment Name: At_Drought_Soil_Dry_P Parameter: Timepoint (day) Value: 7
  misc_feature: MA Experiment 20001554 PARAMETER Experiment Name: At_Drought_Soil_Dry_P Parameter: Treatment Value: Drought vs. No Drought
  misc_feature: MA Experiment ID: 20001770 Result: Up-regulated in Transcription
  misc_feature: MA Experiment 20001770 PARAMETER Experiment Name: At_Far-red-enriched-adult_P Parameter: Age (day) Value: 28
  misc_feature: MA Experiment 20001770 PARAMETER Experiment Name: At_Far-red-enriched-adult_P Parameter: Light Value: Far-red enriched vs. White
  misc_feature: MA Experiment 20001770 PARAMETER Experiment Name: At_Far-red-enriched-adult_P Parameter: Organism Value: A. thaliana
  misc_feature: MA Experiment 20001770 PARAMETER Experiment Name: At_Far-red-enriched-adult_P Parameter: Plant Line Value: Columbia
  misc_feature: MA Experiment 20001770 PARAMETER Experiment Name: At_Far-red-enriched-adult_P Parameter: Timepoint (hr) Value: 8
  misc_feature: MA Experiment 20001770 PARAMETER Experiment Name: At_Far-red-enriched-adult_P Parameter: Tissue Value: Aerial
attccaaattcaaaaccatttccaatacaacttccattgattctctctctctctctctctactaaaactttcaaattctcttactttcaatacttattaaagaaacttataaaaaaagaatggagaatatgtttcgtttgatggatcaagatcaggatttaactaataaccggtgcatttgggtcaacggaccggtcatcgtcggagctggaccgtcggggttagcgacggcggcttgtctccatgaacaaaacgttcctttcgttgttctcgagagagcagattgtattgcttctctatggcaaaaacgtacttacgatcgtctcaagcttcaccttcctaagcagttttgtcaattaccgaaaatgcccttccctgaggacttcccggagtacccgacgaagcgtcagttcatcgactaccttgagtcttacgctacccggttcgagatcaaccctaagttcaacgagtgtgtgcagactgctcggttcgatgagaccagtggcttgtggcgagtcaagaccgtgtcgaagagtgagtcgactcagaccgaggtcgagtatatttgccggtggcttgtggtggctacgggagaaaatgcggagagagtgatgccggagattgatggtctttctgagttttccggtgaggtgattcacgcttgtgattacaagtccggcgagaaattcgccgggaaaaaagttctcgtcgttggttgtggaaactccggcatggaagtttctcttgacctagcaaaccatttcgctaagccttccatggtcgtgagaagctctcttcacgtgatgccgagggaagtaatgggtaaatcaacgtttgagcttgcaatgaagatgttaagatggtttcctctatggttagtcgacaagatattgttggttttaagttggatggttcttggaaacatcgagaaatacggtttgaaacgaccagagatgggtccaatggagctaaaaagcgtgaaaggcaagacaccggtgcttgacatcggagctatagagaagatccggttaggaaagatcaacgtggttccagggatcaaaaggtttaacggaaacaaagtcgaacttgtcaatggagaacaactagacgtagactcagttgttctagctactggttaccgcagcaacgtcccatattggctacaagagaatgagttctttgcaaagaatggtttcccaaagacagtagctgacaacaatggttggaaaggaaggacaggattgtatgcggttgggtttacgaggaaagggctctcaggtgcgtcaatggacgcggttaagatcgcacaagacataggctctgtttggcaacttgaaacaaaacaacccacgaaacgctcaaggggttctcttcgaaggtgtatctctcaacagttctaa

SEQ ID NO: 48134 - protein, 426 aa, Arabidopsis thaliana
  peptide (1)..(426): Ceres Seq. ID no. 13650058
  misc_feature (24)..(376): Pfam Name: Pyridine nucleotide-disulphide oxidoreductase Pfam Description: Pyridine nucleotide-disulphide oxidoreductase
  misc_feature (10)..(404): Homolog of NCBI NO: 15010541 NR Description: flavin monoxygenase-like protein floozy [Petunia
  misc_feature (1)..(404): Homolog of NCBI NO: 22327064 NR Description: flavin-containing monooxygenase (FMO), putative
  misc_feature (20)..(403): Homolog of NCBI NO: 15239020 NR Description: flavin-containing monooxygenase (FMO) family
  misc_feature (18)..(407): Homolog of NCBI NO: 33147034 NR Description: putative dimethylaniline monooxygenase
  misc_feature (9)..(426): Homolog of NCBI NO: 38346518 NR Description: OSJNBa0027H09.13 [Oryza sativa (japonica
  misc_feature (8)..(423): Homolog of NCBI NO: 15225816 NR Description: flavin-containing monooxygenase (FMO), putative
  misc_feature (3)..(423): Homolog of NCBI NO: 15219767 NR Description: flavin-containing monooxygenase (FMO/YUCCA3)
  misc_feature (1)..(423): Homolog of NCBI NO: 15219671 NR Description: flavin-containing monooxygenase (FMO) family
  misc_feature (1)..(423): Homolog of NCBI NO: 15240026 NR Description: flavin-containing monooxygenase (FMO) family
  misc_feature (1)..(426): Homolog of NCBI NO: 15235409 NR Description: flavin-containing monooxygenase (FMO) family
MENMFRLMDQDQDLTNNRCIWVNGPVIVGAGPSGLATAACLHEQNVPFVVLERADCIASLWQKRTYDRLKLHLPKQFCQLPKMPFPEDFPEYPTKRQFIDYLESYATRFEINPKFNECVQTARFDETSGLWRVKTVSKSESTQTEVEYICRWLVVATGENAERVMPEIDGLSEFSGEVIHACDYKSGEKFAGKKVLVVGCGNSGMEVSLDLANHFAKPSMVVRSSLHVMPREVMGKSTFELAMKMLRWFPLWLVDKILLVLSWMVLGNIEKYGLKRPEMGPMELKSVKGKTPVLDIGAIEKIRLGKINVVPGIKRFNGNKVELVNGEQLDVDSVVLATGYRSNVPYWLQENEFFAKNGFPKTVADNNGWKGRTGLYAVGFTRKGLSGASMDAVKIAQDIGSVWQLETKQPTKRSRGSLRRCISQQF

SEQ ID NO: 48135 - protein, 423 aa, Arabidopsis thaliana
  peptide (1)..(423): Ceres Seq. ID no. 13650059
  misc_feature (21)..(373): Pfam Name: Pyridine nucleotide-disulphide oxidoreductase Pfam Description: Pyridine nucleotide-disulphide oxidoreductase
  misc_feature (7)..(401): Homolog of NCBI NO: 15010541 NR Description: flavin monoxygenase-like protein floozy [Petunia
  misc_feature (1)..(401): Homolog of NCBI NO: 22327064 NR Description: flavin-containing monooxygenase (FMO), putative
  misc_feature (17)..(400): Homolog of NCBI NO: 15239020 NR Description: flavin-containing monooxygenase (FMO) family
  misc_feature (15)..(404): Homolog of NCBI NO: 33147034 NR Description: putative dimethylaniline monooxygenase
  misc_feature (6)..(423): Homolog of NCBI NO: 38346518 NR Description: OSJNBa0027H09.13 [Oryza sativa (japonica
  misc_feature (5)..(420): Homolog of NCBI NO: 15225816 NR Description: flavin-containing monooxygenase (FMO), putative
  misc_feature (1)..(420): Homolog of NCBI NO: 15219767 NR Description: flavin-containing monooxygenase (FMO/YUCCA3)
  misc_feature (1)..(420): Homolog of NCBI NO: 15219671 NR Description: flavin-containing monooxygenase (FMO) family
  misc_feature (1)..(420): Homolog of NCBI NO: 15240026 NR Description: flavin-containing monooxygenase (FMO) family
  misc_feature (1)..(423): Homolog of NCBI NO: 15235409 NR Description: flavin-containing monooxygenase (FMO) family
MFRLMDQDQDLTNNRCIWVNGPVIVGAGPSGLATAACLHEQNVPFVVLERADCIASLWQKRTYDRLKLHLPKQFCQLPKMPFPEDFPEYPTKRQFIDYLESYATRFEINPKFNECVQTARFDETSGLWRVKTVSKSESTQTEVEYICRWLVVATGENAERVMPEIDGLSEFSGEVIHACDYKSGEKFAGKKVLVVGCGNSGMEVSLDLANHFAKPSMVVRSSLHVMPREVMGKSTFELAMKMLRWFPLWLVDKILLVLSWMVLGNIEKYGLKRPEMGPMELKSVKGKTPVLDIGAIEKIRLGKINVVPGIKRFNGNKVELVNGEQLDVDSVVLATGYRSNVPYWLQENEFFAKNGFPKTVADNNGWKGRTGLYAVGFTRKGLSGASMDAVKIAQDIGSVWQLETKQPTKRSRGSLRRCISQQF

SEQ ID NO: 48136 - protein, 419 aa, Arabidopsis thaliana
  peptide (1)..(419): Ceres Seq. ID no. 13650060
  misc_feature (17)..(369): Pfam Name: Pyridine nucleotide-disulphide oxidoreductase Pfam Description: Pyridine nucleotide-disulphide oxidoreductase
  misc_feature (3)..(397): Homolog of NCBI NO: 15010541 NR Description: flavin monoxygenase-like protein floozy [Petunia
  misc_feature (1)..(397): Homolog of NCBI NO: 22327064 NR Description: flavin-containing monooxygenase (FMO), putative
  misc_feature (13)..(396): Homolog of NCBI NO: 15239020 NR Description: flavin-containing monooxygenase (FMO) family
  misc_feature (11)..(400): Homolog of NCBI NO: 33147034 NR Description: putative dimethylaniline monooxygenase
  misc_feature (2)..(419): Homolog of NCBI NO: 38346518 NR Description: OSJNBa0027H09.13 [Oryza sativa (japonica
  misc_feature (1)..(416): Homolog of NCBI NO: 15225816 NR Description: flavin-containing monooxygenase (FMO), putative
  misc_feature (1)..(416): Homolog of NCBI NO: 15219767 NR Description: flavin-containing monooxygenase (FMO/YUCCA3)
  misc_feature (1)..(416): Homolog of NCBI NO: 15219671 NR Description: flavin-containing monooxygenase (FMO) family
  misc_feature (1)..(416): Homolog of NCBI NO: 15240026 NR Description: flavin-containing monooxygenase (FMO) family
  misc_feature (1)..(419): Homolog of NCBI NO: 15235409 NR Description: flavin-containing monooxygenase (FMO) family
MDQDQDLTNNRCIWVNGPVIVGAGPSGLATAACLHEQNVPFVVLERADCIASLWQKRTYDRLKLHLPKQFCQLPKMPFPEDFPEYPTKRQFIDYLESYATRFEINPKFNECVQTARFDETSGLWRVKTVSKSESTQTEVEYICRWLVVATGENAERVMPEIDGLSEFSGEVIHACDYKSGEKFAGKKVLVVGCGNSGMEVSLDLANHFAKPSMVVRSSLHVMPREVMGKSTFELAMKMLRWFPLWLVDKILLVLSWMVLGNIEKYGLKRPEMGPMELKSVKGKTPVLDIGAIEKIRLGKINVVPGIKRFNGNKVELVNGEQLDVDSVVLATGYRSNVPYWLQENEFFAKNGFPKTVADNNGWKGRTGLYAVGFTRKGLSGASMDAVKIAQDIGSVWQLETKQPTKRSRGSLRRCISQQF

SEQ ID NO: 48137 - DNA, 1582 bp, Arabidopsis thaliana
  misc_feature (1)..(1582): Ceres Seq. ID no. 13649127
  misc_feature: MA Experiment ID: 20000265 Result: Up-regulated in Transcription
  misc_feature: MA Experiment 20000265 PARAMETER Experiment Name: At_Open_Flower_P Parameter: Age (day) Value: 21
  misc_feature: MA Experiment 20000265 PARAMETER Experiment Name: At_Open_Flower_P Parameter: Plant Line Value: WS
  misc_feature: MA Experiment 20000265 PARAMETER Experiment Name: At_Open_Flower_P Parameter: Tissue Value: Closed Flower vs. Whole Plant
  misc_feature: MA Experiment ID: 20001451 Result: Down-regulated in Transcription
  misc_feature: MA Experiment 20001451 PARAMETER Experiment Name: At_Far-red-induction_P Parameter: Age (day) Value: 7
  misc_feature: MA Experiment 20001451 PARAMETER Experiment Name: At_Far-red-induction_P Parameter: Light Value: Far-red vs. White
  misc_feature: MA Experiment 20001451 PARAMETER Experiment Name: At_Far-red-induction_P Parameter: Organism Value: A. thaliana
  misc_feature: MA Experiment 20001451 PARAMETER Experiment Name: At_Far-red-induction_P Parameter: Plant Line Value: Columbia
  misc_feature: MA Experiment 20001451 PARAMETER Experiment Name: At_Far-red-induction_P Parameter: Timepoint (hr) Value: 24
  misc_feature: MA Experiment 20001451 PARAMETER Experiment Name: At_Far-red-induction_P Parameter: Tissue Value: Whole Plant
gactccatctttccaacagatctaatcttcttcacttcccaagtgtaaaaacctcaactttcagccaacaaaattagggtttcaagctgagattttctacttctgttacacaaaaatacccaatgagtaaagcttcggtgatcctatacattacggtaggaatcctggtgctcttcctcgtctcttattcaccgaagaagaagggtgaccacgatcaccaccatggtggtcacaatcaacatcaccgcttaaaactccggtcttctttcaatttcaaacccactcgtcacgatccagttccgtttgatcctcttgtcgccgacatggagcgccgccgcgaggataaggagtgggagcgacagtacattgagcattctcacccggagcttgtctctcattctcagaaagaaacaaccggtggtggacatgaacatgcacctggtcacgagtcgcagcctgagtgggaagaattcatggatgctgaggattacttaaatgatgaggagaagttcaatgtcactgataggctgatattgttgtttccgaagattgatgtttctcctgctgatgggtttatgacggagagtgaattgactgagtggactatgcagtcttctgccaaggaagttgtgcacagaactcaacgagacctggatgttcatgatagaaacaaagatggttttatttctttctctgaatatgaaccaccgtcttgggtccgtaagtcggataataattcgtttggctatgatatgggctggtggaaggaggagcattttaatgcatcagatgcaaatggtgatggtcttctgaatttaacagagtttaacgactttctgcatcctgctgacaccaagaacccaaagttactgttatggttatgcaaggaggaagtaagagaaagggattcagataaagatgggaagatcagtttcgaagagtttttccacggcctctttgacactgtaaggaactacgaagaagacaatcacaattctacgcatccttaccatgacttgcctgaaggcccagcaaagcagttgttttctcagcttgacaaaaatgatgacgggtacttatcagacgttgaattgcttcccattatcagtaaaatccatcctactgagcattattatgcaaagcaacaagctgattatataatatcacaggcggattcagacaaagatagacgtttgactttggcagagatgattgagcatccatacgtcttctacagtgccattttcgatgaagatgacactgatgatgattatggtttccacgatgaattccgctagttttataatttaggaataaacaacatcaggctcagttcaatatatcctcaaggaacattcctcacaaaacagagtccagcacgaatctctctcacgtagatcatctggtgatttagaagttagaagagtatttatgattctgaacagctaaaagaaacatacttttctttggatcttgttcaatcaattatagatggctttctccatttctgtatgtttaatttaacacctttgaagcttaatcttttataagcaaagcttatgaagtaaacagtgttatgcat

SEQ ID NO: 48138 - protein, 391 aa, Arabidopsis thaliana
  peptide (1)..(391): Ceres Seq. ID no. 13649128
  misc_feature (214)..(242): Pfam Name: EF hand Pfam Description: EF hand
  misc_feature (75)..(390): Homolog of NCBI NO: 8515718 NR Description: crocalbin-like protein [Homo sapiens]
  misc_feature (75)..(390): Homolog of NCBI NO: 34391907 NR Description: cardiac calumenin isoform [Mus musculus]
  misc_feature (75)..(390): Homolog of NCBI NO: 14718453 NR Description: calumenin [Homo sapiens]
  misc_feature (75)..(390): Homolog of NCBI NO: 34854927 NR Description: hypothetical protein XP_346694 [Rattus norvegicus]
  misc_feature (78)..(390): Homolog of NCBI NO: 32766687 NR Description: Unknown (protein for MGC:63741) [Danio rerio]
  misc_feature (259)..(391): Homolog of NCBI NO: 34914276 NR Description: B1151A10.4 [Oryza sativa (japonica
  misc_feature (1)..(266): Homolog of NCBI NO: 34914276 NR Description: B1151A10.4 [Oryza sativa (japonica
  misc_feature (112)..(391): Homolog of NCBI NO: 38345557 NR Description: OSJNBa0032F06.6 [Oryza sativa (japonica
  misc_feature (102)..(389): Homolog of NCBI NO: 15234272 NR Description: calcium-binding EF-hand family protein
  misc_feature (1)..(391): Homolog of NCBI NO: 18415883 NR Description: calcium-binding EF-hand family protein
MSKASVILYITVGILVLFLVSYSPKKKGDHDHHHGGHNQHHRLKLRSSFNFKPTRHDPVPFDPLVADMERRREDKEWERQYIEHSHPELVSHSQKETTGGGHEHAPGHESQPEWEEFMDAEDYLNDEEKFNVTDRLILLFPKIDVSPADGFMTESELTEWTMQSSAKEVVHRTQRDLDVHDRNKDGFISFSEYEPPSWVRKSDNNSFGYDMGWWKEEHFNASDANGDGLLNLTEFNDFLHPADTKNPKLLLWLCKEEVRERDSDKDGKISFEEFFHGLFDTVRNYEEDNHNSTHPYHDLPEGPAKQLFSQLDKNDDGYLSDVELLPIISKIHPTEHYYAKQQADYIISQADSDKDRRLTLAEMIEHPYVFYSAIFDEDDTDDDYGFHDEFR

SEQ ID NO: 48139 - protein, 324 aa, Arabidopsis thaliana
  peptide (1)..(324): Ceres Seq. ID no. 13649129
  misc_feature (147)..(175): Pfam Name: EF hand Pfam Description: EF hand
  misc_feature (8)..(323): Homolog of NCBI NO: 8515718 NR Description: crocalbin-like protein [Homo sapiens]
  misc_feature (8)..(323): Homolog of NCBI NO: 34391907 NR Description: cardiac calumenin isoform [Mus musculus]
  misc_feature (8)..(323): Homolog of NCBI NO: 14718453 NR Description: calumenin [Homo sapiens]
  misc_feature (8)..(323): Homolog of NCBI NO: 34854927 NR Description: hypothetical protein XP_346694 [Rattus norvegicus]
  misc_feature (11)..(323): Homolog of NCBI NO: 32766687 NR Description: Unknown (protein for MGC:63741) [Danio rerio]
  misc_feature (192)..(324): Homolog of NCBI NO: 34914276 NR Description: B1151A10.4 [Oryza sativa (japonica
  misc_feature (1)..(199): Homolog of NCBI NO: 34914276 NR Description: B1151A10.4 [Oryza sativa (japonica
  misc_feature (45)..(324): Homolog of NCBI NO: 38345557 NR Description: OSJNBa0032F06.6 [Oryza sativa (japonica
  misc_feature (35)..(322): Homolog of NCBI NO: 15234272 NR Description: calcium-binding EF-hand family protein
  misc_feature (1)..(324): Homolog of NCBI NO: 18415883 NR Description: calcium-binding EF-hand family protein
MERRREDKEWERQYIEHSHPELVSHSQKETTGGGHEHAPGHESQPEWEEFMDAEDYLNDEEKFNVTDRLILLFPKIDVSPADGFMTESELTEWTMQSSAKEVVHRTQRDLDVHDRNKDGFISFSEYEPPSWVRKSDNNSFGYDMGWWKEEHFNASDANGDGLLNLTEFNDFLHPADTKNPKLLLWLCKEEVRERDSDKDGKISFEEFFHGLFDTVRNYEEDNHNSTHPYHDLPEGPAKQLFSQLDKNDDGYLSDVELLPIISKIHPTEHYYAKQQADYIISQADSDKDRRLTLAEMIEHPYVFYSAIFDEDDTDDDYGFHDEFR

SEQ ID NO: 48140 - protein, 274 aa, Arabidopsis thaliana
  peptide (1)..(274): Ceres Seq. ID no. 13649130
  misc_feature (97)..(125): Pfam Name: EF hand Pfam Description: EF hand
  misc_feature (1)..(273): Homolog of NCBI NO: 8515718 NR Description: crocalbin-like protein [Homo sapiens]
  misc_feature (1)..(273): Homolog of NCBI NO: 34391907 NR Description: cardiac calumenin isoform [Mus musculus]
  misc_feature (1)..(273): Homolog of NCBI NO: 14718453 NR Description: calumenin [Homo sapiens]
  misc_feature (1)..(273): Homolog of NCBI NO: 34854927 NR Description: hypothetical protein XP_346694 [Rattus norvegicus]
  misc_feature (1)..(273): Homolog of NCBI NO: 32766687 NR Description: Unknown (protein for MGC:63741) [Danio rerio]
  misc_feature (142)..(274): Homolog of NCBI NO: 34914276 NR Description: B1151A10.4 [Oryza sativa (japonica
  misc_feature (1)..(149): Homolog of NCBI NO: 34914276 NR Description: B1151A10.4 [Oryza sativa (japonica
  misc_feature (1)..(274): Homolog of NCBI NO: 38345557 NR Description: OSJNBa0032F06.6 [Oryza sativa (japonica
  misc_feature (1)..(272): Homolog of NCBI NO: 15234272 NR Description: calcium-binding EF-hand family protein
  misc_feature (1)..(274): Homolog of NCBI NO: 18415883 NR Description: calcium-binding EF-hand family protein
MDAEDYLNDEEKFNVTDRLILLFPKIDVSPADGFMTESELTEWTMQSSAKEVVHRTQRDLDVHDRNKDGFISFSEYEPPSWVRKSDNNSFGYDMGWWKEEHFNASDANGDGLLNLTEFNDFLHPADTKNPKLLLWLCKEEVRERDSDKDGKISFEEFFHGLFDTVRNYEEDNHNSTHPYHDLPEGPAKQLFSQLDKNDDGYLSDVELLPIISKIHPTEHYYAKQQADYIISQADSDKDRRLTLAEMIEHPYVFYSAIFDEDDTDDDYGFHDEFR

SEQ ID NO: 48141 - DNA, 1560 bp, Arabidopsis thaliana
  misc_feature (1)..(1560): Ceres Seq. ID no. 13649269
  misc_feature: MA Experiment ID: 20000180 Result: Up-regulated in Transcription
  misc_feature: MA Experiment 20000180 PARAMETER Experiment Name: At_Germinating_Seeds_P Parameter: Age (hr) Value: 24 vs. 0
  misc_feature: MA Experiment 20000180 PARAMETER Experiment Name: At_Germinating_Seeds_P Parameter: Tissue Value: Germinating Seeds
  misc_feature: MA Experiment ID: 20000185 Result: Up-regulated in Transcription
  misc_feature: MA Experiment 20000185 PARAMETER Experiment Name: At_Roots__P Parameter: Age (day) Value: 7 vs. 21
  misc_feature: MA Experiment 20000185 PARAMETER Experiment Name: At_Roots__P Parameter: Organism Value: A. thaliana
  misc_feature: MA Experiment 20000185 PARAMETER Experiment Name: At_Roots__P Parameter: Tissue Value: Roots vs. Whole Plant
  misc_feature: MA Experiment ID: 20000227 Result: Up-regulated in Transcription
  misc_feature: MA Experiment 20000227 PARAMETER Experiment Name: At_Root-Tips-vs-Tops_P Parameter: Tissue Value: Root Tips vs. Root Tops
  misc_feature: MA Experiment ID: 20000234 Result: Up-regulated in Transcription
  misc_feature: MA Experiment 20000234 PARAMETER Experiment Name: At_Siliques_P Parameter: Age (day) Value: 21
  misc_feature: MA Experiment 20000234 PARAMETER Experiment Name: At_Siliques_P Parameter: Organism Value: A. thaliana
  misc_feature: MA Experiment 20000234 PARAMETER Experiment Name: At_Siliques_P Parameter: Plant Line Value: WS
  misc_feature: MA Experiment 20000234 PARAMETER Experiment Name: At_Siliques_P Parameter: Tissue Value: Less Than 5mm Siliques vs. Whole Plant
  misc_feature: MA Experiment ID: 20000264 Result: Up-regulated in Transcription
  misc_feature: MA Experiment 20000264 PARAMETER Experiment Name: At_Open_Flower_P Parameter: Age (day) Value: 21
  misc_feature: MA Experiment 20000264 PARAMETER Experiment Name: At_Open_Flower_P Parameter: Plant Line Value: WS
  misc_feature: MA Experiment 20000264 PARAMETER Experiment Name: At_Open_Flower_P Parameter: Tissue Value: Open Flower vs. Whole Plant
  misc_feature: MA Experiment ID: 20000265 Result: Up-regulated in Transcription
  misc_feature: MA Experiment 20000265 PARAMETER Experiment Name: At_Open_Flower_P Parameter: Age (day) Value: 21
  misc_feature: MA Experiment 20000265 PARAMETER Experiment Name: At_Open_Flower_P Parameter: Plant Line Value: WS
  misc_feature: MA Experiment 20000265 PARAMETER Experiment Name: At_Open_Flower_P Parameter: Tissue Value: Closed Flower vs. Whole Plant
  misc_feature: MA Experiment ID: 20000437 Result: Down-regulated in Transcription
  misc_feature: MA Experiment 20000437 PARAMETER Experiment Name: At_Drought_P Parameter: Age (day) Value: 8
  misc_feature: MA Experiment 20000437 PARAMETER Experiment Name: At_Drought_P Parameter: Organism Value: A. thaliana
  misc_feature: MA Experiment 20000437 PARAMETER Experiment Name: At_Drought_P Parameter: Plant Line Value: WS
  misc_feature: MA Experiment 20000437 PARAMETER Experiment Name: At_Drought_P Parameter: Timepoint (hr) Value: 24
  misc_feature: MA Experiment 20000437 PARAMETER Experiment Name: At_Drought_P Parameter: Tissue Value: Whole Plant
  misc_feature: MA Experiment 20000437 PARAMETER Experiment Name: At_Drought_P Parameter: Treatment Value: Drought vs. No Drought
  misc_feature: MA Experiment ID: 20000439 Result: Up-regulated in Transcription
  misc_feature: MA Experiment 20000439 PARAMETER Experiment Name: At_Roots__P Parameter: Age (day) Value: 14 vs. 21
  misc_feature: MA Experiment 20000439 PARAMETER Experiment Name: At_Roots__P Parameter: Organism Value: A. thaliana
  misc_feature: MA Experiment 20000439 PARAMETER Experiment Name: At_Roots__P Parameter: Tissue Value: Roots vs. Whole Plant
  misc_feature: MA Experiment ID: 20000495 Result: Up-regulated in Transcription
  misc_feature: MA Experiment 20000495 PARAMETER Experiment Name: At_Guard_Cells_P Parameter: Harvest Date Value: 8/2/2002
  misc_feature: MA Experiment 20000495 PARAMETER Experiment Name: At_Guard_Cells_P Parameter: Organism Value: A. thaliana
  misc_feature: MA Experiment 20000495 PARAMETER Experiment Name: At_Guard_Cells_P Parameter: Tissue Value: Guard Cells vs. Leaves
  misc_feature: MA Experiment ID: 20001911 Result: Down-regulated in Transcription
  misc_feature: MA Experiment 20001911 PARAMETER Experiment Name: At_Drought_Reproduction_P Parameter: Age (day) Value: 40
  misc_feature: MA Experiment 20001911 PARAMETER Experiment Name: At_Drought_Reproduction_P Parameter: Organism Value: A. thaliana
  misc_feature: MA Experiment 20001911 PARAMETER Experiment Name: At_Drought_Reproduction_P Parameter: Plant Line Value: WS
  misc_feature: MA Experiment 20001911 PARAMETER Experiment Name: At_Drought_Reproduction_P Parameter: Timepoint (day) Value: 10
  misc_feature: MA Experiment 20001911 PARAMETER Experiment Name: At_Drought_Reproduction_P Parameter: Tissue Value: Flowers
  misc_feature: MA Experiment 20001911 PARAMETER Experiment Name: At_Drought_Reproduction_P Parameter: Treatment Value: Drought vs. No Drought
gttaaaaatcctaaccttgttctcacattaatcctccgccgagattccttttgtcttcttcttcttcatcttcttctccttctccgattcaattccaaagatgatgagagatgttttcaggccgactaaatcagccccatgttctcctgcaaagccacttggtatctctcgcactcaatctgaatcatttcatgctattcacaaagttcctgtcggagacagtccttatgtcagagcaaagaatgttcagttagtggagaaggatccagagagagcaattcctctgttttggaaggctattaatgctggagatagagtggacagtgctttgaaagacatggctattgtgatgaagcaacaaaaccgcgctgaagaagccattgaagctattaaatcactcagagttagatgttcagatcaagctcaggaatctctcgacaatatcctcttagatctctacaagagatgtgggagattagatgaccagattggacttttgaaacataagctcttcttgatacagaaaggactcgctttcaatggtaaacgaaccaaaacagctagatctcaaggcaagaagtttcaagtctctgtggagcaagaagctactcggttactgggaaacttgggatgggctctgatgcaacgagacaactttgtggaagctgaagatgcatacagaagagctttatcaatagcaccagacaacaacaaaatgtgtaaccttggtatctgccttatgaagcaaggaaggatcgatgaggccaaagagactttacgacgtgtgaaacccgcggttgttgatggccctagaggcgtggattcacatctaaaagcttacgagagagcgcaacagatgctgaatgatcttggatctgagatgatgagaagaggaggagatgataaggttgaacaaagaaggctctttgatgcaatctttggatcttcctctatatggcaacctcagccttgtagtgagcagactgtgaaggctaaaccaaagcctggtttaagcaatggtgatggatacggtgatgagaacgtgaagatgagtgtgaatccagtagtagtaaacccattaagggttgatgcaaaaccgttcttctcttcgaagttggtcatcagtaacaacgagaagctgaagagaacgagatcgtcgagccaagggatggggatgttgagtggtattggtggtgatcatgagggagagacaaacacaagcacgagaaggagattgtcaatggagaagaaagcaacggagtgtggattaccagacaataaagactttgaagatgcgatcatggctgctgttttaggaacagaaaccaaagtggacaagaagaggctcaaggtgttccaggatatcactttgtgtctcaatcagagtctctaaccactcttatcattttatcattctaatttataatttagtcaaggaatcaaaaaaggagatgagcttaattcttcttggtaattttattaatgtttttgtcagctttaagttgctgccatttttttcacaattattgtcttcattgaccagtaataaaagctgaagtt

SEQ ID NO: 48142 - protein, 430 aa, Arabidopsis thaliana
  peptide (1)..(430): Ceres Seq. ID no. 13649270
  misc_feature (170)..(203): Pfam Name: TPR Domain Pfam Description: TPR Domain
  misc_feature (1)..(260): Homolog of NCBI NO: 15233432 NR Description: male sterility MS5/pollenless 3 [Arabidopsis
  misc_feature (1)..(260): Homolog of NCBI NO: 4028970 NR Description: pollenless3 [Arabidopsis thaliana]
  misc_feature (1)..(260): Homolog of NCBI NO: 3859112 NR Description: male sterility MS5 [Arabidopsis thaliana]
  misc_feature (25)..(257): Homolog of NCBI NO: 30678993 NR Description: male sterility MS5 family [Arabidopsis thaliana]
  misc_feature (7)..(257): Homolog of NCBI NO: 25406811 NR Description: hypothetical protein [imported] - Arabidopsis
  misc_feature (28)..(263): Homolog of NCBI NO: 30695554 NR Description: male sterility MS5 family [Arabidopsis thaliana]
  misc_feature (1)..(263): Homolog of NCBI NO: 9758884 NR Description: gb|AAC72543.1~gene_id:K24G6.19~similar to unknown
  misc_feature (26)..(257): Homolog of NCBI NO: 3859116 NR Description: unknown [Oryza sativa]
  misc_feature (133)..(417): Homolog of NCBI NO: 25455795 NR Description: MS5-like protein [imported] - Arabidopsis
  misc_feature (1)..(430): Homolog of NCBI NO: 15230439 NR Description: male sterility MS5, putative [Arabidopsis
MMRDVFRPTKSAPCSPAKPLGISRTQSESFHAIHKVPVGDSPYVRAKNVQLVEKDPERAIPLFWKAINAGDRVDSALKDMAIVMKQQNRAEEAIEAIKSLRVRCSDQAQESLDNILLDLYKRCGRLDDQIGLLKHKLFLIQKGLAFNGKRTKTARSQGKKFQVSVEQEATRLLGNLGWALMQRDNFVEAEDAYRRALSIAPDNNKMCNLGICLMKQGRIDEAKETLRRVKPAVVDGPRGVDSHLKAYERAQQMLNDLGSEMMRRGGDDKVEQRRLFDAIFGSSSIWQPQPCSEQTVKAKPKPGLSNGDGYGDENVKMSVNPVVVNPLRVDAKPFFSSKLVISNNEKLKRTRSSSQGMGMLSGIGGDHEGETNTSTRRRLSMEKKATECGLPDNKDFEDAIMAAVLGTETKVDKKRLKVFQDITLCLNQSL

SEQ ID NO: 48143 - protein, 429 aa, Arabidopsis thaliana
  peptide (1)..(429): Ceres Seq. ID no. 13649271
  misc_feature (169)..(202): Pfam Name: TPR Domain Pfam Description: TPR Domain
  misc_feature (1)..(259): Homolog of NCBI NO: 15233432 NR Description: male sterility MS5/pollenless 3 [Arabidopsis
  misc_feature (1)..(259): Homolog of NCBI NO: 4028970 NR Description: pollenless3 [Arabidopsis thaliana]
  misc_feature (1)..(259): Homolog of NCBI NO: 3859112 NR Description: male sterility MS5 [Arabidopsis thaliana]
  misc_feature (24)..(256): Homolog of NCBI NO: 30678993 NR Description: male sterility MS5 family [Arabidopsis thaliana]
  misc_feature (6)..(256): Homolog of NCBI NO: 25406811 NR Description: hypothetical protein [imported] - Arabidopsis
  misc_feature (27)..(262): Homolog of NCBI NO: 30695554 NR Description: male sterility MS5 family [Arabidopsis thaliana]
  misc_feature (1)..(262): Homolog of NCBI NO: 9758884 NR Description: gb|AAC72543.1~gene_id:K24G6.19~similar to unknown
  misc_feature (25)..(256): Homolog of NCBI NO: 3859116 NR Description: unknown [Oryza sativa]
  misc_feature (132)..(416): Homolog of NCBI NO: 25455795 NR Description: MS5-like protein [imported] - Arabidopsis
  misc_feature (1)..(429): Homolog of NCBI NO: 15230439 NR Description: male sterility MS5, putative [Arabidopsis
MRDVFRPTKSAPCSPAKPLGISRTQSESFHAIHKVPVGDSPYVRAKNVQLVEKDPERAIPLFWKAINAGDRVDSALKDMAIVMKQQNRAEEAIEAIKSLRVRCSDQAQESLDNILLDLYKRCGRLDDQIGLLKHKLFLIQKGLAFNGKRTKTARSQGKKFQVSVEQEATRLLGNLGWALMQRDNFVEAEDAYRRALSIAPDNNKMCNLGICLMKQGRIDEAKETLRRVKPAVVDGPRGVDSHLKAYERAQQMLNDLGSEMMRRGGDDKVEQRRLFDAIFGSSSIWQPQPCSEQTVKAKPKPGLSNGDGYGDENVKMSVNPVVVNPLRVDAKPFFSSKLVISNNEKLKRTRSSSQGMGMLSGIGGDHEGETNTSTRRRLSMEKKATECGLPDNKDFEDAIMAAVLGTETKVDKKRLKVFQDITLCLNQSL

SEQ ID NO: 48144 - protein, 351 aa, Arabidopsis thaliana
  peptide (1)..(351): Ceres Seq. ID no. 13649272
  misc_feature (91)..(124): Pfam Name: TPR Domain Pfam Description: TPR Domain
  misc_feature (1)..(181): Homolog of NCBI NO: 15233432 NR Description: male sterility MS5/pollenless 3 [Arabidopsis
  misc_feature (1)..(181): Homolog of NCBI NO: 4028970 NR Description: pollenless3 [Arabidopsis thaliana]
  misc_feature (1)..(181): Homolog of NCBI NO: 3859112 NR Description: male sterility MS5 [Arabidopsis thaliana]
  misc_feature (1)..(178): Homolog of NCBI NO: 30678993 NR Description: male sterility MS5 family [Arabidopsis thaliana]
  misc_feature (1)..(178): Homolog of NCBI NO: 25406811 NR Description: hypothetical protein [imported] - Arabidopsis
  misc_feature (1)..(184): Homolog of NCBI NO: 30695554 NR Description: male sterility MS5 family [Arabidopsis thaliana]
  misc_feature (1)..(184): Homolog of NCBI NO: 9758884 NR Description: gb|AAC72543.1~gene_id:K24G6.19~similar to unknown
  misc_feature (1)..(178): Homolog of NCBI NO: 3859116 NR Description: unknown [Oryza sativa]
  misc_feature (54)..(338): Homolog of NCBI NO: 25455795 NR Description: MS5-like protein [imported] - Arabidopsis
  misc_feature (1)..(351): Homolog of NCBI NO: 15230439 NR Description: male sterility MS5, putative [Arabidopsis
MAIVMKQQNRAEEAIEAIKSLRVRCSDQAQESLDNILLDLYKRCGRLDDQIGLLKHKLFLIQKGLAFNGKRTKTARSQGKKFQVSVEQEATRLLGNLGWALMQRDNFVEAEDAYRRALSIAPDNNKMCNLGICLMKQGRIDEAKETLRRVKPAVVDGPRGVDSHLKAYERAQQMLNDLGSEMMRRGGDDKVEQRRLFDAIFGSSSIWQPQPCSEQTVKAKPKPGLSNGDGYGDENVKMSVNPVVVNPLRVDAKPFFSSKLVISNNEKLKRTRSSSQGMGMLSGIGGDHEGETNTSTRRRLSMEKKATECGLPDNKDFEDAIMAAVLGTETKVDKKRLKVFQDITLCLNQSL

SEQ ID NO: 48145 - DNA, 1659 bp, Arabidopsis thaliana
  misc_feature (1)..(1659): Ceres Seq. ID no. 13650095
  misc_feature: MA Experiment ID: 20000184 Result: Down-regulated in Transcription
  misc_feature: MA Experiment 20000184 PARAMETER Experiment Name: At_Shoots__P Parameter: Age (day) Value: 7
  misc_feature: MA Experiment 20000184 PARAMETER Experiment Name: At_Shoots__P Parameter: Tissue Value: Shoots vs. Whole Plant
  misc_feature: MA Experiment ID: 20000265 Result: Down-regulated in Transcription
  misc_feature: MA Experiment 20000265 PARAMETER Experiment Name: At_Open_Flower_P Parameter: Age (day) Value: 21
  misc_feature: MA Experiment 20000265 PARAMETER Experiment Name: At_Open_Flower_P Parameter: Plant Line Value: WS
  misc_feature: MA Experiment 20000265 PARAMETER Experiment Name: At_Open_Flower_P Parameter: Tissue Value: Closed Flower vs. Whole Plant
  misc_feature: MA Experiment ID: 20000573 Result: Down-regulated in Transcription
  misc_feature: MA Experiment 20000573 PARAMETER Experiment Name: At_100uM_ABA_Mutants__P Parameter: Organism Value: A. thaliana
  misc_feature: MA Experiment 20000573 PARAMETER Experiment Name: At_100uM_ABA_Mutants__P Parameter: Plant Line Value: CS22 vs. Ler wt
  misc_feature: MA Experiment 20000573 PARAMETER Experiment Name: At_100uM_ABA_Mutants__P Parameter: Timepoint (hr) Value: N/A
  misc_feature: MA Experiment 20000573 PARAMETER Experiment Name: At_100uM_ABA_Mutants__P Parameter: Tissue Value: Whole Plant
  misc_feature: MA Experiment 20000573 PARAMETER Experiment Name: At_100uM_ABA_Mutants__P Parameter: Treatment Value: None
  misc_feature: MA Experiment ID: 20001247 Result: Up-regulated in Transcription
  misc_feature: MA Experiment 20001247 PARAMETER Experiment Name: At_Far-red-induction_P Parameter: Age (day) Value: 7
  misc_feature: MA Experiment 20001247 PARAMETER Experiment Name: At_Far-red-induction_P Parameter: Light Value: Far-red vs. White
  misc_feature: MA Experiment 20001247 PARAMETER Experiment Name: At_Far-red-induction_P Parameter: Organism Value: A. thaliana
  misc_feature: MA Experiment 20001247 PARAMETER Experiment Name: At_Far-red-induction_P Parameter: Plant Line Value: Columbia
  misc_feature: MA Experiment 20001247 PARAMETER Experiment Name: At_Far-red-induction_P Parameter: Timepoint (hr) Value: 1
  misc_feature: MA Experiment 20001247 PARAMETER Experiment Name: At_Far-red-induction_P Parameter: Tissue Value: Whole Plant
atggagaacgagctgtttatgaatgcaggagtttcgcatccgccggtgatgacgtcaccgtcttcttcgtcggcgatgcttaagtgggtttcaatggagactcagccagtggatccaagtctcagtcgcaatctgttttgggaaaagtcaacggaacagagcatttttgattcggctctgagctcactcgtctcttctcctacgccgtcaaattcaaacttttcggttggcggagtaggtggagaaaatgtcattatgagagagctcatcgggaaactgggtaatatcggcgatatctatggaattacggcgagcaatggaaactcgtgttacgcaactccgatgagctctccaccgcctggaagtatgatggagacgaaaacgacgacgccgatggcagaactgtccggcgacccgggattcgctgagagagcggcgaggttctcgtgttttggtagccggagttttaacagcagaacaaactcgccgtttccgattaataacgaaccacccatcacaaccaatgagaaaatgccacgtgtatcaagcagcccagtttttaagcctcttgcgtctcatgttcccgccggcgaatcgtccggtgaactttcccggaaaagaaaaactaaatccaagcagaattctccttctgcagtttcatcatcaaaggagattgaagagaaggaagattctgatccaaagagatgcaaaaaatcagaagaaaatggagacaaaactaaatcaattgatccttacaaagattacattcatgttagagctcgacgaggccaagccaccgatagtcacagtctcgccgaacgagttcgaagagagaaaataagcgaaagaatgaagctgcttcaagatcttgtccctggatgcaacaaggttactggaaaagcactgatgttggatgaaattataaactatgtccaatcattgcaacgacaagttgagttcttgtcgatgaagttatcgtcagtgaacaccaggctggactttaacatggacgctctcttgtctaaggatatatttccttcaagcaacaatctaatgcatcatcaacaagtacttcaattagattcttcagcagaaacgttattgggtgatcatcacaacaaaaatttgcaattgaaccctgatatttcttctaataacgtaataaaccctttggaaacttctgaaactagaagcttcatttctcacttaccaacacttgctcatttcactgactctatttctcagtattcaacattttccgaagatgatttacatagcattattcatatgggttttgcgcaaaaccgtctccaagaattgaaccaaggttcatcaaaccaagtaccatcgcacatgaaagctgaactttgatcaaccactatatgcatttttacaaaaatattggcgttttaaaggtctcgaggatagaaagtaagaaaaggattgatgggtgtacataacaagaaatttgaattggaccacaccatatgcgaattcatttctataatcatcttcatatacataacttcttctttttatccttccgattcatttgtggtgctcaattgtattgtcatgttgttatccgctattcttcttcttatcagattctttaaacttttcttgtttggatttaatatcattgtatgttttaacccc

SEQ ID NO: 48146 - protein, 456 aa, Arabidopsis thaliana
  peptide (1)..(456): Ceres Seq. ID no. 15219602
  misc_feature (265)..(315): Pfam Name: Helix-loop-helix DNA-binding domain Pfam Description: Helix-loop-helix DNA-binding domain
  misc_feature (197)..(343): Homolog of NCBI NO: 20127044 NR Description: putative bHLH transcription factor [Arabidopsis
  misc_feature (197)..(343): Homolog of NCBI NO: 15221563 NR Description: DNA-binding protein -related [Arabidopsis
  misc_feature (148)..(455): Homolog of NCBI NO: 29647487 NR Description: OJ1191_A10.7 [Oryza sativa (japonica
  misc_feature (138)..(415): Homolog of NCBI NO: 34906952 NR Description: DNA-binding protein-like protein
  misc_feature (1)..(247): Homolog of NCBI NO: 20127085 NR Description: putative bHLH transcription factor [Arabidopsis
  misc_feature (1)..(247): Homolog of NCBI NO: 15239013 NR Description: bHLH protein family [Arabidopsis thaliana]
  misc_feature (170)..(456): Homolog of NCBI NO: 20127085 NR Description: putative bHLH transcription factor [Arabidopsis
  misc_feature (170)..(456): Homolog of NCBI NO: 15239013 NR Description: bHLH protein family [Arabidopsis thaliana]
  misc_feature (7)..(456): Homolog of NCBI NO: 20127064 NR Description: putative bHLH transcription factor [Arabidopsis
  misc_feature (1)..(456): Homolog of NCBI NO: 15231450 NR Description: bHLH protein family [Arabidopsis thaliana]
MENELFMNAGVSHPPVMTSPSSSSAMLKWVSMETQPVDPSLSRNLFWEKSTEQSIFDSALSSLVSSPTPSNSNFSVGGVGGENVIMRELIGKLGNIGDIYGITASNGNSCYATPMSSPPPGSMMETKTTTPMAELSGDPGFAERAARFSCFGSRSFNSRTNSPFPINNEPPITTNEKMPRVSSSPVFKPLASHVPAGESSGELSRKRKTKSKQNSPSAVSSSKEIEEKEDSDPKRCKKSEENGDKTKSIDPYKDYIHVRARRGQATDSHSLAERVRREKISERMKLLQDLVPGCNKVTGKALMLDEIINYVQSLQRQVEFLSMKLSSVNTRLDFNMDALLSKDIFPSSNNLMHHQQVLQLDSSAETLLGDHHNKNLQLNPDISSNNVINPLETSETRSFISHLPTLAHFTDSISQYSTFSEDDLHSIIHMGFAQNRLQELNQGSSNQVPSHMKAEL

SEQ ID NO: 48147 - protein, 450 aa, Arabidopsis thaliana
  peptide (1)..(450): Ceres Seq. ID no. 15219603
  misc_feature (259)..(309): Pfam Name: Helix-loop-helix DNA-binding domain Pfam Description: Helix-loop-helix DNA-binding domain
  misc_feature (191)..(337): Homolog of NCBI NO: 20127044 NR Description: putative bHLH transcription factor [Arabidopsis
  misc_feature (191)..(337): Homolog of NCBI NO: 15221563 NR Description: DNA-binding protein -related [Arabidopsis
  misc_feature (142)..(449): Homolog of NCBI NO: 29647487 NR Description: OJ1191_A10.7 [Oryza sativa (japonica
  misc_feature (132)..(409): Homolog of NCBI NO: 34906952 NR Description: DNA-binding protein-like protein
  misc_feature (1)..(241): Homolog of NCBI NO: 20127085 NR Description: putative bHLH transcription factor [Arabidopsis
  misc_feature (1)..(241): Homolog of NCBI NO: 15239013 NR Description: bHLH protein family [Arabidopsis thaliana]
  misc_feature (164)..(450): Homolog of NCBI NO: 20127085 NR Description: putative bHLH transcription factor [Arabidopsis
  misc_feature (164)..(450): Homolog of NCBI NO: 15239013 NR Description: bHLH protein family [Arabidopsis thaliana]
  misc_feature (1)..(450): Homolog of NCBI NO: 20127064 NR Description: putative bHLH transcription factor [Arabidopsis
  misc_feature (1)..(450): Homolog of NCBI NO: 15231450 NR Description: bHLH protein family [Arabidopsis thaliana]
MNAGVSHPPVMTSPSSSSAMLKWVSMETQPVDPSLSRNLFWEKSTEQSIFDSALSSLVSSPTPSNSNFSVGGVGGENVIMRELIGKLGNIGDIYGITASNGNSCYATPMSSPPPGSMMETKTTTPMAELSGDPGFAERAARFSCFGSRSFNSRTNSPFPINNEPPITTNEKMPRVSSSPVFKPLASHVPAGESSGELSRKRKTKSKQNSPSAVSSSKEIEEKEDSDPKRCKKSEENGDKTKSIDPYKDYIHVRARRGQATDSHSLAERVRREKISERMKLLQDLVPGCNKVTGKALMLDEIINYVQSLQRQVEFLSMKLSSVNTRLDFNMDALLSKDIFPSSNNLMHHQQVLQLDSSAETLLGDHHNKNLQLNPDISSNNVINPLETSETRSFISHLPTLAHFTDSISQYSTFSEDDLHSIIHMGFAQNRLQELNQGSSNQVPSHMKAEL

SEQ ID NO: 48148 - protein, 440 aa, Arabidopsis thaliana
  peptide (1)..(440): Ceres Seq. ID no. 15219604
  misc_feature (249)..(299): Pfam Name: Helix-loop-helix DNA-binding domain Pfam Description: Helix-loop-helix DNA-binding domain
  misc_feature (181)..(327): Homolog of NCBI NO: 20127044 NR Description: putative bHLH transcription factor [Arabidopsis
  misc_feature (181)..(327): Homolog of NCBI NO: 15221563 NR Description: DNA-binding protein -related [Arabidopsis
  misc_feature (132)..(439): Homolog of NCBI NO: 29647487 NR Description: OJ1191_A10.7 [Oryza sativa (japonica
  misc_feature (122)..(399): Homolog of NCBI NO: 34906952 NR Description: DNA-binding protein-like protein
  misc_feature (1)..(231): Homolog of NCBI NO: 20127085 NR Description: putative bHLH transcription factor [Arabidopsis
  misc_feature (1)..(231): Homolog of NCBI NO: 15239013 NR Description: bHLH protein family [Arabidopsis thaliana]
  misc_feature (154)..(440): Homolog of NCBI NO: 20127085 NR Description: putative bHLH transcription factor [Arabidopsis
  misc_feature (154)..(440): Homolog of NCBI NO: 15239013 NR Description: bHLH protein family [Arabidopsis thaliana]
  misc_feature (1)..(440): Homolog of NCBI NO: 20127064 NR Description: putative bHLH transcription factor [Arabidopsis
  misc_feature (1)..(440): Homolog of NCBI NO: 15231450 NR Description: bHLH protein family [Arabidopsis thaliana]
MTSPSSSSAMLKWVSMETQPVDPSLSRNLFWEKSTEQSIFDSALSSLVSSPTPSNSNFSVGGVGGENVIMRELIGKLGNIGDIYGITASNGNSCYATPMSSPPPGSMMETKTTTPMAELSGDPGFAERAARFSCFGSRSFNSRTNSPFPINNEPPITTNEKMPRVSSSPVFKPLASHVPAGESSGELSRKRKTKSKQNSPSAVSSSKEIEEKEDSDPKRCKKSEENGDKTKSIDPYKDYIHVRARRGQATDSHSLAERVRREKISERMKLLQDLVPGCNKVTGKALMLDEIINYVQSLQRQVEFLSMKLSSVNTRLDFNMDALLSKDIFPSSNNLMHHQQVLQLDSSAETLLGDHHNKNLQLNPDISSNNVINPLETSETRSFISHLPTLAHFTDSISQYSTFSEDDLHSIIHMGFAQNRLQELNQGSSNQVPSHMKAEL

SEQ ID NO: 48149 - DNA, 1284 bp, Arabidopsis thaliana
  misc_feature (1)..(1284): Ceres Seq. ID no. 13649799
  misc_feature: MA Experiment ID: 20000171 Result: Up-regulated in Transcription
  misc_feature: MA Experiment 20000171 PARAMETER Experiment Name: At_42deg_Heat_P Parameter: Age (day) Value: 14
  misc_feature: MA Experiment 20000171 PARAMETER Experiment Name: At_42deg_Heat_P Parameter: Organism Value: A. thaliana
  misc_feature: MA Experiment 20000171 PARAMETER Experiment Name: At_42deg_Heat_P Parameter: Plant Line Value: WS
  misc_feature: MA Experiment 20000171 PARAMETER Experiment Name: At_42deg_Heat_P Parameter: Temperature (deg C) Value: 42 vs. 22
  misc_feature: MA Experiment 20000171 PARAMETER Experiment Name: At_42deg_Heat_P Parameter: Timepoint (hr) Value: 1
  misc_feature: MA Experiment 20000171 PARAMETER Experiment Name: At_42deg_Heat_P Parameter: Tissue Value: Aerial
  misc_feature: MA Experiment ID: 20000173 Result: Up-regulated in Transcription
  misc_feature: MA Experiment 20000173 PARAMETER Experiment Name: At_42deg_Heat_P Parameter: Age (day) Value: 14
  misc_feature: MA Experiment 20000173 PARAMETER Experiment Name: At_42deg_Heat_P Parameter: Organism Value: A. thaliana
  misc_feature: MA Experiment 20000173 PARAMETER Experiment Name: At_42deg_Heat_P Parameter: Plant Line Value: WS
  misc_feature: MA Experiment 20000173 PARAMETER Experiment Name: At_42deg_Heat_P Parameter: Temperature (deg C) Value: 42 vs. 22
  misc_feature: MA Experiment 20000173 PARAMETER Experiment Name: At_42deg_Heat_P Parameter: Timepoint (hr) Value: 6
  misc_feature: MA Experiment 20000173 PARAMETER Experiment Name: At_42deg_Heat_P Parameter: Tissue Value: Aerial
  misc_feature: MA Experiment ID: 20000180 Result: Up-regulated in Transcription
  misc_feature: MA Experiment 20000180 PARAMETER Experiment Name: At_Germinating_Seeds_P Parameter: Age (hr) Value: 24 vs. 0
  misc_feature: MA Experiment 20000180 PARAMETER Experiment Name: At_Germinating_Seeds_P Parameter: Tissue Value: Germinating Seeds
  misc_feature: MA Experiment ID: 20000182 Result: Up-regulated in Transcription
  misc_feature: MA Experiment 20000182 PARAMETER Experiment Name: At_2mM_SA_P Parameter: Age (day) Value: 14
  misc_feature: MA Experiment 20000182 PARAMETER Experiment Name: At_2mM_SA_P Parameter: Organism Value: A. thaliana
  misc_feature: MA Experiment 20000182 PARAMETER Experiment Name: At_2mM_SA_P Parameter: Plant Line Value: WS
  misc_feature: MA Experiment 20000182 PARAMETER Experiment Name: At_2mM_SA_P Parameter: Timepoint (hr) Value: 6
  misc_feature: MA Experiment 20000182 PARAMETER Experiment Name: At_2mM_SA_P Parameter: Tissue Value: Aerial
  misc_feature: MA Experiment 20000182 PARAMETER Experiment Name: At_2mM_SA_P Parameter: Treatment Value: 2mM SA vs. No Treatment
  misc_feature: MA Experiment ID: 20000184 Result: Down-regulated in Transcription
  misc_feature: MA Experiment 20000184 PARAMETER Experiment Name: At_Shoots__P Parameter: Age (day) Value: 7
  misc_feature: MA Experiment 20000184 PARAMETER Experiment Name: At_Shoots__P Parameter: Tissue Value: Shoots vs. Whole Plant
  misc_feature: MA Experiment ID: 20000227 Result: Down-regulated in Transcription
  misc_feature: MA Experiment 20000227 PARAMETER Experiment Name: At_Root-Tips-vs-Tops_P Parameter: Tissue Value: Root Tips vs. Root Tops
  misc_feature: MA Experiment ID: 20000234 Result: Down-regulated in Transcription
  misc_feature: MA Experiment 20000234 PARAMETER Experiment Name: At_Siliques_P Parameter: Age (day) Value: 21
  misc_feature: MA Experiment 20000234 PARAMETER Experiment Name: At_Siliques_P Parameter: Organism Value: A. thaliana
  misc_feature: MA Experiment 20000234 PARAMETER Experiment Name: At_Siliques_P Parameter: Plant Line Value: WS
  misc_feature: MA Experiment 20000234 PARAMETER Experiment Name: At_Siliques_P Parameter: Tissue Value: Less Than 5mm Siliques vs. Whole Plant
  misc_feature: MA Experiment ID: 20000235 Result: Down-regulated in Transcription
  misc_feature: MA Experiment 20000235 PARAMETER Experiment Name: At_Siliques_P Parameter: Age (day) Value: 21
  misc_feature: MA Experiment 20000235 PARAMETER Experiment Name: At_Siliques_P Parameter: Organism Value: A. thaliana
  misc_feature: MA Experiment 20000235 PARAMETER Experiment Name: At_Siliques_P Parameter: Plant Line Value: WS
  misc_feature: MA Experiment 20000235 PARAMETER Experiment Name: At_Siliques_P Parameter: Tissue Value: 5-10mm Siliques vs. Whole Plant
  misc_feature: MA Experiment ID: 20000264 Result: Down-regulated in Transcription
  misc_feature: MA Experiment 20000264 PARAMETER Experiment Name: At_Open_Flower_P Parameter: Age (day) Value: 21
  misc_feature: MA Experiment 20000264 PARAMETER Experiment Name: At_Open_Flower_P Parameter: Plant Line Value: WS
  misc_feature: MA Experiment 20000264 PARAMETER Experiment Name: At_Open_Flower_P Parameter: Tissue Value: Open Flower vs. Whole Plant
  misc_feature: MA Experiment ID: 20000265 Result: Down-regulated in Transcription
  misc_feature: MA Experiment 20000265 PARAMETER Experiment Name: At_Open_Flower_P Parameter: Age (day) Value: 21
  misc_feature: MA Experiment 20000265 PARAMETER Experiment Name: At_Open_Flower_P Parameter: Plant Line Value: WS
  misc_feature: MA Experiment 20000265 PARAMETER Experiment Name: At_Open_Flower_P Parameter: Tissue Value: Closed Flower vs. Whole Plant
  misc_feature: MA Experiment ID: 20000286 Result: Down-regulated in Transcription
  misc_feature: MA Experiment 20000286 PARAMETER Experiment Name: At_Open_Flower_P Parameter: Age (day) Value: 21
  misc_feature: MA Experiment 20000286 PARAMETER Experiment Name: At_Open_Flower_P Parameter: Plant Line Value: WS
  misc_feature: MA Experiment 20000286 PARAMETER Experiment Name: At_Open_Flower_P Parameter: Tissue Value: Half Open vs. Whole Plant
  misc_feature: MA Experiment ID: 20000439 Result: Down-regulated in Transcription
  misc_feature: MA Experiment 20000439 PARAMETER Experiment Name: At_Roots__P Parameter: Age (day) Value: 14 vs. 21
  misc_feature: MA Experiment 20000439 PARAMETER Experiment Name: At_Roots__P Parameter: Organism Value: A. thaliana
  misc_feature: MA Experiment 20000439 PARAMETER Experiment Name: At_Roots__P Parameter: Tissue Value: Roots vs. Whole Plant
  misc_feature: MA Experiment ID: 20000441 Result: Up-regulated in Transcription
  misc_feature: MA Experiment 20000441 PARAMETER Experiment Name: At_1uM_BR-BRZ__P Parameter: Tissue Value: Shoot Apices
  misc_feature: MA Experiment 20000441 PARAMETER Experiment Name: At_1uM_BR-BRZ__P Parameter: Treatment Value: 1uM BR vs. No Treatment
  misc_feature: MA Experiment ID: 20000443 Result: Up-regulated in Transcription
  misc_feature: MA Experiment 20000443 PARAMETER Experiment Name: At_1uM_BR-BRZ__P Parameter: Tissue Value: Shoot Apices
  misc_feature: MA Experiment 20000443 PARAMETER Experiment Name: At_1uM_BR-BRZ__P Parameter: Treatment Value: 1uM BRZ vs. No Treatment
  misc_feature: MA Experiment ID: 20000794 Result: Down-regulated in Transcription
  misc_feature: MA Experiment 20000794 PARAMETER Experiment Name: At_Petals_P Parameter: Age (day) Value: 23-25 days
  misc_feature: MA Experiment 20000794 PARAMETER Experiment Name: At_Petals_P Parameter: Plant Line Value: WS
  misc_feature: MA Experiment 20000794 PARAMETER Experiment Name: At_Petals_P Parameter: Tissue Value: Petals vs. Whole plant
  misc_feature: MA Experiment ID: 20001248 Result: Down-regulated in Transcription
  misc_feature: MA Experiment 20001248 PARAMETER Experiment Name: At_Far-red-induction_P Parameter: Age (day) Value: 7
  misc_feature: MA Experiment 20001248 PARAMETER Experiment Name: At_Far-red-induction_P Parameter: Light Value: Far-red vs. White
  misc_feature: MA Experiment 20001248 PARAMETER Experiment Name: At_Far-red-induction_P Parameter: Organism Value: A. thaliana
  misc_feature: MA Experiment 20001248 PARAMETER Experiment Name: At_Far-red-induction_P Parameter: Plant Line Value: Columbia
  misc_feature: MA Experiment 20001248 PARAMETER Experiment Name: At_Far-red-induction_P Parameter: Timepoint (hr) Value: 4
  misc_feature: MA Experiment 20001248 PARAMETER Experiment Name: At_Far-red-induction_P Parameter: Tissue Value: Whole Plant
  misc_feature: MA Experiment ID: 20001450 Result: Down-regulated in Transcription
  misc_feature: MA Experiment 20001450 PARAMETER Experiment Name: At_Far-red-induction_P Parameter: Age (day) Value: 7
  misc_feature: MA Experiment 20001450 PARAMETER Experiment Name: At_Far-red-induction_P Parameter: Light Value: Far-red vs. White
  misc_feature: MA Experiment 20001450 PARAMETER Experiment Name: At_Far-red-induction_P Parameter: Organism Value: A. thaliana
  misc_feature: MA Experiment 20001450 PARAMETER Experiment Name: At_Far-red-induction_P Parameter: Plant Line Value: Columbia
  misc_feature: MA Experiment 20001450 PARAMETER Experiment Name: At_Far-red-induction_P Parameter: Timepoint (hr) Value: 8
  misc_feature: MA Experiment 20001450 PARAMETER Experiment Name: At_Far-red-induction_P Parameter: Tissue Value: Whole Plant
  misc_feature: MA Experiment ID: 20001904 Result: Down-regulated in Transcription
  misc_feature: MA Experiment 20001904 PARAMETER Experiment Name: At_Drought_Reproduction_P Parameter: Age (day) Value: 37
  misc_feature: MA Experiment 20001904 PARAMETER Experiment Name: At_Drought_Reproduction_P Parameter: Organism Value: A. thaliana
  misc_feature: MA Experiment 20001904 PARAMETER Experiment Name: At_Drought_Reproduction_P Parameter: Plant Line Value: WS
  misc_feature: MA Experiment 20001904 PARAMETER Experiment Name: At_Drought_Reproduction_P Parameter: Timepoint (day) Value: 7
  misc_feature: MA Experiment 20001904 PARAMETER Experiment Name: At_Drought_Reproduction_P Parameter: Tissue Value: Rosettes
  misc_feature: MA Experiment 20001904 PARAMETER Experiment Name: At_Drought_Reproduction_P Parameter: Treatment Value: Drought vs. No Drought
  misc_feature: MA Experiment ID: 20001905 Result: Down-regulated in Transcription
  misc_feature: MA Experiment 20001905 PARAMETER Experiment Name: At_Drought_Reproduction_P Parameter: Age (day) Value: 40
  misc_feature: MA Experiment 20001905 PARAMETER Experiment Name: At_Drought_Reproduction_P Parameter: Organism Value: A. thaliana
  misc_feature: MA Experiment 20001905 PARAMETER Experiment Name: At_Drought_Reproduction_P Parameter: Plant Line Value: WS
  misc_feature: MA Experiment 20001905 PARAMETER Experiment Name: At_Drought_Reproduction_P Parameter: Timepoint (day) Value: 10
  misc_feature: MA Experiment 20001905 PARAMETER Experiment Name: At_Drought_Reproduction_P Parameter: Tissue Value: Rosettes
  misc_feature: MA Experiment 20001905 PARAMETER Experiment Name: At_Drought_Reproduction_P Parameter: Treatment Value: Drought vs. No Drought
gaactccctgaacacaagtcgcataaaacgaaggaacaatctagaagaagaacgataacatccaatctctctttatattccttccttccattgtggcaataatcaatcgatggcgaaggagcttgctgataaggctaaagaggctttcgtagacgatgacttcgatgttgctgttgacttgtactccaaagccattgacttggatcctaattgcgctgagttcttcgctgatcgtgctcaggcctatatcaaactcgaaagcttcactgaggccgtggcagatgcgaacaaagcaattgagttggatccttcattgaccaaagcttacctaagaaaaggaactgcctgtatgaagcttgaagagtatcggactgctaaaacagctcttgaaaagggtgcctctatcacgccgagtgaatccaaatttaagaagttgatagatgaatgcaattttctaatcacagaagaagagaaagatttggttcaaccggtgccttcgactttgccttcaagtgtgacagcaccaccagtatctgaacttgatgtcacccctacagccaagtacaggcacgagtactaccaaaagccagaggaagttgtggtaactgtttttgcaaaaggaatacccaagcagaatgttaacatcgactttggtgaacaaattctgagtgttgtgattgaggttcctggagaggatgcgtattatctccaaccgagattgtttggaaagataataccagataagtgcaaatatgaagtattgtcgaccaaaattgagatctgtcttgcaaaagccgatataatcacatgggcctccctcgaacacggcaaagggccagcggttttgccaaagcctaatgtctcatcagaggtttcacagaggccagcttatccatcttctaagaaagttaaggactgggacaagctggaagctgaagtgaagaagcaggaaaaagatgagaagctggaaggagacgcagctttgaacaaattcttccgggagatataccagaatgcggatgaggatatgaggcgagcgatgagcaaatcatttgtggaatcgaatgggacagtgctgtcaacaaactggcaagaggttgggactaagacaatcgagagtactcctccggatggcatggagctcaagaaatgggagatctgatctgatatgatatgatgatcctttcctttttatgcagttgtgaattttgcctaaatgtagacaaatcttgaaacctggtccctttcttcctgtaatgaggatcctaaggtttttgctttttt

SEQ ID NO: 48150 - protein, 350 aa, Arabidopsis thaliana
  peptide (1)..(350): Ceres Seq. ID no. 13649800
  misc_feature (150)..(237): Pfam Name: CS domain Pfam Description: CS domain
  misc_feature (2)..(350): Homolog of NCBI NO: 29468339 NR Description: SGT1 [Nicotiana benthamiana]
  misc_feature (33)..(350): Homolog of NCBI NO: 6468695 NR Description: putative protein phosphatase [Rubus idaeus]
  misc_feature (2)..(349): Homolog of NCBI NO: 6581058 NR Description: Sgt1 [Oryza sativa]
  misc_feature (2)..(349): Homolog of NCBI NO: 34912836 NR Description: Sgt1 [Oryza sativa (japonica cultivar-group)]
  misc_feature (78)..(350): Homolog of NCBI NO: 30524966 NR Description: SGT1-like protein [Arabidopsis thaliana]
  misc_feature (1)..(349): Homolog of NCBI NO: 15237122 NR Description: phosphatase - related [Arabidopsis thaliana]
  misc_feature (1)..(349): Homolog of NCBI NO: 40974917 NR Description: SGT1-like protein [Brassica oleracea]
  misc_feature (1)..(349): Homolog of NCBI NO: 40974915 NR Description: SGT1-like protein [Brassica oleracea]
  misc_feature (1)..(350): Homolog of NCBI NO: 17017308 NR Description: SGT1a [Arabidopsis thaliana]
  misc_feature (1)..(350): Homolog of NCBI NO: 15236528 NR Description: phosphatase - related [Arabidopsis thaliana]
MAKELADKAKEAFVDDDFDVAVDLYSKAIDLDPNCAEFFADRAQAYIKLESFTEAVADANKAIELDPSLTKAYLRKGTACMKLEEYRTAKTALEKGASITPSESKFKKLIDECNFLITEEEKDLVQPVPSTLPSSVTAPPVSELDVTPTAKYRHEYYQKPEEVVVTVFAKGIPKQNVNIDFGEQILSVVIEVPGEDAYYLQPRLFGKIIPDKCKYEVLSTKIEICLAKADIITWASLEHGKGPAVLPKPNVSSEVSQRPAYPSSKKVKDWDKLEAEVKKQEKDEKLEGDAALNKFFREIYQNADEDMRRAMSKSFVESNGTVLSTNWQEVGTKTIESTPPDGMELKKWEI

SEQ ID NO: 48151 - protein, 270 aa, Arabidopsis thaliana
  peptide (1)..(270): Ceres Seq. ID no. 13649801
  misc_feature (70)..(157): Pfam Name: CS domain Pfam Description: CS domain
  misc_feature (1)..(270): Homolog of NCBI NO: 29468339 NR Description: SGT1 [Nicotiana benthamiana]
  misc_feature (1)..(270): Homolog of NCBI NO: 6468695 NR Description: putative protein phosphatase [Rubus idaeus]
  misc_feature (1)..(269): Homolog of NCBI NO: 6581058 NR Description: Sgt1 [Oryza sativa]
  misc_feature (1)..(269): Homolog of NCBI NO: 34912836 NR Description: Sgt1 [Oryza sativa (japonica cultivar-group)]
  misc_feature (1)..(270): Homolog of NCBI NO: 30524966 NR Description: SGT1-like protein [Arabidopsis thaliana]
  misc_feature (1)..(269): Homolog of NCBI NO: 15237122 NR Description: phosphatase - related [Arabidopsis thaliana]
  misc_feature (1)..(269): Homolog of NCBI NO: 40974917 NR Description: SGT1-like protein [Brassica oleracea]
  misc_feature (1)..(269): Homolog of NCBI NO: 40974915 NR Description: SGT1-like protein [Brassica oleracea]
  misc_feature (1)..(270): Homolog of NCBI NO: 17017308 NR Description: SGT1a [Arabidopsis thaliana]
  misc_feature (1)..(270): Homolog of NCBI NO: 15236528 NR Description: phosphatase - related [Arabidopsis thaliana]
MKLEEYRTAKTALEKGASITPSESKFKKLIDECNFLITEEEKDLVQPVPSTLPSSVTAPPVSELDVTPTAKYRHEYYQKPEEVVVTVFAKGIPKQNVNIDFGEQILSVVIEVPGEDAYYLQPRLFGKIIPDKCKYEVLSTKIEICLAKADIITWASLEHGKGPAVLPKPNVSSEVSQRPAYPSSKKVKDWDKLEAEVKKQEKDEKLEGDAALNKFFREIYQNADEDMRRAMSKSFVESNGTVLSTNWQEVGTKTIESTPPDGMELKKWEI

SEQ ID NO: 48152 - DNA, 1030 bp, Arabidopsis thaliana
  misc_feature (1)..(1030): Ceres Seq. ID no. 13649803
  misc_feature: MA Experiment ID: 20000171 Result: Up-regulated in Transcription
  misc_feature: MA Experiment 20000171 PARAMETER Experiment Name: At_42deg_Heat_P Parameter: Age (day) Value: 14
  misc_feature: MA Experiment 20000171 PARAMETER Experiment Name: At_42deg_Heat_P Parameter: Organism Value: A. thaliana
  misc_feature: MA Experiment 20000171 PARAMETER Experiment Name: At_42deg_Heat_P Parameter: Plant Line Value: WS
  misc_feature: MA Experiment 20000171 PARAMETER Experiment Name: At_42deg_Heat_P Parameter: Temperature (deg C) Value: 42 vs. 22
  misc_feature: MA Experiment 20000171 PARAMETER Experiment Name: At_42deg_Heat_P Parameter: Timepoint (hr) Value: 1
  misc_feature: MA Experiment 20000171 PARAMETER Experiment Name: At_42deg_Heat_P Parameter: Tissue Value: Aerial
  misc_feature: MA Experiment ID: 20000173 Result: Up-regulated in Transcription
  misc_feature: MA Experiment 20000173 PARAMETER Experiment Name: At_42deg_Heat_P Parameter: Age (day) Value: 14
  misc_feature: MA Experiment 20000173 PARAMETER Experiment Name: At_42deg_Heat_P Parameter: Organism Value: A. thaliana
  misc_feature: MA Experiment 20000173 PARAMETER Experiment Name: At_42deg_Heat_P Parameter: Plant Line Value: WS
  misc_feature: MA Experiment 20000173 PARAMETER Experiment Name: At_42deg_Heat_P Parameter: Temperature (deg C) Value: 42 vs. 22
  misc_feature: MA Experiment 20000173 PARAMETER Experiment Name: At_42deg_Heat_P Parameter: Timepoint (hr) Value: 6
  misc_feature: MA Experiment 20000173 PARAMETER Experiment Name: At_42deg_Heat_P Parameter: Tissue Value: Aerial
  misc_feature: MA Experiment ID: 20000180 Result: Up-regulated in Transcription
  misc_feature: MA Experiment 20000180 PARAMETER Experiment Name: At_Germinating_Seeds_P Parameter: Age (hr) Value: 24 vs. 0
  misc_feature: MA Experiment 20000180 PARAMETER Experiment Name: At_Germinating_Seeds_P Parameter: Tissue Value: Germinating Seeds
  misc_feature: MA Experiment ID: 20000182 Result: Up-regulated in Transcription
  misc_feature: MA Experiment 20000182 PARAMETER Experiment Name: At_2mM_SA_P Parameter: Age (day) Value: 14
  misc_feature: MA Experiment 20000182 PARAMETER Experiment Name: At_2mM_SA_P Parameter: Organism Value: A. thaliana
  misc_feature: MA Experiment 20000182 PARAMETER Experiment Name: At_2mM_SA_P Parameter: Plant Line Value: WS
  misc_feature: MA Experiment 20000182 PARAMETER Experiment Name: At_2mM_SA_P Parameter: Timepoint (hr) Value: 6
  misc_feature: MA Experiment 20000182 PARAMETER Experiment Name: At_2mM_SA_P Parameter: Tissue Value: Aerial
  misc_feature: MA Experiment 20000182 PARAMETER Experiment Name: At_2mM_SA_P Parameter: Treatment Value: 2mM SA vs. No Treatment
  misc_feature: MA Experiment ID: 20000184 Result: Up-regulated in Transcription
  misc_feature: MA Experiment 20000184 PARAMETER Experiment Name: At_Shoots__P Parameter: Age (day) Value: 7
  misc_feature: MA Experiment 20000184 PARAMETER Experiment Name: At_Shoots__P Parameter: Tissue Value: Shoots vs. Whole Plant
  misc_feature: MA Experiment ID: 20000185 Result: Up-regulated in Transcription
  misc_feature: MA Experiment 20000185 PARAMETER Experiment Name: At_Roots__P Parameter: Age (day) Value: 7 vs. 21
  misc_feature: MA Experiment 20000185 PARAMETER Experiment Name: At_Roots__P Parameter: Organism Value: A. thaliana
  misc_feature: MA Experiment 20000185 PARAMETER Experiment Name: At_Roots__P Parameter: Tissue Value: Roots vs. Whole Plant
  misc_feature: MA Experiment ID: 20000213 Result: Up-regulated in Transcription
  misc_feature: MA Experiment 20000213 PARAMETER Experiment Name: At_4deg_Cold_P Parameter: Timepoint (hr) Value: 2
  misc_feature: MA Experiment ID: 20000264 Result: Down-regulated in Transcription
  misc_feature: MA Experiment 20000264 PARAMETER Experiment Name: At_Open_Flower_P Parameter: Age (day) Value: 21
  misc_feature: MA Experiment 20000264 PARAMETER Experiment Name: At_Open_Flower_P Parameter: Plant Line Value: WS
  misc_feature: MA Experiment 20000264 PARAMETER Experiment Name: At_Open_Flower_P Parameter: Tissue Value: Open Flower vs. Whole Plant
  misc_feature: MA Experiment ID: 20000265 Result: Down-regulated in Transcription
  misc_feature: MA Experiment 20000265 PARAMETER Experiment Name: At_Open_Flower_P Parameter: Age (day) Value: 21
  misc_feature: MA Experiment 20000265 PARAMETER Experiment Name: At_Open_Flower_P Parameter: Plant Line Value: WS
  misc_feature: MA Experiment 20000265 PARAMETER Experiment Name: At_Open_Flower_P Parameter: Tissue Value: Closed Flower vs. Whole Plant
  misc_feature: MA Experiment ID: 20000439 Result: Up-regulated in Transcription
  misc_feature: MA Experiment 20000439 PARAMETER Experiment Name: At_Roots__P Parameter: Age (day) Value: 14 vs. 21
  misc_feature: MA Experiment 20000439 PARAMETER Experiment Name: At_Roots__P Parameter: Organism Value: A. thaliana
  misc_feature: MA Experiment 20000439 PARAMETER Experiment Name: At_Roots__P Parameter: Tissue Value: Roots vs. Whole Plant
  misc_feature: MA Experiment ID: 20000441 Result: Up-regulated in Transcription
  misc_feature: MA Experiment 20000441 PARAMETER Experiment Name: At_1uM_BR-BRZ__P Parameter: Tissue Value: Shoot Apices
  misc_feature: MA Experiment 20000441 PARAMETER Experiment Name: At_1uM_BR-BRZ__P Parameter: Treatment Value: 1uM BR vs. No Treatment
  misc_feature: MA Experiment ID: 20000443 Result: Up-regulated in Transcription
  misc_feature: MA Experiment 20000443 PARAMETER Experiment Name: At_1uM_BR-BRZ__P Parameter: Tissue Value: Shoot Apices
  misc_feature: MA Experiment 20000443 PARAMETER Experiment Name: At_1uM_BR-BRZ__P Parameter: Treatment Value: 1uM BRZ vs. No Treatment
  misc_feature: MA Experiment ID: 20000496 Result: Down-regulated in Transcription
  misc_feature: MA Experiment 20000496 PARAMETER Experiment Name: At_Guard_Cells_P Parameter: Harvest Date Value: 7/19/2002
  misc_feature: MA Experiment 20000496 PARAMETER Experiment Name: At_Guard_Cells_P Parameter: Organism Value: Canola
  misc_feature: MA Experiment 20000496 PARAMETER Experiment Name: At_Guard_Cells_P Parameter: Tissue Value: Guard Cells vs. Leaves
  misc_feature: MA Experiment ID: 20000709 Result: Up-regulated in Transcription
  misc_feature: MA Experiment 20000709 PARAMETER Experiment Name: At_15mM_NH4NO3_L-to-H_P Parameter: Age (hr) Value: 14
  misc_feature: MA Experiment 20000709 PARAMETER Experiment Name: At_15mM_NH4NO3_L-to-H_P Parameter: Organism Value: A. thaliana
  misc_feature: MA Experiment 20000709 PARAMETER Experiment Name: At_15mM_NH4NO3_L-to-H_P Parameter: Plant Line Value: WS
  misc_feature: MA Experiment 20000709 PARAMETER Experiment Name: At_15mM_NH4NO3_L-to-H_P Parameter: Timepoint (hr) Value: 4
  misc_feature: MA Experiment 20000709 PARAMETER Experiment Name: At_15mM_NH4NO3_L-to-H_P Parameter: Tissue Value: Aerial
  misc_feature: MA Experiment 20000709 PARAMETER Experiment Name: At_15mM_NH4NO3_L-to-H_P Parameter: Treatment Value: 15mM NH4NO3 vs. 30mM Mannitol
  misc_feature: MA Experiment ID: 20000794 Result: Down-regulated in Transcription
  misc_feature: MA Experiment 20000794 PARAMETER Experiment Name: At_Petals_P Parameter: Age (day) Value: 23-25 days
  misc_feature: MA Experiment 20000794 PARAMETER Experiment Name: At_Petals_P Parameter: Plant Line Value: WS
  misc_feature: MA Experiment 20000794 PARAMETER Experiment Name: At_Petals_P Parameter: Tissue Value: Petals vs. Whole plant
  misc_feature: MA Experiment ID: 20001248 Result: Down-regulated in Transcription
  misc_feature: MA Experiment 20001248 PARAMETER Experiment Name: At_Far-red-induction_P Parameter: Age (day) Value: 7
  misc_feature: MA Experiment 20001248 PARAMETER Experiment Name: At_Far-red-induction_P Parameter: Light Value: Far-red vs. White
  misc_feature: MA Experiment 20001248 PARAMETER Experiment Name: At_Far-red-induction_P Parameter: Organism Value: A. thaliana
  misc_feature: MA Experiment 20001248 PARAMETER Experiment Name: At_Far-red-induction_P Parameter: Plant Line Value: Columbia
  misc_feature: MA Experiment 20001248 PARAMETER Experiment Name: At_Far-red-induction_P Parameter: Timepoint (hr) Value: 4
  misc_feature: MA Experiment 20001248 PARAMETER Experiment Name: At_Far-red-induction_P Parameter: Tissue Value: Whole Plant
  misc_feature: MA Experiment ID: 20001450 Result: Down-regulated in Transcription
  misc_feature: MA Experiment 20001450 PARAMETER Experiment Name: At_Far-red-induction_P Parameter: Age (day) Value: 7
  misc_feature: MA Experiment 20001450 PARAMETER Experiment Name: At_Far-red-induction_P Parameter: Light Value: Far-red vs. White
  misc_feature: MA Experiment 20001450 PARAMETER Experiment Name: At_Far-red-induction_P Parameter: Organism Value: A. thaliana
  misc_feature: MA Experiment 20001450 PARAMETER Experiment Name: At_Far-red-induction_P Parameter: Plant Line Value: Columbia
  misc_feature: MA Experiment 20001450 PARAMETER Experiment Name: At_Far-red-induction_P Parameter: Timepoint (hr) Value: 8
  misc_feature: MA Experiment 20001450 PARAMETER Experiment Name: At_Far-red-induction_P Parameter: Tissue Value: Whole Plant
  misc_feature: MA Experiment ID: 20001451 Result: Down-regulated in Transcription
  misc_feature: MA Experiment 20001451 PARAMETER Experiment Name: At_Far-red-induction_P Parameter: Age (day) Value: 7
  misc_feature: MA Experiment 20001451 PARAMETER Experiment Name: At_Far-red-induction_P Parameter: Light Value: Far-red vs. White
  misc_feature: MA Experiment 20001451 PARAMETER Experiment Name: At_Far-red-induction_P Parameter: Organism Value: A. thaliana
  misc_feature: MA Experiment 20001451 PARAMETER Experiment Name: At_Far-red-induction_P Parameter: Plant Line Value: Columbia
  misc_feature: MA Experiment 20001451 PARAMETER Experiment Name: At_Far-red-induction_P Parameter: Timepoint (hr) Value: 24
  misc_feature: MA Experiment 20001451 PARAMETER Experiment Name: At_Far-red-induction_P Parameter: Tissue Value: Whole Plant
  misc_feature: MA Experiment ID: 20001555 Result: Down-regulated in Transcription
  misc_feature: MA Experiment 20001555 PARAMETER Experiment Name: At_Drought_Soil_Dry_P Parameter: Age (day) Value: 24
  misc_feature: MA Experiment 20001555 PARAMETER Experiment Name: At_Drought_Soil_Dry_P Parameter: Organism Value: A. thaliana
  misc_feature: MA Experiment 20001555 PARAMETER Experiment Name: At_Drought_Soil_Dry_P Parameter: Plant Line Value: WS
  misc_feature: MA Experiment 20001555 PARAMETER Experiment Name: At_Drought_Soil_Dry_P Parameter: Post Timepoint (hr) Value: None
  misc_feature: MA Experiment 20001555 PARAMETER Experiment Name: At_Drought_Soil_Dry_P Parameter: Post-Treatment Value: None
  misc_feature: MA Experiment 20001555 PARAMETER Experiment Name: At_Drought_Soil_Dry_P Parameter: Timepoint (day) Value: 10
  misc_feature: MA Experiment 20001555 PARAMETER Experiment Name: At_Drought_Soil_Dry_P Parameter: Treatment Value: Drought vs. No Drought
  misc_feature: MA Experiment ID: 20001556 Result: Down-regulated in Transcription
  misc_feature: MA Experiment 20001556 PARAMETER Experiment Name: At_Drought_Soil_Dry_P Parameter: Age (day) Value: 26
  misc_feature: MA Experiment 20001556 PARAMETER Experiment Name: At_Drought_Soil_Dry_P Parameter: Organism Value: A. thaliana
  misc_feature: MA Experiment 20001556 PARAMETER Experiment Name: At_Drought_Soil_Dry_P Parameter: Plant Line Value: WS
  misc_feature: MA Experiment 20001556 PARAMETER Experiment Name: At_Drought_Soil_Dry_P Parameter: Post Timepoint (hr) Value: None
  misc_feature: MA Experiment 20001556 PARAMETER Experiment Name: At_Drought_Soil_Dry_P Parameter: Post-Treatment Value: None
  misc_feature: MA Experiment 20001556 PARAMETER Experiment Name: At_Drought_Soil_Dry_P Parameter: Timepoint (day) Value: 12
  misc_feature: MA Experiment 20001556 PARAMETER Experiment Name: At_Drought_Soil_Dry_P Parameter: Treatment Value: Drought vs. No Drought
  misc_feature: MA Experiment ID: 20001557 Result: Down-regulated in Transcription
  misc_feature: MA Experiment 20001557 PARAMETER Experiment Name: At_Drought_Soil_Dry_P Parameter: Age (day) Value: 27
  misc_feature: MA Experiment 20001557 PARAMETER Experiment Name: At_Drought_Soil_Dry_P Parameter: Organism Value: A. thaliana
  misc_feature: MA Experiment 20001557 PARAMETER Experiment Name: At_Drought_Soil_Dry_P Parameter: Plant Line Value: WS
  misc_feature: MA Experiment 20001557 PARAMETER Experiment Name: At_Drought_Soil_Dry_P Parameter: Post Timepoint (hr) Value: 3
  misc_feature: MA Experiment 20001557 PARAMETER Experiment Name: At_Drought_Soil_Dry_P Parameter: Post-Treatment Value: Re-Water vs. No Drought
  misc_feature: MA Experiment 20001557 PARAMETER Experiment Name: At_Drought_Soil_Dry_P Parameter: Timepoint (day) Value: 13
  misc_feature: MA Experiment 20001557 PARAMETER Experiment Name: At_Drought_Soil_Dry_P Parameter: Treatment Value: Drought vs. No Drought
  misc_feature: MA Experiment ID: 20001904 Result: Down-regulated in Transcription
  misc_feature: MA Experiment 20001904 PARAMETER Experiment Name: At_Drought_Reproduction_P Parameter: Age (day) Value: 37
  misc_feature: MA Experiment 20001904 PARAMETER Experiment Name: At_Drought_Reproduction_P Parameter: Organism Value: A. thaliana
  misc_feature: MA Experiment 20001904 PARAMETER Experiment Name: At_Drought_Reproduction_P Parameter: Plant Line Value: WS
  misc_feature: MA Experiment 20001904 PARAMETER Experiment Name: At_Drought_Reproduction_P Parameter: Timepoint (day) Value: 7
  misc_feature: MA Experiment 20001904 PARAMETER Experiment Name: At_Drought_Reproduction_P Parameter: Tissue Value: Rosettes
  misc_feature: MA Experiment 20001904 PARAMETER Experiment Name: At_Drought_Reproduction_P Parameter: Treatment Value: Drought vs. No Drought
  misc_feature: MA Experiment ID: 20001907 Result: Down-regulated in Transcription
  misc_feature: MA Experiment 20001907 PARAMETER Experiment Name: At_Drought_Reproduction_P Parameter: Age (day) Value: 37
  misc_feature: MA Experiment 20001907 PARAMETER Experiment Name: At_Drought_Reproduction_P Parameter: Organism Value: A. thaliana
  misc_feature: MA Experiment 20001907 PARAMETER Experiment Name: At_Drought_Reproduction_P Parameter: Plant Line Value: WS
  misc_feature: MA Experiment 20001907 PARAMETER Experiment Name: At_Drought_Reproduction_P Parameter: Timepoint (day) Value: 7
  misc_feature: MA Experiment 20001907 PARAMETER Experiment Name: At_Drought_Reproduction_P Parameter: Tissue Value: Siliques
  misc_feature: MA Experiment 20001907 PARAMETER Experiment Name: At_Drought_Reproduction_P Parameter: Treatment Value: Drought vs. No Drought
gaaagagagacgtgcctgtgggtagtgggtggtggtgagaagattctggaaaaatgggagcaattcaagctcgtcttcccttgttcctttctcccccttctataaaacaccataccttccttcattcttcttcatccaattccaatttcaaaatcagatccaacaaatcttcttcttcttcttcttcttcgatcatcatggccagtatcaaggttcacggagttcccatgtccaccgccacaatgcgcgtcctcgctactctttacgagaaagatctccagttcgagctcatccccgtcgatatgagagccggtgcccacaagcaagaggcccaccttgccctcaaccccttcggtcaaattcctgctctcgaggacggtgatttgacgcttttcgagtcaagagccatcacacagtacctagcagaggaatacagtgagaaaggtgaaaagcttatctcccaagactgcaagaaagtcaaggcaaccactaacgtatggcttcaagttgaaggtcaacagtttgaccctaacgcctctaagcttgccttcgagcgtgtctttaaaggcatgttcggcatgaccactgaccctgccgctgtccaagagctcgaaggtaagctccagaaagtcttggatgtctacgaggctaggctcgccaaatctgagttcttggctggtgattccttcactcttgctgatcttcaccacctcccagccatccattacttgttgggtactgactccaaggtgctctttgactctcgccctaaggttagcgagtggattaagaagatctctgccaggcctgcttgggctaaggttattgacctccagaagcagtagtgaccctctctcattcttcacttcttttcttttccttttgcccaaataaacgagtccagtgattttcttttcttggcttatgtacttgtgttttcagtattatttatgtcatcatcatcctcctcttttgtgttattgttgggttcattcacatttgtgcaattaaaaaccagagtttaaacgcc

SEQ ID NO: 48153 - protein, 263 aa, Arabidopsis thaliana [sequence omitted]

SEQ ID NO: 48154 - protein, 215 aa, Arabidopsis thaliana
  peptide (1)..(215): Ceres Seq. ID no. 13649805
  misc_feature (3)..(214): Homolog of NCBI NO: 232202 NR Description: GLUTATHIONE S-TRANSFERASE PARB (GST CLASS-PHI)
  misc_feature (3)..(215): Homolog of NCBI NO: 444341 NR Description: glutathione S-transferase
  misc_feature (3)..(215): Homolog of NCBI NO: 417093 NR Description: GLUTATHIONE S-TRANSFERASE (GST CLASS-PHI)
  misc_feature (3)..(214): Homolog of NCBI NO: 1170088 NR Description: GLUTATHIONE S-TRANSFERASE APIC (GST CLASS-PHI)
  misc_feature (4)..(214): Homolog of NCBI NO: 1170094 NR Description: Glutathione S-transferase (GST class-PHI) (25 kDa
  misc_feature (3)..(215): Homolog of NCBI NO: 7434067 NR Description: glutathione transferase (EC 2.5.1.18), class-phi
  misc_feature (1)..(177): Homolog of NCBI NO: 14532562 NR Description: At2g47730/F17A22.12 [Arabidopsis thaliana]
  misc_feature (1)..(215): Homolog of NCBI NO: 1402898 NR Description: gst6 [Arabidopsis thaliana]
  misc_feature (1)..(215): Homolog of NCBI NO: 12643792 NR Description: Glutathione S-transferase 6 (GST class phi)
  misc_feature (1)..(215): Homolog of NCBI NO: 30690772 NR Description: glutathione transferase, putative (GST6)
  misc_feature (3)..(214): Homolog of NCBI NO: 232202 NR Description: GLUTATHIONE S-TRANSFERASE PARB (GST CLASS-PHI)
  misc_feature (3)..(215): Homolog of NCBI NO: 444341 NR Description: glutathione S-transferase
  misc_feature (3)..(215): Homolog of NCBI NO: 417093 NR Description: GLUTATHIONE S-TRANSFERASE (GST CLASS-PHI)
  misc_feature (3)..(214): Homolog of NCBI NO: 1170088 NR Description: GLUTATHIONE S-TRANSFERASE APIC (GST CLASS-PHI)
  misc_feature (4)..(214): Homolog of NCBI NO: 1170094 NR Description: Glutathione S-transferase (GST class-PHI) (25 kDa
  misc_feature (3)..(215): Homolog of NCBI NO: 7434067 NR Description: glutathione transferase (EC 2.5.1.18), class-phi
  misc_feature (1)..(177): Homolog of NCBI NO: 14532562 NR Description: At2g47730/F17A22.12 [Arabidopsis thaliana]
  misc_feature (1)..(215): Homolog of NCBI NO: 1402898 NR Description: gst6 [Arabidopsis thaliana]
  misc_feature (1)..(215): Homolog of NCBI NO: 12643792 NR Description: Glutathione S-transferase 6 (GST class phi)
  misc_feature (1)..(215): Homolog of NCBI NO: 30690772 NR Description: glutathione transferase, putative (GST6)
MASIKVHGVPMSTATMRVLATLYEKDLQFELIPVDMRAGAHKQEAHLALNPFGQIPALEDGDLTLFESRAITQYLAEEYSEKGEKLISQDCKKVKATTNVWLQVEGQQFDPNASKLAFERVFKGMFGMTTDPAAVQELEGKLQKVLDVYEARLAKSEFLAGDSFTLADLHHLPAIHYLLGTDSKVLFDSRPKVSEWIKKISARPAWAKVIDLQKQ

SEQ ID NO: 48155 - protein, 205 aa, Arabidopsis thaliana
  peptide (1)..(205): Ceres Seq. ID no. 13649806
  misc_feature (1)..(204): Homolog of NCBI NO: 232202 NR Description: GLUTATHIONE S-TRANSFERASE PARB (GST CLASS-PHI)
  misc_feature (1)..(205): Homolog of NCBI NO: 444341 NR Description: glutathione S-transferase
  misc_feature (1)..(205): Homolog of NCBI NO: 417093 NR Description: GLUTATHIONE S-TRANSFERASE (GST CLASS-PHI)
  misc_feature (1)..(204): Homolog of NCBI NO: 1170088 NR Description: GLUTATHIONE S-TRANSFERASE APIC (GST CLASS-PHI)
  misc_feature (1)..(204): Homolog of NCBI NO: 1170094 NR Description: Glutathione S-transferase (GST class-PHI) (25 kDa
  misc_feature (1)..(205): Homolog of NCBI NO: 7434067 NR Description: glutathione transferase (EC 2.5.1.18), class-phi
  misc_feature (1)..(167): Homolog of NCBI NO: 14532562 NR Description: At2g47730/F17A22.12 [Arabidopsis thaliana]
  misc_feature (1)..(205): Homolog of NCBI NO: 1402898 NR Description: gst6 [Arabidopsis thaliana]
  misc_feature (1)..(205): Homolog of NCBI NO: 12643792 NR Description: Glutathione S-transferase 6 (GST class phi)
  misc_feature (1)..(205): Homolog of NCBI NO: 30690772 NR Description: glutathione transferase, putative (GST6)
  misc_feature (1)..(204): Homolog of NCBI NO: 232202 NR Description: GLUTATHIONE S-TRANSFERASE PARB (GST CLASS-PHI)
  misc_feature (1)..(205): Homolog of NCBI NO: 444341 NR Description: glutathione S-transferase
  misc_feature (1)..(205): Homolog of NCBI NO: 417093 NR Description: GLUTATHIONE S-TRANSFERASE (GST CLASS-PHI)
  misc_feature (1)..(204): Homolog of NCBI NO: 1170088 NR Description: GLUTATHIONE S-TRANSFERASE APIC (GST CLASS-PHI)
  misc_feature (1)..(204): Homolog of NCBI NO: 1170094 NR Description: Glutathione S-transferase (GST class-PHI) (25 kDa
  misc_feature (1)..(205): Homolog of NCBI NO: 7434067 NR Description: glutathione transferase (EC 2.5.1.18), class-phi
  misc_feature (1)..(167): Homolog of NCBI NO: 14532562 NR Description: At2g47730/F17A22.12 [Arabidopsis thaliana]
  misc_feature (1)..(205): Homolog of NCBI NO: 1402898 NR Description: gst6 [Arabidopsis thaliana]
  misc_feature (1)..(205): Homolog of NCBI NO: 12643792 NR Description: Glutathione S-transferase 6 (GST class phi)
  misc_feature (1)..(205): Homolog of NCBI NO: 30690772 NR Description: glutathione transferase, putative (GST6)
MSTATMRVLATLYEKDLQFELIPVDMRAGAHKQEAHLALNPFGQIPALEDGDLTLFESRAITQYLAEEYSEKGEKLISQDCKKVKATTNVWLQVEGQQFDPNASKLAFERVFKGMFGMTTDPAAVQELEGKLQKVLDVYEARLAKSEFLAGDSFTLADLHHLPAIHYLLGTDSKVLFDSRPKVSEWIKKISARPAWAKVIDLQKQ

SEQ ID NO: 48156 - DNA, 907 bp, Arabidopsis thaliana
  misc_feature (1)..(907): Ceres Seq. ID no. 13649142
  misc_feature: MA Experiment ID: 108435 Result: Down-regulated in Transcription
  misc_feature: MA Experiment 108435 PARAMETER Experiment Name: At_stm_Mutants_cDNA_P Parameter: Plant Line Value: wt Landsburg vs stm
  misc_feature: MA Experiment 108435 PARAMETER Experiment Name: At_stm_Mutants_cDNA_P Parameter: Tissue Value: Shoot Apical Meristem Region
  misc_feature: MA Experiment ID: 108462 Result: Up-regulated in Transcription
  misc_feature: MA Experiment 108462 PARAMETER Experiment Name: At_Germinating_Seeds_cDNA_P Parameter: Age (day) Value: 2 vs. 0
  misc_feature: MA Experiment 108462 PARAMETER Experiment Name: At_Germinating_Seeds_cDNA_P Parameter: Tissue Value: Germinating Seeds
  misc_feature: MA Experiment ID: 108464 Result: Up-regulated in Transcription
  misc_feature: MA Experiment 108464 PARAMETER Experiment Name: At_Germinating_Seeds_cDNA_P Parameter: Age (day) Value: 4 vs. 0
  misc_feature: MA Experiment 108464 PARAMETER Experiment Name: At_Germinating_Seeds_cDNA_P Parameter: Tissue Value: Germinating Seeds
  misc_feature: MA Experiment ID: 108488 Result: Up-regulated in Transcription
  misc_feature: MA Experiment ID: 20000069 Result: Down-regulated in Transcription
  misc_feature: MA Experiment 20000069 PARAMETER Experiment Name: At_100uM_ABA_Mutants_cDNA_P Parameter: Plant Line Value: CS23
  misc_feature: MA Experiment 20000069 PARAMETER Experiment Name: At_100uM_ABA_Mutants_cDNA_P Parameter: Timepoint (hr) Value: 6
  misc_feature: MA Experiment 20000069 PARAMETER Experiment Name: At_100uM_ABA_Mutants_cDNA_P Parameter: Tissue Value: Aerial
  misc_feature: MA Experiment 20000069 PARAMETER Experiment Name: At_100uM_ABA_Mutants_cDNA_P Parameter: Treatment Value: 100uM ABA vs. No Treatment
  misc_feature: MA Experiment ID: 20000070 Result: Down-regulated in Transcription
  misc_feature: MA Experiment 20000070 PARAMETER Experiment Name: At_100uM_ABA_Mutants_cDNA_P Parameter: Plant Line Value: CS24
  misc_feature: MA Experiment 20000070 PARAMETER Experiment Name: At_100uM_ABA_Mutants_cDNA_P Parameter: Timepoint (hr) Value: 6
  misc_feature: MA Experiment 20000070 PARAMETER Experiment Name: At_100uM_ABA_Mutants_cDNA_P Parameter: Tissue Value: Aerial
  misc_feature: MA Experiment 20000070 PARAMETER Experiment Name: At_100uM_ABA_Mutants_cDNA_P Parameter: Treatment Value: 100uM ABA vs. No Treatment
  misc_feature: MA Experiment ID: 20000071 Result: Down-regulated in Transcription
  misc_feature: MA Experiment 20000071 PARAMETER Experiment Name: At_100uM_ABA_Mutants_cDNA_P Parameter: Plant Line Value: CS8104
  misc_feature: MA Experiment 20000071 PARAMETER Experiment Name: At_100uM_ABA_Mutants_cDNA_P Parameter: Timepoint (hr) Value: 6
  misc_feature: MA Experiment 20000071 PARAMETER Experiment Name: At_100uM_ABA_Mutants_cDNA_P Parameter: Tissue Value: Aerial
  misc_feature: MA Experiment 20000071 PARAMETER Experiment Name: At_100uM_ABA_Mutants_cDNA_P Parameter: Treatment Value: 100uM ABA vs. No Treatment
  misc_feature: MA Experiment ID: 20000072 Result: Down-regulated in Transcription
  misc_feature: MA Experiment 20000072 PARAMETER Experiment Name: At_100uM_ABA_Mutants_cDNA_P Parameter: Plant Line Value: CS8105
  misc_feature: MA Experiment 20000072 PARAMETER Experiment Name: At_100uM_ABA_Mutants_cDNA_P Parameter: Timepoint (hr) Value: 6
  misc_feature: MA Experiment 20000072 PARAMETER Experiment Name: At_100uM_ABA_Mutants_cDNA_P Parameter: Tissue Value: Aerial
  misc_feature: MA Experiment 20000072 PARAMETER Experiment Name: At_100uM_ABA_Mutants_cDNA_P Parameter: Treatment Value: 100uM ABA vs. No Treatment
  misc_feature: MA Experiment ID: 20000086 Result: Down-regulated in Transcription
  misc_feature: MA Experiment 20000086 PARAMETER Experiment Name: At_100uM_ABA_Mutants_cDNA_P Parameter: Plant Line Value: CS22
  misc_feature: MA Experiment 20000086 PARAMETER Experiment Name: At_100uM_ABA_Mutants_cDNA_P Parameter: Timepoint (hr) Value: 6
  misc_feature: MA Experiment 20000086 PARAMETER Experiment Name: At_100uM_ABA_Mutants_cDNA_P Parameter: Tissue Value: Aerial
  misc_feature: MA Experiment 20000086 PARAMETER Experiment Name: At_100uM_ABA_Mutants_cDNA_P Parameter: Treatment Value: 100uM ABA vs. No Treatment
  misc_feature: MA Experiment ID: 20000087 Result: Down-regulated in Transcription
  misc_feature: MA Experiment 20000087 PARAMETER Experiment Name: At_100uM_ABA_Mutants_cDNA_P Parameter: Plant Line Value: WS
  misc_feature: MA Experiment 20000087 PARAMETER Experiment Name: At_100uM_ABA_Mutants_cDNA_P Parameter: Timepoint (hr) Value: 6
  misc_feature: MA Experiment 20000087 PARAMETER Experiment Name: At_100uM_ABA_Mutants_cDNA_P Parameter: Tissue Value: Aerial
  misc_feature: MA Experiment 20000087 PARAMETER Experiment Name: At_100uM_ABA_Mutants_cDNA_P Parameter: Treatment Value: 100uM ABA vs. No Treatment
  misc_feature: MA Experiment ID: 20000090 Result: Down-regulated in Transcription
  misc_feature: MA Experiment ID: 20000117 Result: Down-regulated in Transcription
  misc_feature: MA Experiment 20000117 PARAMETER Experiment Name: At_100uM_ABA_Mutants_cDNA_P Parameter: Plant Line Value: Columbia
  misc_feature: MA Experiment 20000117 PARAMETER Experiment Name: At_100uM_ABA_Mutants_cDNA_P Parameter: Timepoint (hr) Value: 6
  misc_feature: MA Experiment 20000117 PARAMETER Experiment Name: At_100uM_ABA_Mutants_cDNA_P Parameter: Tissue Value: Aerial
  misc_feature: MA Experiment 20000117 PARAMETER Experiment Name: At_100uM_ABA_Mutants_cDNA_P Parameter: Treatment Value: 100uM ABA vs. No Treatment
  misc_feature: MA Experiment ID: 20000184 Result: Up-regulated in Transcription
  misc_feature: MA Experiment 20000184 PARAMETER Experiment Name: At_Shoots__P Parameter: Age (day) Value: 7
  misc_feature: MA Experiment 20000184 PARAMETER Experiment Name: At_Shoots__P Parameter: Tissue Value: Shoots vs. Whole Plant
  misc_feature: MA Experiment ID: 20000185 Result: Down-regulated in Transcription
  misc_feature: MA Experiment 20000185 PARAMETER Experiment Name: At_Roots__P Parameter: Age (day) Value: 7 vs. 21
  misc_feature: MA Experiment 20000185 PARAMETER Experiment Name: At_Roots__P Parameter: Organism Value: A. thaliana
  misc_feature: MA Experiment 20000185 PARAMETER Experiment Name: At_Roots__P Parameter: Tissue Value: Roots vs. Whole Plant
  misc_feature: MA Experiment ID: 20000224 Result: Down-regulated in Transcription
  misc_feature: MA Experiment ID: 20000286 Result: Down-regulated in Transcription
  misc_feature: MA Experiment 20000286 PARAMETER Experiment Name: At_Open_Flower_P Parameter: Age (day) Value: 21
  misc_feature: MA Experiment 20000286 PARAMETER Experiment Name: At_Open_Flower_P Parameter: Plant Line Value: WS
  misc_feature: MA Experiment 20000286 PARAMETER Experiment Name: At_Open_Flower_P Parameter: Tissue Value: Half Open vs. Whole Plant
  misc_feature: MA Experiment ID: 20000437 Result: Down-regulated in Transcription
  misc_feature: MA Experiment 20000437 PARAMETER Experiment Name: At_Drought_P Parameter: Age (day) Value: 8
  misc_feature: MA Experiment 20000437 PARAMETER Experiment Name: At_Drought_P Parameter: Organism Value: A. thaliana
  misc_feature: MA Experiment 20000437 PARAMETER Experiment Name: At_Drought_P Parameter: Plant Line Value: WS
  misc_feature: MA Experiment 20000437 PARAMETER Experiment Name: At_Drought_P Parameter: Timepoint (hr) Value: 24
  misc_feature: MA Experiment 20000437 PARAMETER Experiment Name: At_Drought_P Parameter: Tissue Value: Whole Plant
  misc_feature: MA Experiment 20000437 PARAMETER Experiment Name: At_Drought_P Parameter: Treatment Value: Drought vs. No Drought
  misc_feature: MA Experiment ID: 20000438 Result: Up-regulated in Transcription
  misc_feature: MA Experiment 20000438 PARAMETER Experiment Name: At_Shoots__P Parameter: Age (day) Value: 14
  misc_feature: MA Experiment 20000438 PARAMETER Experiment Name: At_Shoots__P Parameter: Tissue Value: Shoots vs. Whole Plant
  misc_feature: MA Experiment ID: 20000439 Result: Down-regulated in Transcription
  misc_feature: MA Experiment 20000439 PARAMETER Experiment Name: At_Roots__P Parameter: Age (day) Value: 14 vs. 21
  misc_feature: MA Experiment 20000439 PARAMETER Experiment Name: At_Roots__P Parameter: Organism Value: A. thaliana
  misc_feature: MA Experiment 20000439 PARAMETER Experiment Name: At_Roots__P Parameter: Tissue Value: Roots vs. Whole Plant
  misc_feature: MA Experiment ID: 20001248 Result: Down-regulated in Transcription
  misc_feature: MA Experiment 20001248 PARAMETER Experiment Name: At_Far-red-induction_P Parameter: Age (day) Value: 7
  misc_feature: MA Experiment 20001248 PARAMETER Experiment Name: At_Far-red-induction_P Parameter: Light Value: Far-red vs. White
  misc_feature: MA Experiment 20001248 PARAMETER Experiment Name: At_Far-red-induction_P Parameter: Organism Value: A. thaliana
  misc_feature: MA Experiment 20001248 PARAMETER Experiment Name: At_Far-red-induction_P Parameter: Plant Line Value: Columbia
  misc_feature: MA Experiment 20001248 PARAMETER Experiment Name: At_Far-red-induction_P Parameter: Timepoint (hr) Value: 4
  misc_feature: MA Experiment 20001248 PARAMETER Experiment Name: At_Far-red-induction_P Parameter: Tissue Value: Whole Plant
  misc_feature: MA Experiment ID: 20001451 Result: Down-regulated in Transcription
  misc_feature: MA Experiment 20001451 PARAMETER Experiment Name: At_Far-red-induction_P Parameter: Age (day) Value: 7
  misc_feature: MA Experiment 20001451 PARAMETER Experiment Name: At_Far-red-induction_P Parameter: Light Value: Far-red vs. White
  misc_feature: MA Experiment 20001451 PARAMETER Experiment Name: At_Far-red-induction_P Parameter: Organism Value: A. thaliana
  misc_feature: MA Experiment 20001451 PARAMETER Experiment Name: At_Far-red-induction_P Parameter: Plant Line Value: Columbia
  misc_feature: MA Experiment 20001451 PARAMETER Experiment Name: At_Far-red-induction_P Parameter: Timepoint (hr) Value: 24
  misc_feature: MA Experiment 20001451 PARAMETER Experiment Name: At_Far-red-induction_P Parameter: Tissue Value: Whole Plant
  misc_feature: MA Experiment ID: 20001557 Result: Down-regulated in Transcription
  misc_feature: MA Experiment 20001557 PARAMETER Experiment Name: At_Drought_Soil_Dry_P Parameter: Age (day) Value: 27
  misc_feature: MA Experiment 20001557 PARAMETER Experiment Name: At_Drought_Soil_Dry_P Parameter: Organism Value: A. thaliana
  misc_feature: MA Experiment 20001557 PARAMETER Experiment Name: At_Drought_Soil_Dry_P Parameter: Plant Line Value: WS
  misc_feature: MA Experiment 20001557 PARAMETER Experiment Name: At_Drought_Soil_Dry_P Parameter: Post Timepoint (hr) Value: 3
  misc_feature: MA Experiment 20001557 PARAMETER Experiment Name: At_Drought_Soil_Dry_P Parameter: Post-Treatment Value: Re-Water vs. No Drought
  misc_feature: MA Experiment 20001557 PARAMETER Experiment Name: At_Drought_Soil_Dry_P Parameter: Timepoint (day) Value: 13
  misc_feature: MA Experiment 20001557 PARAMETER Experiment Name: At_Drought_Soil_Dry_P Parameter: Treatment Value: Drought vs. No Drought
  misc_feature: MA Experiment ID: 20001904 Result: Down-regulated in Transcription
  misc_feature: MA Experiment 20001904 PARAMETER Experiment Name: At_Drought_Reproduction_P Parameter: Age (day) Value: 37
  misc_feature: MA Experiment 20001904 PARAMETER Experiment Name: At_Drought_Reproduction_P Parameter: Organism Value: A. thaliana
  misc_feature: MA Experiment 20001904 PARAMETER Experiment Name: At_Drought_Reproduction_P Parameter: Plant Line Value: WS
  misc_feature: MA Experiment 20001904 PARAMETER Experiment Name: At_Drought_Reproduction_P Parameter: Timepoint (day) Value: 7
  misc_feature: MA Experiment 20001904 PARAMETER Experiment Name: At_Drought_Reproduction_P Parameter: Tissue Value: Rosettes
  misc_feature: MA Experiment 20001904 PARAMETER Experiment Name: At_Drought_Reproduction_P Parameter: Treatment Value: Drought vs. No Drought
  misc_feature: MA Experiment ID: 20001908 Result: Down-regulated in Transcription
  misc_feature: MA Experiment 20001908 PARAMETER Experiment Name: At_Drought_Reproduction_P Parameter: Age (day) Value: 40
  misc_feature: MA Experiment 20001908 PARAMETER Experiment Name: At_Drought_Reproduction_P Parameter: Organism Value: A. thaliana
  misc_feature: MA Experiment 20001908 PARAMETER Experiment Name: At_Drought_Reproduction_P Parameter: Plant Line Value: WS
  misc_feature: MA Experiment 20001908 PARAMETER Experiment Name: At_Drought_Reproduction_P Parameter: Timepoint (day) Value: 10
  misc_feature: MA Experiment 20001908 PARAMETER Experiment Name: At_Drought_Reproduction_P Parameter: Tissue Value: Siliques
  misc_feature: MA Experiment 20001908 PARAMETER Experiment Name: At_Drought_Reproduction_P Parameter: Treatment Value: Drought vs. No Drought
aacagagaaagcatctccacaatccccaaaattctttcaacacttgctctccattaatcttttagataataaacctaattgtttctgttttgtttttgtttctgtgagattcttccgaggcttgaagctcaatagctatggcttctctttcagtctcttcctcttcaaccatcatcgattcaagagctcctccttctcgactagcctccgcctccgcctcttctccgtcgtgcatttcacttcccacacttccgattcagtctcatacccgtgccgctaaagccactgcttactgtcggaagattgtgaggaacgttgtgacgagagctactactgaagttggtgaagctcctgccactactaccgaagctgagactactgagttacctgaaatcgtcaagactgctcaagaagcttgggagaaagtggatgacaagtacgctattggttctcttgcctttgctggtgtagtggctctttggggttctgctggaatgatttcggcaatcgataggcttccattggttcctggtgttcttgaacttgtaggcatcggttacacaggatggttcacttacaagaacctggtcttcaaaccagacagggaggctttgtttgagaaggtcaagagcacatacaaagacatattagggagcagctgaatcaaaggaggaagaagaagaagaagagcctttttgaggccattcatgaattggaatgaaggatatcaaaagaatctaacacaaaggccacgtccttccttcaatctttccttcttgtaactaaataattttcatcctttctctctctctgtctctggtcttttttagctcaaagtatcatccatttatgtcaaagtgttgtaaattcctcaagactatatatgagatgttttgtttcattttcc

SEQ ID NO: 48157 - protein, 174 aa, Arabidopsis thaliana
  peptide (1)..(174): Ceres Seq. ID no. 13649143
  misc_feature (22)..(173): Homolog of NCBI NO: 38175474 NR Description: unknown protein [Oryza sativa (japonica
  misc_feature (17)..(172): Homolog of NCBI NO: 34909746 NR Description: contains ESTs
  misc_feature (3)..(173): Homolog of NCBI NO: 18411555 NR Description: expressed protein [Arabidopsis thaliana]
  misc_feature (80)..(172): Homolog of NCBI NO: 21554231 NR Description: unknown [Arabidopsis thaliana]
  misc_feature (3)..(173): Homolog of NCBI NO: 687677 NR Description: unknown
  misc_feature (80)..(172): Homolog of NCBI NO: 18403896 NR Description: expressed protein [Arabidopsis thaliana]
  misc_feature (1)..(171): Homolog of NCBI NO: 37536446 NR Description: hypothetical protein [Oryza sativa (japonica
  misc_feature (27)..(174): Homolog of NCBI NO: 34393236 NR Description: unknown protein [Oryza sativa (japonica
  misc_feature (1)..(174): Homolog of NCBI NO: 21555057 NR Description: unknown [Arabidopsis thaliana]
  misc_feature (1)..(174): Homolog of NCBI NO: 18407178 NR Description: expressed protein [Arabidopsis thaliana]
MASLSVSSSSTIIDSRAPPSRLASASASSPSCISLPTLPIQSHTRAAKATAYCRKIVRNVVTRATTEVGEAPATTTEAETTELPEIVKTAQEAWEKVDDKYAIGSLAFAGVVALWGSAGMISAIDRLPLVPGVLELVGIGYTGWFTYKNLVFKPDREALFEKVKSTYKDILGSS

SEQ ID NO: 48158 - protein, 92 aa, Arabidopsis thaliana
  peptide (1)..(92): Ceres Seq. ID no. 13649144
TEKASPQSPKFFQHLLSINLLDNKPNCFCFVFVSVRFFRGLKLNSYGFSFSLFLFNHHRFKSSSFSTSLRLRLFSVVHFTSHTSDSVSYPCR

SEQ ID NO: 48159 - DNA, 2106 bp, Arabidopsis thaliana
  misc_feature (1)..(2106): Ceres Seq. ID no. 13649807
  misc_feature: MA Experiment ID: 20000166 Result: Down-regulated in Transcription
  misc_feature: MA Experiment 20000166 PARAMETER Experiment Name: At_100uM_ABA_P Parameter: Age (day) Value: 14
  misc_feature: MA Experiment 20000166 PARAMETER Experiment Name: At_100uM_ABA_P Parameter: Organism Value: A. thaliana
  misc_feature: MA Experiment 20000166 PARAMETER Experiment Name: At_100uM_ABA_P Parameter: Plant Line Value: WS
  misc_feature: MA Experiment 20000166 PARAMETER Experiment Name: At_100uM_ABA_P Parameter: Timepoint (hr) Value: 1
  misc_feature: MA Experiment 20000166 PARAMETER Experiment Name: At_100uM_ABA_P Parameter: Tissue Value: Aerial
  misc_feature: MA Experiment 20000166 PARAMETER Experiment Name: At_100uM_ABA_P Parameter: Treatment Value: 100uM ABA vs. No Treatment
  misc_feature: MA Experiment ID: 20000171 Result: Down-regulated in Transcription
  misc_feature: MA Experiment 20000171 PARAMETER Experiment Name: At_42deg_Heat_P Parameter: Age (day) Value: 14
  misc_feature: MA Experiment 20000171 PARAMETER Experiment Name: At_42deg_Heat_P Parameter: Organism Value: A. thaliana
  misc_feature: MA Experiment 20000171 PARAMETER Experiment Name: At_42deg_Heat_P Parameter: Plant Line Value: WS
  misc_feature: MA Experiment 20000171 PARAMETER Experiment Name: At_42deg_Heat_P Parameter: Temperature (deg C) Value: 42 vs. 22
  misc_feature: MA Experiment 20000171 PARAMETER Experiment Name: At_42deg_Heat_P Parameter: Timepoint (hr) Value: 1
  misc_feature: MA Experiment 20000171 PARAMETER Experiment Name: At_42deg_Heat_P Parameter: Tissue Value: Aerial
  misc_feature: MA Experiment ID: 20000173 Result: Down-regulated in Transcription
  misc_feature: MA Experiment 20000173 PARAMETER Experiment Name: At_42deg_Heat_P Parameter: Age (day) Value: 14
  misc_feature: MA Experiment 20000173 PARAMETER Experiment Name: At_42deg_Heat_P Parameter: Organism Value: A. thaliana
  misc_feature: MA Experiment 20000173 PARAMETER Experiment Name: At_42deg_Heat_P Parameter: Plant Line Value: WS
  misc_feature: MA Experiment 20000173 PARAMETER Experiment Name: At_42deg_Heat_P Parameter: Temperature (deg C) Value: 42 vs. 22
  misc_feature: MA Experiment 20000173 PARAMETER Experiment Name: At_42deg_Heat_P Parameter: Timepoint (hr) Value: 6
  misc_feature: MA Experiment 20000173 PARAMETER Experiment Name: At_42deg_Heat_P Parameter: Tissue Value: Aerial
  misc_feature: MA Experiment ID: 20000184 Result: Up-regulated in Transcription
  misc_feature: MA Experiment 20000184 PARAMETER Experiment Name: At_Shoots__P Parameter: Age (day) Value: 7
  misc_feature: MA Experiment 20000184 PARAMETER Experiment Name: At_Shoots__P Parameter: Tissue Value: Shoots vs. Whole Plant
  misc_feature: MA Experiment ID: 20000185 Result: Up-regulated in Transcription
  misc_feature: MA Experiment 20000185 PARAMETER Experiment Name: At_Roots__P Parameter: Age (day) Value: 7 vs. 21
  misc_feature: MA Experiment 20000185 PARAMETER Experiment Name: At_Roots__P Parameter: Organism Value: A. thaliana
  misc_feature: MA Experiment 20000185 PARAMETER Experiment Name: At_Roots__P Parameter: Tissue Value: Roots vs. Whole Plant
  misc_feature: MA Experiment ID: 20000227 Result: Down-regulated in Transcription
  misc_feature: MA Experiment 20000227 PARAMETER Experiment Name: At_Root-Tips-vs-Tops_P Parameter: Tissue Value: Root Tips vs. Root Tops
  misc_feature: MA Experiment ID: 20000438 Result: Up-regulated in Transcription
  misc_feature: MA Experiment 20000438 PARAMETER Experiment Name: At_Shoots__P Parameter: Age (day) Value: 14
  misc_feature: MA Experiment 20000438 PARAMETER Experiment Name: At_Shoots__P Parameter: Tissue Value: Shoots vs. Whole Plant
  misc_feature: MA Experiment ID: 20000439 Result: Up-regulated in Transcription
  misc_feature: MA Experiment 20000439 PARAMETER Experiment Name: At_Roots__P Parameter: Age (day) Value: 14 vs. 21
  misc_feature: MA Experiment 20000439 PARAMETER Experiment Name: At_Roots__P Parameter: Organism Value: A. thaliana
  misc_feature: MA Experiment 20000439 PARAMETER Experiment Name: At_Roots__P Parameter: Tissue Value: Roots vs. Whole Plant
  misc_feature: MA Experiment ID: 20000460 Result: Down-regulated in Transcription
  misc_feature: MA Experiment 20000460 PARAMETER Experiment Name: At_10percent_PEG_P Parameter: Age (day) Value: 12
  misc_feature: MA Experiment 20000460 PARAMETER Experiment Name: At_10percent_PEG_P Parameter: Organism Value: A. thaliana
  misc_feature: MA Experiment 20000460 PARAMETER Experiment Name: At_10percent_PEG_P Parameter: Plant Line Value: WS
  misc_feature: MA Experiment 20000460 PARAMETER Experiment Name: At_10percent_PEG_P Parameter: Timepoint (day) Value: 12
  misc_feature: MA Experiment 20000460 PARAMETER Experiment Name: At_10percent_PEG_P Parameter: Tissue Value: Whole Plant
  misc_feature: MA Experiment 20000460 PARAMETER Experiment Name: At_10percent_PEG_P Parameter: Treatment Value: 10percent PEG vs. No Treatment
  misc_feature: MA Experiment ID: 20000495 Result: Down-regulated in Transcription
  misc_feature: MA Experiment 20000495 PARAMETER Experiment Name: At_Guard_Cells_P Parameter: Harvest Date Value: 8/2/2002
  misc_feature: MA Experiment 20000495 PARAMETER Experiment Name: At_Guard_Cells_P Parameter: Organism Value: A. thaliana
  misc_feature: MA Experiment 20000495 PARAMETER Experiment Name: At_Guard_Cells_P Parameter: Tissue Value: Guard Cells vs. Leaves
  misc_feature: MA Experiment ID: 20000527 Result: Down-regulated in Transcription
  misc_feature: MA Experiment 20000527 PARAMETER Experiment Name: At_10percent_PEG_P Parameter: Age (day) Value: 20
  misc_feature: MA Experiment 20000527 PARAMETER Experiment Name: At_10percent_PEG_P Parameter: Organism Value: A. thaliana
  misc_feature: MA Experiment 20000527 PARAMETER Experiment Name: At_10percent_PEG_P Parameter: Plant Line Value: WS
  misc_feature: MA Experiment 20000527 PARAMETER Experiment Name: At_10percent_PEG_P Parameter: Timepoint (day) Value: 20
  misc_feature: MA Experiment 20000527 PARAMETER Experiment Name: At_10percent_PEG_P Parameter: Tissue Value: Whole Plant
  misc_feature: MA Experiment 20000527 PARAMETER Experiment Name: At_10percent_PEG_P Parameter: Treatment Value: 10percent PEG vs. No Treatment
  misc_feature: MA Experiment ID: 20000794 Result: Up-regulated in Transcription
  misc_feature: MA Experiment 20000794 PARAMETER Experiment Name: At_Petals_P Parameter: Age (day) Value: 23-25 days
  misc_feature: MA Experiment 20000794 PARAMETER Experiment Name: At_Petals_P Parameter: Plant Line Value: WS
  misc_feature: MA Experiment 20000794 PARAMETER Experiment Name: At_Petals_P Parameter: Tissue Value: Petals vs. Whole plant
  misc_feature: MA Experiment ID: 20001556 Result: Down-regulated in Transcription
  misc_feature: MA Experiment 20001556 PARAMETER Experiment Name: At_Drought_Soil_Dry_P Parameter: Age (day) Value: 26
  misc_feature: MA Experiment 20001556 PARAMETER Experiment Name: At_Drought_Soil_Dry_P Parameter: Organism Value: A. thaliana
  misc_feature: MA Experiment 20001556 PARAMETER Experiment Name: At_Drought_Soil_Dry_P Parameter: Plant Line Value: WS
  misc_feature: MA Experiment 20001556 PARAMETER Experiment Name: At_Drought_Soil_Dry_P Parameter: Post Timepoint (hr) Value: None
  misc_feature: MA Experiment 20001556 PARAMETER Experiment Name: At_Drought_Soil_Dry_P Parameter: Post-Treatment Value: None
  misc_feature: MA Experiment 20001556 PARAMETER Experiment Name: At_Drought_Soil_Dry_P Parameter: Timepoint (day) Value: 12
  misc_feature: MA Experiment 20001556 PARAMETER Experiment Name: At_Drought_Soil_Dry_P Parameter: Treatment Value: Drought vs. No Drought
  misc_feature: MA Experiment ID: 20001559 Result: Down-regulated in Transcription
  misc_feature: MA Experiment 20001559 PARAMETER Experiment Name: At_Drought_Soil_Dry_P Parameter: Age (day) Value: 28
  misc_feature: MA Experiment 20001559 PARAMETER Experiment Name: At_Drought_Soil_Dry_P Parameter: Organism Value: A. thaliana
  misc_feature: MA Experiment 20001559 PARAMETER Experiment Name: At_Drought_Soil_Dry_P Parameter: Plant Line Value: WS
  misc_feature: MA Experiment 20001559 PARAMETER Experiment Name: At_Drought_Soil_Dry_P Parameter: Post Timepoint (hr) Value: 29
  misc_feature: MA Experiment 20001559 PARAMETER Experiment Name: At_Drought_Soil_Dry_P Parameter: Post-Treatment Value: Re-Water vs. No Drought
  misc_feature: MA Experiment 20001559 PARAMETER Experiment Name: At_Drought_Soil_Dry_P Parameter: Timepoint (day) Value: 14
  misc_feature: MA Experiment 20001559 PARAMETER Experiment Name: At_Drought_Soil_Dry_P Parameter: Treatment Value: Drought vs. No Drought
  misc_feature: MA Experiment ID: 20001560 Result: Down-regulated in Transcription
  misc_feature: MA Experiment 20001560 PARAMETER Experiment Name: At_Drought_Soil_Dry_P Parameter: Age (day) Value: 28
  misc_feature: MA Experiment 20001560 PARAMETER Experiment Name: At_Drought_Soil_Dry_P Parameter: Organism Value: A. thaliana
  misc_feature: MA Experiment 20001560 PARAMETER Experiment Name: At_Drought_Soil_Dry_P Parameter: Plant Line Value: WS
  misc_feature: MA Experiment 20001560 PARAMETER Experiment Name: At_Drought_Soil_Dry_P Parameter: Post Timepoint (hr) Value: None
  misc_feature: MA Experiment 20001560 PARAMETER Experiment Name: At_Drought_Soil_Dry_P Parameter: Post-Treatment Value: None
  misc_feature: MA Experiment 20001560 PARAMETER Experiment Name: At_Drought_Soil_Dry_P Parameter: Timepoint (day) Value: 14
  misc_feature: MA Experiment 20001560 PARAMETER Experiment Name: At_Drought_Soil_Dry_P Parameter: Treatment Value: Drought vs. No Drought
  misc_feature: MA Experiment ID: 20001757 Result: Up-regulated in Transcription
  misc_feature: MA Experiment 20001757 PARAMETER Experiment Name: At_50mM_NH4NO3_L-to-H_P Parameter: Timepoint (hr) Value: 6
  misc_feature: MA Experiment 20001757 PARAMETER Experiment Name: At_50mM_NH4NO3_L-to-H_P Parameter: Tissue Value: Leaf
  misc_feature: MA Experiment 20001757 PARAMETER Experiment Name: At_50mM_NH4NO3_L-to-H_P Parameter: Treatment Value: 50mM NH4NO3 vs 100mM Mannitol
  misc_feature: MA Experiment ID: 20001904 Result: Down-regulated in Transcription
  misc_feature: MA Experiment 20001904 PARAMETER Experiment Name: At_Drought_Reproduction_P Parameter: Age (day) Value: 37
  misc_feature: MA Experiment 20001904 PARAMETER Experiment Name: At_Drought_Reproduction_P Parameter: Organism Value: A. thaliana
  misc_feature: MA Experiment 20001904 PARAMETER Experiment Name: At_Drought_Reproduction_P Parameter: Plant Line Value: WS
  misc_feature: MA Experiment 20001904 PARAMETER Experiment Name: At_Drought_Reproduction_P Parameter: Timepoint (day) Value: 7
  misc_feature: MA Experiment 20001904 PARAMETER Experiment Name: At_Drought_Reproduction_P Parameter: Tissue Value: Rosettes
  misc_feature: MA Experiment 20001904 PARAMETER Experiment Name: At_Drought_Reproduction_P Parameter: Treatment Value: Drought vs. No Drought
tgcacaaaagaaaccaagagctctcaaacaaaacagccttttacataagaacaaacacccccaaaaactgcaaaaaaaagagagagatcattaatccatcttcaagatgtctcttcctgaaactaaatctgatgatatccttcttgatgcttgggacttccaaggccgtcccgccgatcgctcaaaaaccggcggctgggccagcgccgccatgattctttgtattgaggccgtggagaggctgacgacgttaggtatcggagttaatctggtgacgtatttgacgggaactatgcatttaggcaatgcaactgcggctaacaccgttaccaatttcctcggaacttctttcatgctctgtctcctcggtggcttcatcgccgatacctttctcggcaggtacctaacgattgctatattcgccgcaatccaagccacgggtgtttcaatcttaactctatcaacaatcataccgggacttcgaccaccaagatgcaatccaacaacgtcgtctcactgcgaacaagcaagtggaatacaactgacggtcctatacttagccttatacctcaccgctctaggaacgggaggcgtgaaggctagtgtctcgggtttcgggtcggaccaattcgatgagaccgaaccaaaagaacgatcgaaaatgacatatttcttcaaccgtttcttcttttgtatcaacgttggctctcttttagctgtgacggtccttgtctacgtacaagacgatgttggacgcaaatggggctatggaatttgcgcgtttgcgatcgtgcttgcactcagcgttttcttggccggaacaaaccgctaccgtttcaagaagttgatcggtagcccgatgacgcaggttgctgcggttatcgtggcggcgtggaggaataggaagctcgagctgccggcagatccgtcctatctctacgatgtggatgatattattgcggcggaaggttcgatgaagggtaaacaaaagctgccacacactgaacaattccgttcattagataaggcagcaataagggatcaggaagcgggagttacctcgaatgtattcaacaagtggacactctcaacactaacagatgttgaggaagtgaaacaaatcgtgcgaatgttaccaatttgggcaacatgcatcctcttctggaccgtccacgctcaattaacgacattatcagtcgcacaatccgagacattggaccgttccatcgggagcttcgagatccctccagcatcgatggcagtcttctacgtcggtggcctcctcctaaccaccgccgtctatgaccgcgtcgccattcgtctatgcaaaaagctattcaactacccccatggtctaagaccgcttcaacggatcggtttggggcttttcttcggatcaatggctatggctgtggctgctttggtcgagctcaaacgtcttagaactgcacacgctcatggtccaacagtcaaaacgcttcctctagggttttatctactcatcccacaatatcttattgtcggtatcggcgaagcgttaatctacacaggacagttagatttcttcttgagagagtgccctaaaggtatgaaagggatgagcacgggtctattgttgagcacattggcattaggctttttcttcagctcggttctcgtgacaatcgtcgagaaattcaccgggaaagctcatccatggattgccgatgatctcaacaagggccgtctttacaatttctactggcttgtggccgtacttgttgccttgaacttcctcattttcctagttttctccaagtggtacgtttacaaggaaaaaagactagctgaggtggggattgagttggatgatgagccgagtattccaatgggtcattgatcatgaattcatgatcatgatcatgatgatgaacattatgcatgtctatgttgatatgtttgaatttgattttgagttttgtttgtatattttatgatgcttttcttaattacctcttgtttccgagtcgacaaataatggaccgaccgataagggataaaagttaaagttttcccatcaggttctgtataaaagcagaaattgtaacatttcttaagatttgacgc

SEQ ID NO: 48160 - protein, 590 aa, Arabidopsis thaliana
  peptide (1)..(590): Ceres Seq. ID no. 13649808
  misc_feature (99)..(507): Pfam Name: POT family Pfam Description: POT family
  misc_feature (1)..(583): Homolog of NCBI NO: 9581819 NR Description: putative low-affinity nitrate transporter
  misc_feature (1)..(585): Homolog of NCBI NO: 9581817 NR Description: putative low-affinity nitrate transporter
  misc_feature (1)..(585): Homolog of NCBI NO: 28273094 NR Description: nitrate transporter [Nicotiana tabacum]
  misc_feature (1)..(583): Homolog of NCBI NO: 28273100 NR Description: nitrate transporter [Nicotiana tabacum]
  misc_feature (2)..(586): Homolog of NCBI NO: 33411520 NR Description: nitrate transporter [Prunus persica]
  misc_feature (1)..(585): Homolog of NCBI NO: 28273096 NR Description: nitrate transporter [Nicotiana tabacum]
  misc_feature (1)..(583): Homolog of NCBI NO: 28273098 NR Description: nitrate transporter [Nicotiana tabacum]
  misc_feature (1)..(590): Homolog of NCBI NO: 9971067 NR Description: nitrate transporter [Brassica napus]
  misc_feature (1)..(590): Homolog of NCBI NO: 602292 NR Description: RCH2 protein
  misc_feature (1)..(590): Homolog of NCBI NO: 18391353 NR Description: putative NPK1-related protein kinase 2
MSLPETKSDDILLDAWDFQGRPADRSKTGGWASAAMILCIEAVERLTTLGIGVNLVTYLTGTMHLGNATAANTVTNFLGTSFMLCLLGGFIADTFLGRYLTIAIFAAIQATGVSILTLSTIIPGLRPPRCNPTTSSHCEQASGIQLTVLYLALYLTALGTGGVKASVSGFGSDQFDETEPKERSKMTYFFNRFFFCINVGSLLAVTVLVYVQDDVGRKWGYGICAFAIVLALSVFLAGTNRYRFKKLIGSPMTQVAAVIVAAWRNRKLELPADPSYLYDVDDIIAAEGSMKGKQKLPHTEQFRSLDKAAIRDQEAGVTSNVFNKWTLSTLTDVEEVKQIVRMLPIWATCILFWTVHAQLTTLSVAQSETLDRSIGSFEIPPASMAVFYVGGLLLTTAVYDRVAIRLCKKLFNYPHGLRPLQRIGLGLFFGSMAMAVAALVELKRLRTAHAHGPTVKTLPLGFYLLIPQYLIVGIGEALIYTGQLDFFLRECPKGMKGMSTGLLLSTLALGFFFSSVLVTIVEKFTGKAHPWIADDLNKGRLYNFYWLVAVLVALNFLIFLVFSKWYVYKEKRLAEVGIELDDEPSIPMGH

SEQ ID NO: 48161 - protein, 555 aa, Arabidopsis thaliana
  peptide (1)..(555): Ceres Seq. ID no. 13649809
  misc_feature (64)..(472): Pfam Name: POT family Pfam Description: POT family
  misc_feature (1)..(548): Homolog of NCBI NO: 9581819 NR Description: putative low-affinity nitrate transporter
  misc_feature (1)..(550): Homolog of NCBI NO: 9581817 NR Description: putative low-affinity nitrate transporter
  misc_feature (1)..(550): Homolog of NCBI NO: 28273094 NR Description: nitrate transporter [Nicotiana tabacum]
  misc_feature (1)..(548): Homolog of NCBI NO: 28273100 NR Description: nitrate transporter [Nicotiana tabacum]
  misc_feature (1)..(551): Homolog of NCBI NO: 33411520 NR Description: nitrate transporter [Prunus persica]
  misc_feature (1)..(550): Homolog of NCBI NO: 28273096 NR Description: nitrate transporter [Nicotiana tabacum]
  misc_feature (1)..(548): Homolog of NCBI NO: 28273098 NR Description: nitrate transporter [Nicotiana tabacum]
  misc_feature (1)..(555): Homolog of NCBI NO: 9971067 NR Description: nitrate transporter [Brassica napus]
  misc_feature (1)..(555): Homolog of NCBI NO: 602292 NR Description: RCH2 protein
  misc_feature (1)..(555): Homolog of NCBI NO: 18391353 NR Description: putative NPK1-related protein kinase 2
MILCIEAVERLTTLGIGVNLVTYLTGTMHLGNATAANTVTNFLGTSFMLCLLGGFIADTFLGRYLTIAIFAAIQATGVSILTLSTIIPGLRPPRCNPTTSSHCEQASGIQLTVLYLALYLTALGTGGVKASVSGFGSDQFDETEPKERSKMTYFFNRFFFCINVGSLLAVTVLVYVQDDVGRKWGYGICAFAIVLALSVFLAGTNRYRFKKLIGSPMTQVAAVIVAAWRNRKLELPADPSYLYDVDDIIAAEGSMKGKQKLPHTEQFRSLDKAAIRDQEAGVTSNVFNKWTLSTLTDVEEVKQIVRMLPIWATCILFWTVHAQLTTLSVAQSETLDRSIGSFEIPPASMAVFYVGGLLLTTAVYDRVAIRLCKKLFNYPHGLRPLQRIGLGLFFGSMAMAVAALVELKRLRTAHAHGPTVKTLPLGFYLLIPQYLIVGIGEALIYTGQLDFFLRECPKGMKGMSTGLLLSTLALGFFFSSVLVTIVEKFTGKAHPWIADDLNKGRLYNFYWLVAVLVALNFLIFLVFSKWYVYKEKRLAEVGIELDDEPSIPMGH

SEQ ID NO: 48162 - protein, 528 aa, Arabidopsis thaliana
  peptide (1)..(528): Ceres Seq. ID no. 13649810
  misc_feature (37)..(445): Pfam Name: POT family Pfam Description: POT family
  misc_feature (1)..(521): Homolog of NCBI NO: 9581819 NR Description: putative low-affinity nitrate transporter
  misc_feature (1)..(523): Homolog of NCBI NO: 9581817 NR Description: putative low-affinity nitrate transporter
  misc_feature (1)..(523): Homolog of NCBI NO: 28273094 NR Description: nitrate transporter [Nicotiana tabacum]
  misc_feature (1)..(521): Homolog of NCBI NO: 28273100 NR Description: nitrate transporter [Nicotiana tabacum]
  misc_feature (1)..(524): Homolog of NCBI NO: 33411520 NR Description: nitrate transporter [Prunus persica]
  misc_feature (1)..(523): Homolog of NCBI NO: 28273096 NR Description: nitrate transporter [Nicotiana tabacum]
  misc_feature (1)..(521): Homolog of NCBI NO: 28273098 NR Description: nitrate transporter [Nicotiana tabacum]
  misc_feature (1)..(528): Homolog of NCBI NO: 9971067 NR Description: nitrate transporter [Brassica napus]
  misc_feature (1)..(528): Homolog of NCBI NO: 602292 NR Description: RCH2 protein
  misc_feature (1)..(528): Homolog of NCBI NO: 18391353 NR Description: putative NPK1-related protein kinase 2
MHLGNATAANTVTNFLGTSFMLCLLGGFIADTFLGRYLTIAIFAAIQATGVSILTLSTIIPGLRPPRCNPTTSSHCEQASGIQLTVLYLALYLTALGTGGVKASVSGFGSDQFDETEPKERSKMTYFFNRFFFCINVGSLLAVTVLVYVQDDVGRKWGYGICAFAIVLALSVFLAGTNRYRFKKLIGSPMTQVAAVIVAAWRNRKLELPADPSYLYDVDDIIAAEGSMKGKQKLPHTEQFRSLDKAAIRDQEAGVTSNVFNKWTLSTLTDVEEVKQIVRMLPIWATCILFWTVHAQLTTLSVAQSETLDRSIGSFEIPPASMAVFYVGGLLLTTAVYDRVAIRLCKKLFNYPHGLRPLQRIGLGLFFGSMAMAVAALVELKRLRTAHAHGPTVKTLPLGFYLLIPQYLIVGIGEALIYTGQLDFFLRECPKGMKGMSTGLLLSTLALGFFFSSVLVTIVEKFTGKAHPWIADDLNKGRLYNFYWLVAVLVALNFLIFLVFSKWYVYKEKRLAEVGIELDDEPSIPMGH

SEQ ID NO: 48163 - DNA, 1068 bp, Arabidopsis thaliana
  misc_feature (1)..(1068): Ceres Seq. ID no. 13650103
  misc_feature: MA Experiment ID: 20000166 Result: Down-regulated in Transcription
  misc_feature: MA Experiment 20000166 PARAMETER Experiment Name: At_100uM_ABA_P Parameter: Age (day) Value: 14
  misc_feature: MA Experiment 20000166 PARAMETER Experiment Name: At_100uM_ABA_P Parameter: Organism Value: A. thaliana
  misc_feature: MA Experiment 20000166 PARAMETER Experiment Name: At_100uM_ABA_P Parameter: Plant Line Value: WS
  misc_feature: MA Experiment 20000166 PARAMETER Experiment Name: At_100uM_ABA_P Parameter: Timepoint (hr) Value: 1
  misc_feature: MA Experiment 20000166 PARAMETER Experiment Name: At_100uM_ABA_P Parameter: Tissue Value: Aerial
  misc_feature: MA Experiment 20000166 PARAMETER Experiment Name: At_100uM_ABA_P Parameter: Treatment Value: 100uM ABA vs. No Treatment
  misc_feature: MA Experiment ID: 20000169 Result: Down-regulated in Transcription
  misc_feature: MA Experiment 20000169 PARAMETER Experiment Name: At_100uM_ABA_P Parameter: Age (day) Value: 14
  misc_feature: MA Experiment 20000169 PARAMETER Experiment Name: At_100uM_ABA_P Parameter: Organism Value: A. thaliana
  misc_feature: MA Experiment 20000169 PARAMETER Experiment Name: At_100uM_ABA_P Parameter: Plant Line Value: WS
  misc_feature: MA Experiment 20000169 PARAMETER Experiment Name: At_100uM_ABA_P Parameter: Timepoint (hr) Value: 6
  misc_feature: MA Experiment 20000169 PARAMETER Experiment Name: At_100uM_ABA_P Parameter: Tissue Value: Aerial
  misc_feature: MA Experiment 20000169 PARAMETER Experiment Name: At_100uM_ABA_P Parameter: Treatment Value: 100uM ABA vs. No Treatment
  misc_feature: MA Experiment ID: 20000171 Result: Down-regulated in Transcription
  misc_feature: MA Experiment 20000171 PARAMETER Experiment Name: At_42deg_Heat_P Parameter: Age (day) Value: 14
  misc_feature: MA Experiment 20000171 PARAMETER Experiment Name: At_42deg_Heat_P Parameter: Organism Value: A. thaliana
  misc_feature: MA Experiment 20000171 PARAMETER Experiment Name: At_42deg_Heat_P Parameter: Plant Line Value: WS
  misc_feature: MA Experiment 20000171 PARAMETER Experiment Name: At_42deg_Heat_P Parameter: Temperature (deg C) Value: 42 vs. 22
  misc_feature: MA Experiment 20000171 PARAMETER Experiment Name: At_42deg_Heat_P Parameter: Timepoint (hr) Value: 1
  misc_feature: MA Experiment 20000171 PARAMETER Experiment Name: At_42deg_Heat_P Parameter: Tissue Value: Aerial
  misc_feature: MA Experiment ID: 20000173 Result: Down-regulated in Transcription
  misc_feature: MA Experiment 20000173 PARAMETER Experiment Name: At_42deg_Heat_P Parameter: Age (day) Value: 14
  misc_feature: MA Experiment 20000173 PARAMETER Experiment Name: At_42deg_Heat_P Parameter: Organism Value: A. thaliana
  misc_feature: MA Experiment 20000173 PARAMETER Experiment Name: At_42deg_Heat_P Parameter: Plant Line Value: WS
  misc_feature: MA Experiment 20000173 PARAMETER Experiment Name: At_42deg_Heat_P Parameter: Temperature (deg C) Value: 42 vs. 22
  misc_feature: MA Experiment 20000173 PARAMETER Experiment Name: At_42deg_Heat_P Parameter: Timepoint (hr) Value: 6
  misc_feature: MA Experiment 20000173 PARAMETER Experiment Name: At_42deg_Heat_P Parameter: Tissue Value: Aerial
  misc_feature: MA Experiment ID: 20000184 Result: Down-regulated in Transcription
  misc_feature: MA Experiment 20000184 PARAMETER Experiment Name: At_Shoots__P Parameter: Age (day) Value: 7
  misc_feature: MA Experiment 20000184 PARAMETER Experiment Name: At_Shoots__P Parameter: Tissue Value: Shoots vs. Whole Plant
  misc_feature: MA Experiment ID: 20000234 Result: Down-regulated in Transcription
  misc_feature: MA Experiment 20000234 PARAMETER Experiment Name: At_Siliques_P Parameter: Age (day) Value: 21
  misc_feature: MA Experiment 20000234 PARAMETER Experiment Name: At_Siliques_P Parameter: Organism Value: A. thaliana
  misc_feature: MA Experiment 20000234 PARAMETER Experiment Name: At_Siliques_P Parameter: Plant Line Value: WS
  misc_feature: MA Experiment 20000234 PARAMETER Experiment Name: At_Siliques_P Parameter: Tissue Value: Less Than 5mm Siliques vs. Whole Plant
  misc_feature: MA Experiment ID: 20000438 Result: Down-regulated in Transcription
  misc_feature: MA Experiment 20000438 PARAMETER Experiment Name: At_Shoots__P Parameter: Age (day) Value: 14
  misc_feature: MA Experiment 20000438 PARAMETER Experiment Name: At_Shoots__P Parameter: Tissue Value: Shoots vs. Whole Plant
  misc_feature: MA Experiment ID: 20000443 Result: Up-regulated in Transcription
  misc_feature: MA Experiment 20000443 PARAMETER Experiment Name: At_1uM_BR-BRZ__P Parameter: Tissue Value: Shoot Apices
  misc_feature: MA Experiment 20000443 PARAMETER Experiment Name: At_1uM_BR-BRZ__P Parameter: Treatment Value: 1uM BRZ vs. No Treatment
  misc_feature: MA Experiment ID: 20000453 Result: Down-regulated in Transcription
  misc_feature: MA Experiment 20000453 PARAMETER Experiment Name: At_100uM_ABA_P Parameter: Age (day) Value: 15
  misc_feature: MA Experiment 20000453 PARAMETER Experiment Name: At_100uM_ABA_P Parameter: Organism Value: A. thaliana
  misc_feature: MA Experiment 20000453 PARAMETER Experiment Name: At_100uM_ABA_P Parameter: Plant Line Value: WS
  misc_feature: MA Experiment 20000453 PARAMETER Experiment Name: At_100uM_ABA_P Parameter: Timepoint (hr) Value: 24
  misc_feature: MA Experiment 20000453 PARAMETER Experiment Name: At_100uM_ABA_P Parameter: Tissue Value: Aerial
  misc_feature: MA Experiment 20000453 PARAMETER Experiment Name: At_100uM_ABA_P Parameter: Treatment Value: 100uM ABA vs. No Treatment
  misc_feature: MA Experiment ID: 20001248 Result: Up-regulated in Transcription
  misc_feature: MA Experiment 20001248 PARAMETER Experiment Name: At_Far-red-induction_P Parameter: Age (day) Value: 7
  misc_feature: MA Experiment 20001248 PARAMETER Experiment Name: At_Far-red-induction_P Parameter: Light Value: Far-red vs. White
  misc_feature: MA Experiment 20001248 PARAMETER Experiment Name: At_Far-red-induction_P Parameter: Organism Value: A. thaliana
  misc_feature: MA Experiment 20001248 PARAMETER Experiment Name: At_Far-red-induction_P Parameter: Plant Line Value: Columbia
  misc_feature: MA Experiment 20001248 PARAMETER Experiment Name: At_Far-red-induction_P Parameter: Timepoint (hr) Value: 4
  misc_feature: MA Experiment 20001248 PARAMETER Experiment Name: At_Far-red-induction_P Parameter: Tissue Value: Whole Plant
  misc_feature: MA Experiment ID: 20001450 Result: Up-regulated in Transcription
  misc_feature: MA Experiment 20001450 PARAMETER Experiment Name: At_Far-red-induction_P Parameter: Age (day) Value: 7
  misc_feature: MA Experiment 20001450 PARAMETER Experiment Name: At_Far-red-induction_P Parameter: Light Value: Far-red vs. White
  misc_feature: MA Experiment 20001450 PARAMETER Experiment Name: At_Far-red-induction_P Parameter: Organism Value: A. thaliana
  misc_feature: MA Experiment 20001450 PARAMETER Experiment Name: At_Far-red-induction_P Parameter: Plant Line Value: Columbia
  misc_feature: MA Experiment 20001450 PARAMETER Experiment Name: At_Far-red-induction_P Parameter: Timepoint (hr) Value: 8
  misc_feature: MA Experiment 20001450 PARAMETER Experiment Name: At_Far-red-induction_P Parameter: Tissue Value: Whole Plant
  misc_feature: MA Experiment ID: 20001554 Result: Down-regulated in Transcription
  misc_feature: MA Experiment 20001554 PARAMETER Experiment Name: At_Drought_Soil_Dry_P Parameter: Age (day) Value: 21
  misc_feature: MA Experiment 20001554 PARAMETER Experiment Name: At_Drought_Soil_Dry_P Parameter: Organism Value: A. thaliana
  misc_feature: MA Experiment 20001554 PARAMETER Experiment Name: At_Drought_Soil_Dry_P Parameter: Plant Line Value: WS
  misc_feature: MA Experiment 20001554 PARAMETER Experiment Name: At_Drought_Soil_Dry_P Parameter: Post Timepoint (hr) Value: None
  misc_feature: MA Experiment 20001554 PARAMETER Experiment Name: At_Drought_Soil_Dry_P Parameter: Post-Treatment Value: None
  misc_feature: MA Experiment 20001554 PARAMETER Experiment Name: At_Drought_Soil_Dry_P Parameter: Timepoint (day) Value: 7
  misc_feature: MA Experiment 20001554 PARAMETER Experiment Name: At_Drought_Soil_Dry_P Parameter: Treatment Value: Drought vs. No Drought
  misc_feature: MA Experiment ID: 20001555 Result: Down-regulated in Transcription
  misc_feature: MA Experiment 20001555 PARAMETER Experiment Name: At_Drought_Soil_Dry_P Parameter: Age (day) Value: 24
  misc_feature: MA Experiment 20001555 PARAMETER Experiment Name: At_Drought_Soil_Dry_P Parameter: Organism Value: A. thaliana
  misc_feature: MA Experiment 20001555 PARAMETER Experiment Name: At_Drought_Soil_Dry_P Parameter: Plant Line Value: WS
  misc_feature: MA Experiment 20001555 PARAMETER Experiment Name: At_Drought_Soil_Dry_P Parameter: Post Timepoint (hr) Value: None
  misc_feature: MA Experiment 20001555 PARAMETER Experiment Name: At_Drought_Soil_Dry_P Parameter: Post-Treatment Value: None
  misc_feature: MA Experiment 20001555 PARAMETER Experiment Name: At_Drought_Soil_Dry_P Parameter: Timepoint (day) Value: 10
  misc_feature: MA Experiment 20001555 PARAMETER Experiment Name: At_Drought_Soil_Dry_P Parameter: Treatment Value: Drought vs. No Drought
  misc_feature: MA Experiment ID: 20001556 Result: Down-regulated in Transcription
  misc_feature: MA Experiment 20001556 PARAMETER Experiment Name: At_Drought_Soil_Dry_P Parameter: Age (day) Value: 26
  misc_feature: MA Experiment 20001556 PARAMETER Experiment Name: At_Drought_Soil_Dry_P Parameter: Organism Value: A. thaliana
  misc_feature: MA Experiment 20001556 PARAMETER Experiment Name: At_Drought_Soil_Dry_P Parameter: Plant Line Value: WS
  misc_feature: MA Experiment 20001556 PARAMETER Experiment Name: At_Drought_Soil_Dry_P Parameter: Post Timepoint (hr) Value: None
  misc_feature: MA Experiment 20001556 PARAMETER Experiment Name: At_Drought_Soil_Dry_P Parameter: Post-Treatment Value: None
  misc_feature: MA Experiment 20001556 PARAMETER Experiment Name: At_Drought_Soil_Dry_P Parameter: Timepoint (day) Value: 12
  misc_feature: MA Experiment 20001556 PARAMETER Experiment Name: At_Drought_Soil_Dry_P Parameter: Treatment Value: Drought vs. No Drought
  misc_feature: MA Experiment ID: 20001558 Result: Up-regulated in Transcription
  misc_feature: MA Experiment 20001558 PARAMETER Experiment Name: At_Drought_Soil_Dry_P Parameter: Age (day) Value: 27
  misc_feature: MA Experiment 20001558 PARAMETER Experiment Name: At_Drought_Soil_Dry_P Parameter: Organism Value: A. thaliana
  misc_feature: MA Experiment 20001558 PARAMETER Experiment Name: At_Drought_Soil_Dry_P Parameter: Plant Line Value: WS
  misc_feature: MA Experiment 20001558 PARAMETER Experiment Name: At_Drought_Soil_Dry_P Parameter: Post Timepoint (hr) Value: 6
  misc_feature: MA Experiment 20001558 PARAMETER Experiment Name: At_Drought_Soil_Dry_P Parameter: Post-Treatment Value: Re-Water vs. No Drought
  misc_feature: MA Experiment 20001558 PARAMETER Experiment Name: At_Drought_Soil_Dry_P Parameter: Timepoint (day) Value: 13
  misc_feature: MA Experiment 20001558 PARAMETER Experiment Name: At_Drought_Soil_Dry_P Parameter: Treatment Value: Drought vs. No Drought
atggaggaaacaaataagagtgtggttaatgattactttaccagtgctatggaacttacagagtcaggtgaccctcacgtgcctacccgttacattcttccaccttcacaacgaccaatgctcggtccaagcattggcaccagtaccatcaatcttcctgtcattgatctctccttcttacacgatcctttgcttagactatgtgtcatccatgagattgaattggcctgcaagggatttggtttctttcaggttataaaccatggaatatcatcagcagtggtgaaagatgcacaagattcagctacaaggttctttgacttacctgccgatgagaagatgcatctggtttctgataattttcaggagccagtaagggaaaaggtggggaaatacgcagaagcaacgcatgttttacataagcaactaattgaagctatctcagaaagtctaggactggagaaaaattacttacaggaagaaatagaagaaggctcacaagtcatggcggtaaactgctatccagcttgtcctgaacccgagattgccttgggaatgccaccacactcggactatggctcgctgacaatcttactccagagtagcgaagggctgcagataaaggactgcaacaacaactgggtttgtgtgccgtatattgaaggagctctgatagtccagttgggagatcaggtagaagtgatgagcaatggcatatacaagagtgtggttcatcgtgtaacagtgaacaaagattacaagcggctctcttttgcaagtcttcacagtctacctatgcacaagaaaataagtccagcaactcagctcgtcaatgaaaataaaccagctgcatatggagaattcagcttcaacgattttcttgattatatatccagaaacgatattacacagaaaagattcattgatacactcagaaagaaaaacctctgaagatggtgtcatataactcgacacggcaattccgatggttgattatttggacctagttgcatgcatcttgtatttaatctatgactatcttgtgcaagtgaataggagagaactagt

SEQ ID NO: 48164 - protein, 316 aa, Arabidopsis thaliana
  peptide (1)..(316): Ceres Seq. ID no. 13650104
  misc_feature (165)..(264): Pfam Name: 2OG-Fe(II) oxygenase superfamily Pfam Description: 2OG-Fe(II) oxygenase superfamily
  misc_feature (122)..(312): Homolog of NCBI NO: 32488372 NR Description: OSJNBa0043A12.2 [Oryza sativa (japonica
  misc_feature (52)..(126): Homolog of NCBI NO: 32488371 NR Description: OSJNBa0043A12.1 [Oryza sativa (japonica
  misc_feature (122)..(312): Homolog of NCBI NO: 32488371 NR Description: OSJNBa0043A12.1 [Oryza sativa (japonica
  misc_feature (85)..(126): Homolog of NCBI NO: 15240797 NR Description: oxidoreductase, 2OG-Fe(II) oxygenase family
  misc_feature (109)..(315): Homolog of NCBI NO: 15240797 NR Description: oxidoreductase, 2OG-Fe(II) oxygenase family
  misc_feature (7)..(126): Homolog of NCBI NO: 7433240 NR Description: probable flavonol synthase [imported] -
  misc_feature (126)..(315): Homolog of NCBI NO: 7433240 NR Description: probable flavonol synthase [imported] -
  misc_feature (1)..(126): Homolog of NCBI NO: 30689834 NR Description: flavonol synthase family [Arabidopsis thaliana]
  misc_feature (126)..(315): Homolog of NCBI NO: 30689834 NR Description: flavonol synthase family [Arabidopsis thaliana]
  misc_feature (1)..(316): Homolog of NCBI NO: 15232291 NR Description: oxidoreductase, 2OG-Fe(II) oxygenase family
MEETNKSVVNDYFTSAMELTESGDPHVPTRYILPPSQRPMLGPSIGTSTINLPVIDLSFLHDPLLRLCVIHEIELACKGFGFFQVINHGISSAVVKDAQDSATRFFDLPADEKMHLVSDNFQEPVREKVGKYAEATHVLHKQLIEAISESLGLEKNYLQEEIEEGSQVMAVNCYPACPEPEIALGMPPHSDYGSLTILLQSSEGLQIKDCNNNWVCVPYIEGALIVQLGDQVEVMSNGIYKSVVHRVTVNKDYKRLSFASLHSLPMHKKISPATQLVNENKPAAYGEFSFNDFLDYISRNDITQKRFIDTLRKKNL

SEQ ID NO: 48165 - protein, 300 aa, Arabidopsis thaliana
  peptide (1)..(300): Ceres Seq. ID no. 13650105
  misc_feature (149)..(248): Pfam Name: 2OG-Fe(II) oxygenase superfamily Pfam Description: 2OG-Fe(II) oxygenase superfamily
  misc_feature (106)..(296): Homolog of NCBI NO: 32488372 NR Description: OSJNBa0043A12.2 [Oryza sativa (japonica
  misc_feature (36)..(110): Homolog of NCBI NO: 32488371 NR Description: OSJNBa0043A12.1 [Oryza sativa (japonica
  misc_feature (106)..(296): Homolog of NCBI NO: 32488371 NR Description: OSJNBa0043A12.1 [Oryza sativa (japonica
  misc_feature (69)..(110): Homolog of NCBI NO: 15240797 NR Description: oxidoreductase, 2OG-Fe(II) oxygenase family
  misc_feature (93)..(299): Homolog of NCBI NO: 15240797 NR Description: oxidoreductase, 2OG-Fe(II) oxygenase family
  misc_feature (1)..(110): Homolog of NCBI NO: 7433240 NR Description: probable flavonol synthase [imported] -
  misc_feature (110)..(299): Homolog of NCBI NO: 7433240 NR Description: probable flavonol synthase [imported] -
  misc_feature (1)..(110): Homolog of NCBI NO: 30689834 NR Description: flavonol synthase family [Arabidopsis thaliana]
  misc_feature (110)..(299): Homolog of NCBI NO: 30689834 NR Description: flavonol synthase family [Arabidopsis thaliana]
  misc_feature (1)..(300): Homolog of NCBI NO: 15232291 NR Description: oxidoreductase, 2OG-Fe(II) oxygenase family
MELTESGDPHVPTRYILPPSQRPMLGPSIGTSTINLPVIDLSFLHDPLLRLCVIHEIELACKGFGFFQVINHGISSAVVKDAQDSATRFFDLPADEKMHLVSDNFQEPVREKVGKYAEATHVLHKQLIEAISESLGLEKNYLQEEIEEGSQVMAVNCYPACPEPEIALGMPPHSDYGSLTILLQSSEGLQIKDCNNNWVCVPYIEGALIVQLGDQVEVMSNGIYKSVVHRVTVNKDYKRLSFASLHSLPMHKKISPATQLVNENKPAAYGEFSFNDFLDYISRNDITQKRFIDTLRKKNL

SEQ ID NO: 48166 - protein, 277 aa, Arabidopsis thaliana
  peptide (1)..(277): Ceres Seq. ID no. 13650106
  misc_feature (126)..(225): Pfam Name: 2OG-Fe(II) oxygenase superfamily Pfam Description: 2OG-Fe(II) oxygenase superfamily
  misc_feature (83)..(273): Homolog of NCBI NO: 32488372 NR Description: OSJNBa0043A12.2 [Oryza sativa (japonica
  misc_feature (13)..(87): Homolog of NCBI NO: 32488371 NR Description: OSJNBa0043A12.1 [Oryza sativa (japonica
  misc_feature (83)..(273): Homolog of NCBI NO: 32488371 NR Description: OSJNBa0043A12.1 [Oryza sativa (japonica
  misc_feature (46)..(87): Homolog of NCBI NO: 15240797 NR Description: oxidoreductase, 2OG-Fe(II) oxygenase family
  misc_feature (70)..(276): Homolog of NCBI NO: 15240797 NR Description: oxidoreductase, 2OG-Fe(II) oxygenase family
  misc_feature (1)..(87): Homolog of NCBI NO: 7433240 NR Description: probable flavonol synthase [imported] -
  misc_feature (87)..(276): Homolog of NCBI NO: 7433240 NR Description: probable flavonol synthase [imported] -
  misc_feature (1)..(87): Homolog of NCBI NO: 30689834 NR Description: flavonol synthase family [Arabidopsis thaliana]
  misc_feature (87)..(276): Homolog of NCBI NO: 30689834 NR Description: flavonol synthase family [Arabidopsis thaliana]
  misc_feature (1)..(277): Homolog of NCBI NO: 15232291 NR Description: oxidoreductase, 2OG-Fe(II) oxygenase family
MLGPSIGTSTINLPVIDLSFLHDPLLRLCVIHEIELACKGFGFFQVINHGISSAVVKDAQDSATRFFDLPADEKMHLVSDNFQEPVREKVGKYAEATHVLHKQLIEAISESLGLEKNYLQEEIEEGSQVMAVNCYPACPEPEIALGMPPHSDYGSLTILLQSSEGLQIKDCNNNWVCVPYIEGALIVQLGDQVEVMSNGIYKSVVHRVTVNKDYKRLSFASLHSLPMHKKISPATQLVNENKPAAYGEFSFNDFLDYISRNDITQKRFIDTLRKKNL

SEQ ID NO: 48167 - DNA, 833 bp, Arabidopsis thaliana
  misc_feature (1)..(833): Ceres Seq. ID no. 12591931
  misc_feature: MA Experiment ID: 20000234 Result: Up-regulated in Transcription
  misc_feature: MA Experiment 20000234 PARAMETER Experiment Name: At_Siliques_P Parameter: Age (day) Value: 21
  misc_feature: MA Experiment 20000234 PARAMETER Experiment Name: At_Siliques_P Parameter: Organism Value: A. thaliana
  misc_feature: MA Experiment 20000234 PARAMETER Experiment Name: At_Siliques_P Parameter: Plant Line Value: WS
  misc_feature: MA Experiment 20000234 PARAMETER Experiment Name: At_Siliques_P Parameter: Tissue Value: Less Than 5mm Siliques vs. Whole Plant
  misc_feature: MA Experiment ID: 20000235 Result: Up-regulated in Transcription
  misc_feature: MA Experiment 20000235 PARAMETER Experiment Name: At_Siliques_P Parameter: Age (day) Value: 21
  misc_feature: MA Experiment 20000235 PARAMETER Experiment Name: At_Siliques_P Parameter: Organism Value: A. thaliana
  misc_feature: MA Experiment 20000235 PARAMETER Experiment Name: At_Siliques_P Parameter: Plant Line Value: WS
  misc_feature: MA Experiment 20000235 PARAMETER Experiment Name: At_Siliques_P Parameter: Tissue Value: 5-10mm Siliques vs. Whole Plant
  misc_feature: MA Experiment ID: 20000269 Result: Down-regulated in Transcription
  misc_feature: MA Experiment 20000269 PARAMETER Experiment Name: At_1mM_KNO3_L-vs-H_Roots_P Parameter: Age (day) Value: 7,10,12
  misc_feature: MA Experiment 20000269 PARAMETER Experiment Name: At_1mM_KNO3_L-vs-H_Roots_P Parameter: Organism Value: A. thaliana
  misc_feature: MA Experiment 20000269 PARAMETER Experiment Name: At_1mM_KNO3_L-vs-H_Roots_P Parameter: Plant Line Value: WS
  misc_feature: MA Experiment 20000269 PARAMETER Experiment Name: At_1mM_KNO3_L-vs-H_Roots_P Parameter: Timepoint (day) Value: 7,10,12
  misc_feature: MA Experiment 20000269 PARAMETER Experiment Name: At_1mM_KNO3_L-vs-H_Roots_P Parameter: Tissue Value: Roots
  misc_feature: MA Experiment 20000269 PARAMETER Experiment Name: At_1mM_KNO3_L-vs-H_Roots_P Parameter: Treatment Value: 1mM KNO3 vs. 50mM KNO3
  misc_feature: MA Experiment ID: 20000437 Result: Down-regulated in Transcription
  misc_feature: MA Experiment 20000437 PARAMETER Experiment Name: At_Drought_P Parameter: Age (day) Value: 8
  misc_feature: MA Experiment 20000437 PARAMETER Experiment Name: At_Drought_P Parameter: Organism Value: A. thaliana
  misc_feature: MA Experiment 20000437 PARAMETER Experiment Name: At_Drought_P Parameter: Plant Line Value: WS
  misc_feature: MA Experiment 20000437 PARAMETER Experiment Name: At_Drought_P Parameter: Timepoint (hr) Value: 24
  misc_feature: MA Experiment 20000437 PARAMETER Experiment Name: At_Drought_P Parameter: Tissue Value: Whole Plant
  misc_feature: MA Experiment 20000437 PARAMETER Experiment Name: At_Drought_P Parameter: Treatment Value: Drought vs. No Drought
  misc_feature: MA Experiment ID: 20000445 Result: Down-regulated in Transcription
  misc_feature: MA Experiment 20000445 PARAMETER Experiment Name: At_100uM_NAA__P Parameter: Age (day) Value: 14
  misc_feature: MA Experiment 20000445 PARAMETER Experiment Name: At_100uM_NAA__P Parameter: Organism Value: A. thaliana
  misc_feature: MA Experiment 20000445 PARAMETER Experiment Name: At_100uM_NAA__P Parameter: Plant Line Value: WS
  misc_feature: MA Experiment 20000445 PARAMETER Experiment Name: At_100uM_NAA__P Parameter: Timepoint (hr) Value: 6
  misc_feature: MA Experiment 20000445 PARAMETER Experiment Name: At_100uM_NAA__P Parameter: Tissue Value: Aerial
  misc_feature: MA Experiment 20000445 PARAMETER Experiment Name: At_100uM_NAA__P Parameter: Treatment Value: 100uM NAA vs. No Treatment
  misc_feature: MA Experiment ID: 20000453 Result: Down-regulated in Transcription
  misc_feature: MA Experiment 20000453 PARAMETER Experiment Name: At_100uM_ABA_P Parameter: Age (day) Value: 15
  misc_feature: MA Experiment 20000453 PARAMETER Experiment Name: At_100uM_ABA_P Parameter: Organism Value: A. thaliana
  misc_feature: MA Experiment 20000453 PARAMETER Experiment Name: At_100uM_ABA_P Parameter: Plant Line Value: WS
  misc_feature: MA Experiment 20000453 PARAMETER Experiment Name: At_100uM_ABA_P Parameter: Timepoint (hr) Value: 24
  misc_feature: MA Experiment 20000453 PARAMETER Experiment Name: At_100uM_ABA_P Parameter: Tissue Value: Aerial
  misc_feature: MA Experiment 20000453 PARAMETER Experiment Name: At_100uM_ABA_P Parameter: Treatment Value: 100uM ABA vs. No Treatment
  misc_feature: MA Experiment ID: 20001248 Result: Down-regulated in Transcription
  misc_feature: MA Experiment 20001248 PARAMETER Experiment Name: At_Far-red-induction_P Parameter: Age (day) Value: 7
  misc_feature: MA Experiment 20001248 PARAMETER Experiment Name: At_Far-red-induction_P Parameter: Light Value: Far-red vs. White
  misc_feature: MA Experiment 20001248 PARAMETER Experiment Name: At_Far-red-induction_P Parameter: Organism Value: A. thaliana
  misc_feature: MA Experiment 20001248 PARAMETER Experiment Name: At_Far-red-induction_P Parameter: Plant Line Value: Columbia
  misc_feature: MA Experiment 20001248 PARAMETER Experiment Name: At_Far-red-induction_P Parameter: Timepoint (hr) Value: 4
  misc_feature: MA Experiment 20001248 PARAMETER Experiment Name: At_Far-red-induction_P Parameter: Tissue Value: Whole Plant
  misc_feature: MA Experiment ID: 20001770 Result: Down-regulated in Transcription
  misc_feature: MA Experiment 20001770 PARAMETER Experiment Name: At_Far-red-enriched-adult_P Parameter: Age (day) Value: 28
  misc_feature: MA Experiment 20001770 PARAMETER Experiment Name: At_Far-red-enriched-adult_P Parameter: Light Value: Far-red enriched vs. White
  misc_feature: MA Experiment 20001770 PARAMETER Experiment Name: At_Far-red-enriched-adult_P Parameter: Organism Value: A. thaliana
  misc_feature: MA Experiment 20001770 PARAMETER Experiment Name: At_Far-red-enriched-adult_P Parameter: Plant Line Value: Columbia
  misc_feature: MA Experiment 20001770 PARAMETER Experiment Name: At_Far-red-enriched-adult_P Parameter: Timepoint (hr) Value: 8
  misc_feature: MA Experiment 20001770 PARAMETER Experiment Name: At_Far-red-enriched-adult_P Parameter: Tissue Value: Aerial
  misc_feature: MA Experiment ID: 20001904 Result: Up-regulated in Transcription
  misc_feature: MA Experiment 20001904 PARAMETER Experiment Name: At_Drought_Reproduction_P Parameter: Age (day) Value: 37
  misc_feature: MA Experiment 20001904 PARAMETER Experiment Name: At_Drought_Reproduction_P Parameter: Organism Value: A. thaliana
  misc_feature: MA Experiment 20001904 PARAMETER Experiment Name: At_Drought_Reproduction_P Parameter: Plant Line Value: WS
  misc_feature: MA Experiment 20001904 PARAMETER Experiment Name: At_Drought_Reproduction_P Parameter: Timepoint (day) Value: 7
  misc_feature: MA Experiment 20001904 PARAMETER Experiment Name: At_Drought_Reproduction_P Parameter: Tissue Value: Rosettes
  misc_feature: MA Experiment 20001904 PARAMETER Experiment Name: At_Drought_Reproduction_P Parameter: Treatment Value: Drought vs. No Drought
  misc_feature: MA Experiment ID: 20001906 Result: Down-regulated in Transcription
  misc_feature: MA Experiment 20001906 PARAMETER Experiment Name: At_Drought_Reproduction_P Parameter: Age (day) Value: 35
  misc_feature: MA Experiment 20001906 PARAMETER Experiment Name: At_Drought_Reproduction_P Parameter: Organism Value: A. thaliana
  misc_feature: MA Experiment 20001906 PARAMETER Experiment Name: At_Drought_Reproduction_P Parameter: Plant Line Value: WS
  misc_feature: MA Experiment 20001906 PARAMETER Experiment Name: At_Drought_Reproduction_P Parameter: Timepoint (day) Value: 5
  misc_feature: MA Experiment 20001906 PARAMETER Experiment Name: At_Drought_Reproduction_P Parameter: Tissue Value: Siliques
  misc_feature: MA Experiment 20001906 PARAMETER Experiment Name: At_Drought_Reproduction_P Parameter: Treatment Value: Drought vs. No Drought
attctctcttcttcttcgacaaacaccaagacaaacgtaagcacaagcacgagtgagtgagagatgtttgccgtggagaatgggttgcagggagacccgagattaaaggccatctccgacgccattcgtgtcattcctcacttccccaagactgggatcatgtttcaggacataacaacgttgttgctggatccagttgcctttaaacatgtcgtcgacatcttcgttgatcgttacaagcacatgaacatctctctcgtcgccggagtagaggcgagaggattcatatttggacctcccatcgcgttagccataggtgccaagttcgttccactacgcaaaccgggaaaactacccgggagagtgataagcgaagagtacgaacttgagtatggaagagattgtctagagatgagtgtagaagccgtcaaatcggaggaacgagctctcatcatcgacgatttagttgccactggtgggacactctctgcttccattaacctcttggagcgtgccggggccgaagttgtagagtgtgcatgcgttgttggtttgcctaagtttaaggggcagtgtaagctgaagggaaagcctttgtacgttctggtggaaccaaaccagtttgatgaattaaccttataaaagccttttctattcaacgattatgacaaataatgtaatcggtttaatcgattttgtaactaaggatttgtttgttttctattggctccatgtggaatgattcatgctagttactatgaaattcggaatacgaaggtatgcagtattatgcaccactgttcttcagatgaatgaattcaagtcgattttct

SEQ ID NO: 48168 - protein, 192 aa, Arabidopsis thaliana
  peptide (1)..(192): Ceres Seq. ID no. 12591932
  misc_feature (3)..(182): Homolog of NCBI NO: 32492063 NR Description: adenine phosphoribosyltransferase [Brassica napus]
  misc_feature (11)..(183): Homolog of NCBI NO: 40019121 NR Description: adenine phosphoribosyltransferase [Zea mays]
  misc_feature (6)..(183): Homolog of NCBI NO: 21536749 NR Description: adenine phosphoribosyltransferase (EC
  misc_feature (6)..(183): Homolog of NCBI NO: 15235709 NR Description: adenine phosphoribosyltransferase (EC 2.4.2.7) -
  misc_feature (11)..(183): Homolog of NCBI NO: 33354190 NR Description: putative adenine phosphoribosyl transferase
  misc_feature (5)..(183): Homolog of NCBI NO: 15234553 NR Description: putative adenine phosphoribosyltransferase
  misc_feature (5)..(183): Homolog of NCBI NO: 29826070 NR Description: adenine phosphoribosyltransferase form 2
  misc_feature (1)..(189): Homolog of NCBI NO: 15238973 NR Description: adenine phosphoribosyltransferase - like protein
  misc_feature (1)..(192): Homolog of NCBI NO: 1402894 NR Description: adenine phosphoribosyltransferase [Arabidopsis
  misc_feature (1)..(192): Homolog of NCBI NO: 15220047 NR Description: adenine phosphoribosyltransferase; protein id:
  misc_feature (3)..(182): Homolog of NCBI NO: 32492063 NR Description: adenine phosphoribosyltransferase [Brassica napus]
  misc_feature (11)..(183): Homolog of NCBI NO: 40019121 NR Description: adenine phosphoribosyltransferase [Zea mays]
  misc_feature (6)..(183): Homolog of NCBI NO: 21536749 NR Description: adenine phosphoribosyltransferase (EC
  misc_feature (6)..(183): Homolog of NCBI NO: 15235709 NR Description: adenine phosphoribosyltransferase (EC 2.4.2.7) -
  misc_feature (11)..(183): Homolog of NCBI NO: 33354190 NR Description: putative adenine phosphoribosyl transferase
  misc_feature (5)..(183): Homolog of NCBI NO: 15234553 NR Description: putative adenine phosphoribosyltransferase
  misc_feature (5)..(183): Homolog of NCBI NO: 29826070 NR Description: adenine phosphoribosyltransferase form 2
  misc_feature (1)..(189): Homolog of NCBI NO: 15238973 NR Description: adenine phosphoribosyltransferase - like protein
  misc_feature (1)..(192): Homolog of NCBI NO: 1402894 NR Description: adenine phosphoribosyltransferase [Arabidopsis
  misc_feature (1)..(192): Homolog of NCBI NO: 15220047 NR Description: adenine phosphoribosyltransferase; protein id:
MFAVENGLQGDPRLKAISDAIRVIPHFPKTGIMFQDITTLLLDPVAFKHVVDIFVDRYKHMNISLVAGVEARGFIFGPPIALAIGAKFVPLRKPGKLPGRVISEEYELEYGRDCLEMSVEAVKSEERALIIDDLVATGGTLSASINLLERAGAEVVECACVVGLPKFKGQCKLKGKPLYVLVEPNQFDELTL

SEQ ID NO: 48169 - protein, 160 aa, Arabidopsis thaliana
  peptide (1)..(160): Ceres Seq. ID no. 12591933
  misc_feature (1)..(150): Homolog of NCBI NO: 32492063 NR Description: adenine phosphoribosyltransferase [Brassica napus]
  misc_feature (1)..(151): Homolog of NCBI NO: 40019121 NR Description: adenine phosphoribosyltransferase [Zea mays]
  misc_feature (1)..(151): Homolog of NCBI NO: 21536749 NR Description: adenine phosphoribosyltransferase (EC
  misc_feature (1)..(151): Homolog of NCBI NO: 15235709 NR Description: adenine phosphoribosyltransferase (EC 2.4.2.7) -
  misc_feature (1)..(151): Homolog of NCBI NO: 33354190 NR Description: putative adenine phosphoribosyl transferase
  misc_feature (1)..(151): Homolog of NCBI NO: 15234553 NR Description: putative adenine phosphoribosyltransferase
  misc_feature (1)..(151): Homolog of NCBI NO: 29826070 NR Description: adenine phosphoribosyltransferase form 2
  misc_feature (1)..(157): Homolog of NCBI NO: 15238973 NR Description: adenine phosphoribosyltransferase - like protein
  misc_feature (1)..(160): Homolog of NCBI NO: 1402894 NR Description: adenine phosphoribosyltransferase [Arabidopsis
  misc_feature (1)..(160): Homolog of NCBI NO: 15220047 NR Description: adenine phosphoribosyltransferase; protein id:
  misc_feature (1)..(150): Homolog of NCBI NO: 32492063 NR Description: adenine phosphoribosyltransferase [Brassica napus]
  misc_feature (1)..(151): Homolog of NCBI NO: 40019121 NR Description: adenine phosphoribosyltransferase [Zea mays]
  misc_feature (1)..(151): Homolog of NCBI NO: 21536749 NR Description: adenine phosphoribosyltransferase (EC
  misc_feature (1)..(151): Homolog of NCBI NO: 15235709 NR Description: adenine phosphoribosyltransferase (EC 2.4.2.7) -
  misc_feature (1)..(151): Homolog of NCBI NO: 33354190 NR Description: putative adenine phosphoribosyl transferase
  misc_feature (1)..(151): Homolog of NCBI NO: 15234553 NR Description: putative adenine phosphoribosyltransferase
  misc_feature (1)..(151): Homolog of NCBI NO: 29826070 NR Description: adenine phosphoribosyltransferase form 2
  misc_feature (1)..(157): Homolog of NCBI NO: 15238973 NR Description: adenine phosphoribosyltransferase - like protein
  misc_feature (1)..(160): Homolog of NCBI NO: 1402894 NR Description: adenine phosphoribosyltransferase [Arabidopsis
  misc_feature (1)..(160): Homolog of NCBI NO: 15220047 NR Description: adenine phosphoribosyltransferase; protein id:
MFQDITTLLLDPVAFKHVVDIFVDRYKHMNISLVAGVEARGFIFGPPIALAIGAKFVPLRKPGKLPGRVISEEYELEYGRDCLEMSVEAVKSEERALIIDDLVATGGTLSASINLLERAGAEVVECACVVGLPKFKGQCKLKGKPLYVLVEPNQFDELTL

SEQ ID NO: 48170 - protein, 132 aa, Arabidopsis thaliana
  peptide (1)..(132): Ceres Seq. ID no. 12591934
  misc_feature (1)..(122): Homolog of NCBI NO: 32492063 NR Description: adenine phosphoribosyltransferase [Brassica napus]
  misc_feature (1)..(123): Homolog of NCBI NO: 40019121 NR Description: adenine phosphoribosyltransferase [Zea mays]
  misc_feature (1)..(123): Homolog of NCBI NO: 21536749 NR Description: adenine phosphoribosyltransferase (EC
  misc_feature (1)..(123): Homolog of NCBI NO: 15235709 NR Description: adenine phosphoribosyltransferase (EC 2.4.2.7) -
  misc_feature (1)..(123): Homolog of NCBI NO: 33354190 NR Description: putative adenine phosphoribosyl transferase
  misc_feature (1)..(123): Homolog of NCBI NO: 15234553 NR Description: putative adenine phosphoribosyltransferase
  misc_feature (1)..(123): Homolog of NCBI NO: 29826070 NR Description: adenine phosphoribosyltransferase form 2
  misc_feature (1)..(129): Homolog of NCBI NO: 15238973 NR Description: adenine phosphoribosyltransferase - like protein
  misc_feature (1)..(132): Homolog of NCBI NO: 1402894 NR Description: adenine phosphoribosyltransferase [Arabidopsis
  misc_feature (1)..(132): Homolog of NCBI NO: 15220047 NR Description: adenine phosphoribosyltransferase; protein id:
  misc_feature (1)..(122): Homolog of NCBI NO: 32492063 NR Description: adenine phosphoribosyltransferase [Brassica napus]
  misc_feature (1)..(123): Homolog of NCBI NO: 40019121 NR Description: adenine phosphoribosyltransferase [Zea mays]
  misc_feature (1)..(123): Homolog of NCBI NO: 21536749 NR Description: adenine phosphoribosyltransferase (EC
  misc_feature (1)..(123): Homolog of NCBI NO: 15235709 NR Description: adenine phosphoribosyltransferase (EC 2.4.2.7) -
  misc_feature (1)..(123): Homolog of NCBI NO: 33354190 NR Description: putative adenine phosphoribosyl transferase
  misc_feature (1)..(123): Homolog of NCBI NO: 15234553 NR Description: putative adenine phosphoribosyltransferase
  misc_feature (1)..(123): Homolog of NCBI NO: 29826070 NR Description: adenine phosphoribosyltransferase form 2
  misc_feature (1)..(129): Homolog of NCBI NO: 15238973 NR Description: adenine phosphoribosyltransferase - like protein
  misc_feature (1)..(132): Homolog of NCBI NO: 1402894 NR Description: adenine phosphoribosyltransferase [Arabidopsis
  misc_feature (1)..(132): Homolog of NCBI NO: 15220047 NR Description: adenine phosphoribosyltransferase; protein id:
MNISLVAGVEARGFIFGPPIALAIGAKFVPLRKPGKLPGRVISEEYELEYGRDCLEMSVEAVKSEERALIIDDLVATGGTLSASINLLERAGAEVVECACVVGLPKFKGQCKLKGKPLYVLVEPNQFDELTL

SEQ ID NO: 48171 - DNA, 891 bp, Arabidopsis thaliana
  misc_feature (1)..(891): Ceres Seq. ID no. 12674807
  misc_feature: MA Experiment ID: 20000179 Result: Up-regulated in Transcription
  misc_feature: MA Experiment 20000179 PARAMETER Experiment Name: At_Germinating_Seeds_P Parameter: Age (hr) Value: 6 vs. 0
  misc_feature: MA Experiment 20000179 PARAMETER Experiment Name: At_Germinating_Seeds_P Parameter: Tissue Value: Germinating Seeds
  misc_feature: MA Experiment ID: 20000182 Result: Up-regulated in Transcription
  misc_feature: MA Experiment 20000182 PARAMETER Experiment Name: At_2mM_SA_P Parameter: Age (day) Value: 14
  misc_feature: MA Experiment 20000182 PARAMETER Experiment Name: At_2mM_SA_P Parameter: Organism Value: A. thaliana
  misc_feature: MA Experiment 20000182 PARAMETER Experiment Name: At_2mM_SA_P Parameter: Plant Line Value: WS
  misc_feature: MA Experiment 20000182 PARAMETER Experiment Name: At_2mM_SA_P Parameter: Timepoint (hr) Value: 6
  misc_feature: MA Experiment 20000182 PARAMETER Experiment Name: At_2mM_SA_P Parameter: Tissue Value: Aerial
  misc_feature: MA Experiment 20000182 PARAMETER Experiment Name: At_2mM_SA_P Parameter: Treatment Value: 2mM SA vs. No Treatment
  misc_feature: MA Experiment ID: 20000234 Result: Up-regulated in Transcription
  misc_feature: MA Experiment 20000234 PARAMETER Experiment Name: At_Siliques_P Parameter: Age (day) Value: 21
  misc_feature: MA Experiment 20000234 PARAMETER Experiment Name: At_Siliques_P Parameter: Organism Value: A. thaliana
  misc_feature: MA Experiment 20000234 PARAMETER Experiment Name: At_Siliques_P Parameter: Plant Line Value: WS
  misc_feature: MA Experiment 20000234 PARAMETER Experiment Name: At_Siliques_P Parameter: Tissue Value: Less Than 5mm Siliques vs. Whole Plant
actcggcgaattctctcgagaaaacaaactgaatttttttgatcgaagaagatctaaaaaaaaagatggagagacgacaagcgaagatccatgtctttgtattgataggtctaattctattgaattcaatcaatcaaatctcatctctctctgtaacggtgaacgacgaagaatgtgtccaagagtacgtcctttacgaaggcgacactgtttccggtaacttcgtcgtcgtcgatcatgatatcttctggggatccgatcatcctggtttggatttcacggtgacgtcaccagctgggaacattgtacagactttaaagggaacatctggagataagtttgagtttaaggctccaaaaagtggaatgtacaaattttgtttccacaatccttattctactcctgaaactgtctccttttatattcatgttggtcatattcctaatgagcatgacttagccaaagatgaacatttggacccggtaaatgttaagatagctgagttgagagaggctttggaatctgttgttgctgagcagaagtatttgaaagctcgtgacactcgtcaccgtcatacgaatgagagcacgagaaagcgagtgatattctacacagtaggagagtacattttccttgccgcagctagtggacttcaagttctctacatccgcaagctcttcagcaagtcggtagcatacaacagagtttgaacatagcaaaacctcagagcgaggtcttgtgtccagtttatgtttgaatcggtgatcaaaacacaatcctaaacagtgttagttaatttaaaagcttcaatagcgaaagacttactttttgtttttggtttctacacttttataagtttactaatgcagaacttgatgaagcttttttctg

SEQ ID NO: 48172 - protein, 214 aa, Arabidopsis thaliana
  peptide (1)..(214): Ceres Seq. ID no. 12674808
  misc_feature (12)..(211): Pfam Name: emp24/gp25L/p24 family Pfam Description: emp24/gp25L/p24 family
  misc_feature (10)..(205): Homolog of NCBI NO: 1352660 NR Description: Cop-coated vesicle membrane protein p24 precursor
  misc_feature (4)..(205): Homolog of NCBI NO: 4514557 NR Description: COP-coated vesicle membrane protein P24 homolog
  misc_feature (16)..(205): Homolog of NCBI NO: 29477153 NR Description: Similar to coated vesicle membrane protein [Danio
  misc_feature (1)..(205): Homolog of NCBI NO: 18921123 NR Description: CG3564-PA [Drosophila melanogaster]
  misc_feature (10)..(205): Homolog of NCBI NO: 40056982 NR Description: emp24/gp25L/p24 family protein [Dictyostelium
  misc_feature (12)..(214): Homolog of NCBI NO: 21595553 NR Description: putative coated vesicle membrane protein
  misc_feature (12)..(214): Homolog of NCBI NO: 15231496 NR Description: putative coated vesicle membrane protein
  misc_feature (101)..(214): Homolog of NCBI NO: 22331264 NR Description: hypothetical protein
  misc_feature (27)..(214): Homolog of NCBI NO: 30017578 NR Description: putative cop-coated vesicle membrane protein
  misc_feature (1)..(214): Homolog of NCBI NO: 17979492 NR Description: AT3g22845/MWI23_22 [Arabidopsis thaliana]
MERRQAKIHVFVLIGLILLNSINQISSLSVTVNDEECVQEYVLYEGDTVSGNFVVVDHDIFWGSDHPGLDFTVTSPAGNIVQTLKGTSGDKFEFKAPKSGMYKFCFHNPYSTPETVSFYIHVGHIPNEHDLAKDEHLDPVNVKIAELREALESVVAEQKYLKARDTRHRHTNESTRKRVIFYTVGEYIFLAAASGLQVLYIRKLFSKSVAYNRV

SEQ ID NO: 48173 - protein, 114 aa, Arabidopsis thaliana
  peptide (1)..(114): Ceres Seq. ID no. 12674809
  misc_feature (1)..(111): Pfam Name: emp24/gp25L/p24 family Pfam Description: emp24/gp25L/p24 family
  misc_feature (1)..(105): Homolog of NCBI NO: 1352660 NR Description: Cop-coated vesicle membrane protein p24 precursor
  misc_feature (1)..(105): Homolog of NCBI NO: 4514557 NR Description: COP-coated vesicle membrane protein P24 homolog
  misc_feature (1)..(105): Homolog of NCBI NO: 29477153 NR Description: Similar to coated vesicle membrane protein [Danio
  misc_feature (1)..(105): Homolog of NCBI NO: 18921123 NR Description: CG3564-PA [Drosophila melanogaster]
  misc_feature (1)..(105): Homolog of NCBI NO: 40056982 NR Description: emp24/gp25L/p24 family protein [Dictyostelium
  misc_feature (1)..(114): Homolog of NCBI NO: 21595553 NR Description: putative coated vesicle membrane protein
  misc_feature (1)..(114): Homolog of NCBI NO: 15231496 NR Description: putative coated vesicle membrane protein
  misc_feature (1)..(114): Homolog of NCBI NO: 22331264 NR Description: hypothetical protein
  misc_feature (1)..(114): Homolog of NCBI NO: 30017578 NR Description: putative cop-coated vesicle membrane protein
  misc_feature (1)..(114): Homolog of NCBI NO: 17979492 NR Description: AT3g22845/MWI23_22 [Arabidopsis thaliana]
MYKFCFHNPYSTPETVSFYIHVGHIPNEHDLAKDEHLDPVNVKIAELREALESVVAEQKYLKARDTRHRHTNESTRKRVIFYTVGEYIFLAAASGLQVLYIRKLFSKSVAYNRV

SEQ ID NO: 48174 - DNA, 3191 bp, Arabidopsis thaliana; identical to SEQ ID NO: 46415
  misc_feature (1)..(3191): Ceres Seq. ID no. 13578685
  misc_feature: MA Experiment ID: 20000265 Result: Up-regulated in Transcription
  misc_feature: MA Experiment 20000265 PARAMETER Experiment Name: At_Open_Flower_P Parameter: Age (day) Value: 21
  misc_feature: MA Experiment 20000265 PARAMETER Experiment Name: At_Open_Flower_P Parameter: Plant Line Value: WS
  misc_feature: MA Experiment 20000265 PARAMETER Experiment Name: At_Open_Flower_P Parameter: Tissue Value: Closed Flower vs. Whole Plant
  misc_feature: MA Experiment ID: 20000439 Result: Down-regulated in Transcription
  misc_feature: MA Experiment 20000439 PARAMETER Experiment Name: At_Roots__P Parameter: Age (day) Value: 14 vs. 21
  misc_feature: MA Experiment 20000439 PARAMETER Experiment Name: At_Roots__P Parameter: Organism Value: A. thaliana
  misc_feature: MA Experiment 20000439 PARAMETER Experiment Name: At_Roots__P Parameter: Tissue Value: Roots vs. Whole Plant
  misc_feature: MA Experiment ID: 20000495 Result: Up-regulated in Transcription
  misc_feature: MA Experiment 20000495 PARAMETER Experiment Name: At_Guard_Cells_P Parameter: Harvest Date Value: 8/2/2002
  misc_feature: MA Experiment 20000495 PARAMETER Experiment Name: At_Guard_Cells_P Parameter: Organism Value: A. thaliana
  misc_feature: MA Experiment 20000495 PARAMETER Experiment Name: At_Guard_Cells_P Parameter: Tissue Value: Guard Cells vs. Leaves
  misc_feature: MA Experiment ID: 20000496 Result: Up-regulated in Transcription
  misc_feature: MA Experiment 20000496 PARAMETER Experiment Name: At_Guard_Cells_P Parameter: Harvest Date Value: 7/19/2002
  misc_feature: MA Experiment 20000496 PARAMETER Experiment Name: At_Guard_Cells_P Parameter: Organism Value: Canola
  misc_feature: MA Experiment 20000496 PARAMETER Experiment Name: At_Guard_Cells_P Parameter: Tissue Value: Guard Cells vs. Leaves

SEQ ID NO: 48175 - protein, 976 aa, Arabidopsis thaliana; identical to SEQ ID NO: 46416
  peptide (1)..(976): Ceres Seq. ID no. 13578686
  misc_feature (648)..(941): Homolog of NCBI NO: 27497207 NR Description: Hypothetical protein [Oryza sativa (japonica
  misc_feature (12)..(539): Homolog of NCBI NO: 27497207 NR Description: Hypothetical protein [Oryza sativa (japonica
  misc_feature (646)..(930): Homolog of NCBI NO: 15229189 NR Description: leucine-rich repeat transmembrane protein kinase,
  misc_feature (7)..(539): Homolog of NCBI NO: 15229189 NR Description: leucine-rich repeat transmembrane protein kinase,
  misc_feature (73)..(963): Homolog of NCBI NO: 15220056 NR Description: leucine rich repeat protein family [Arabidopsis
  misc_feature (7)..(546): Homolog of NCBI NO: 8809636 NR Description: receptor-like protein kinase [Arabidopsis
  misc_feature (93)..(975): Homolog of NCBI NO: 8809636 NR Description: receptor-like protein kinase [Arabidopsis
  misc_feature (121)..(976): Homolog of NCBI NO: 18390097 NR Description: putative receptor protein kinase [Sorghum bicolor]
  misc_feature (251)..(975): Homolog of NCBI NO: 28140043 NR Description: receptor-like protein kinase [Elaeis guineensis]
  misc_feature (31)..(975): Homolog of NCBI NO: 15240720 NR Description: receptor-related protein kinase [Arabidopsis
  misc_feature (648)..(941): Homolog of NCBI NO: 27497207 NR Description: Hypothetical protein [Oryza sativa (japonica
  misc_feature (12)..(539): Homolog of NCBI NO: 27497207 NR Description: Hypothetical protein [Oryza sativa (japonica
  misc_feature (646)..(930): Homolog of NCBI NO: 15229189 NR Description: leucine-rich repeat transmembrane protein kinase,
  misc_feature (7)..(539): Homolog of NCBI NO: 15229189 NR Description: leucine-rich repeat transmembrane protein kinase,
  misc_feature (73)..(963): Homolog of NCBI NO: 15220056 NR Description: leucine rich repeat protein family [Arabidopsis
  misc_feature (7)..(546): Homolog of NCBI NO: 8809636 NR Description: receptor-like protein kinase [Arabidopsis
  misc_feature (93)..(975): Homolog of NCBI NO: 8809636 NR Description: receptor-like protein kinase [Arabidopsis
  misc_feature (121)..(976): Homolog of NCBI NO: 18390097 NR Description: putative receptor protein kinase [Sorghum bicolor]
  misc_feature (251)..(975): Homolog of NCBI NO: 28140043 NR Description: receptor-like protein kinase [Elaeis guineensis]
  misc_feature (31)..(975): Homolog of NCBI NO: 15240720 NR Description: receptor-related protein kinase [Arabidopsis

SEQ ID NO: 48176 - protein, 695 aa, Arabidopsis thaliana; identical to SEQ ID NO: 46417
  peptide (1)..(695): Ceres Seq. ID no. 13578687
  misc_feature (367)..(660): Homolog of NCBI NO: 27497207 NR Description: Hypothetical protein [Oryza sativa (japonica
  misc_feature (1)..(258): Homolog of NCBI NO: 27497207 NR Description: Hypothetical protein [Oryza sativa (japonica
  misc_feature (365)..(649): Homolog of NCBI NO: 15229189 NR Description: leucine-rich repeat transmembrane protein kinase,
  misc_feature (1)..(258): Homolog of NCBI NO: 15229189 NR Description: leucine-rich repeat transmembrane protein kinase,
  misc_feature (1)..(682): Homolog of NCBI NO: 15220056 NR Description: leucine rich repeat protein family [Arabidopsis
  misc_feature (1)..(265): Homolog of NCBI NO: 8809636 NR Description: receptor-like protein kinase [Arabidopsis
  misc_feature (1)..(694): Homolog of NCBI NO: 8809636 NR Description: receptor-like protein kinase [Arabidopsis
  misc_feature (1)..(695): Homolog of NCBI NO: 18390097 NR Description: putative receptor protein kinase [Sorghum bicolor]
  misc_feature (1)..(694): Homolog of NCBI NO: 28140043 NR Description: receptor-like protein kinase [Elaeis guineensis]
  misc_feature (1)..(694): Homolog of NCBI NO: 15240720 NR Description: receptor-related protein kinase [Arabidopsis
  misc_feature (367)..(660): Homolog of NCBI NO: 27497207 NR Description: Hypothetical protein [Oryza sativa (japonica
  misc_feature (1)..(258): Homolog of NCBI NO: 27497207 NR Description: Hypothetical protein [Oryza sativa (japonica
  misc_feature (365)..(649): Homolog of NCBI NO: 15229189 NR Description: leucine-rich repeat transmembrane protein kinase,
  misc_feature (1)..(258): Homolog of NCBI NO: 15229189 NR Description: leucine-rich repeat transmembrane protein kinase,
  misc_feature (1)..(682): Homolog of NCBI NO: 15220056 NR Description: leucine rich repeat protein family [Arabidopsis
  misc_feature (1)..(265): Homolog of NCBI NO: 8809636 NR Description: receptor-like protein kinase [Arabidopsis
  misc_feature (1)..(694): Homolog of NCBI NO: 8809636 NR Description: receptor-like protein kinase [Arabidopsis
  misc_feature (1)..(695): Homolog of NCBI NO: 18390097 NR Description: putative receptor protein kinase [Sorghum bicolor]
  misc_feature (1)..(694): Homolog of NCBI NO: 28140043 NR Description: receptor-like protein kinase [Elaeis guineensis]
  misc_feature (1)..(694): Homolog of NCBI NO: 15240720 NR Description: receptor-related protein kinase [Arabidopsis

SEQ ID NO: 48177 - protein, 647 aa, Arabidopsis thaliana; identical to SEQ ID NO: 46418
  peptide (1)..(647): Ceres Seq. ID no. 13578688
  misc_feature (319)..(612): Homolog of NCBI NO: 27497207 NR Description: Hypothetical protein [Oryza sativa (japonica
  misc_feature (1)..(210): Homolog of NCBI NO: 27497207 NR Description: Hypothetical protein [Oryza sativa (japonica
  misc_feature (317)..(601): Homolog of NCBI NO: 15229189 NR Description: leucine-rich repeat transmembrane protein kinase,
  misc_feature (1)..(210): Homolog of NCBI NO: 15229189 NR Description: leucine-rich repeat transmembrane protein kinase,
  misc_feature (1)..(634): Homolog of NCBI NO: 15220056 NR Description: leucine rich repeat protein family [Arabidopsis
  misc_feature (1)..(217): Homolog of NCBI NO: 8809636 NR Description: receptor-like protein kinase [Arabidopsis
  misc_feature (1)..(646): Homolog of NCBI NO: 8809636 NR Description: receptor-like protein kinase [Arabidopsis
  misc_feature (1)..(647): Homolog of NCBI NO: 18390097 NR Description: putative receptor protein kinase [Sorghum bicolor]
  misc_feature (1)..(646): Homolog of NCBI NO: 28140043 NR Description: receptor-like protein kinase [Elaeis guineensis]
  misc_feature (1)..(646): Homolog of NCBI NO: 15240720 NR Description: receptor-related protein kinase [Arabidopsis
  misc_feature (319)..(612): Homolog of NCBI NO: 27497207 NR Description: Hypothetical protein [Oryza sativa (japonica
  misc_feature (1)..(210): Homolog of NCBI NO: 27497207 NR Description: Hypothetical protein [Oryza sativa (japonica
  misc_feature (317)..(601): Homolog of NCBI NO: 15229189 NR Description: leucine-rich repeat transmembrane protein kinase,
  misc_feature (1)..(210): Homolog of NCBI NO: 15229189 NR Description: leucine-rich repeat transmembrane protein kinase,
  misc_feature (1)..(634): Homolog of NCBI NO: 15220056 NR Description: leucine rich repeat protein family [Arabidopsis
  misc_feature (1)..(217): Homolog of NCBI NO: 8809636 NR Description: receptor-like protein kinase [Arabidopsis
  misc_feature (1)..(646): Homolog of NCBI NO: 8809636 NR Description: receptor-like protein kinase [Arabidopsis
  misc_feature (1)..(647): Homolog of NCBI NO: 18390097 NR Description: putative receptor protein kinase [Sorghum bicolor]
  misc_feature (1)..(646): Homolog of NCBI NO: 28140043 NR Description: receptor-like protein kinase [Elaeis guineensis]
  misc_feature (1)..(646): Homolog of NCBI NO: 15240720 NR Description: receptor-related protein kinase [Arabidopsis

SEQ ID NO: 48178 - DNA, 1153 bp, Arabidopsis thaliana
  misc_feature (1)..(1153): Ceres Seq. ID no. 13648598
  misc_feature: MA Experiment ID: 20000173 Result: Up-regulated in Transcription
  misc_feature: MA Experiment 20000173 PARAMETER Experiment Name: At_42deg_Heat_P Parameter: Age (day) Value: 14
  misc_feature: MA Experiment 20000173 PARAMETER Experiment Name: At_42deg_Heat_P Parameter: Organism Value: A. thaliana
  misc_feature: MA Experiment 20000173 PARAMETER Experiment Name: At_42deg_Heat_P Parameter: Plant Line Value: WS
  misc_feature: MA Experiment 20000173 PARAMETER Experiment Name: At_42deg_Heat_P Parameter: Temperature (deg C) Value: 42 vs. 22
  misc_feature: MA Experiment 20000173 PARAMETER Experiment Name: At_42deg_Heat_P Parameter: Timepoint (hr) Value: 6
  misc_feature: MA Experiment 20000173 PARAMETER Experiment Name: At_42deg_Heat_P Parameter: Tissue Value: Aerial
  misc_feature: MA Experiment ID: 20000179 Result: Down-regulated in Transcription
  misc_feature: MA Experiment 20000179 PARAMETER Experiment Name: At_Germinating_Seeds_P Parameter: Age (hr) Value: 6 vs. 0
  misc_feature: MA Experiment 20000179 PARAMETER Experiment Name: At_Germinating_Seeds_P Parameter: Tissue Value: Germinating Seeds
  misc_feature: MA Experiment ID: 20000182 Result: Up-regulated in Transcription
  misc_feature: MA Experiment 20000182 PARAMETER Experiment Name: At_2mM_SA_P Parameter: Age (day) Value: 14
  misc_feature: MA Experiment 20000182 PARAMETER Experiment Name: At_2mM_SA_P Parameter: Organism Value: A. thaliana
  misc_feature: MA Experiment 20000182 PARAMETER Experiment Name: At_2mM_SA_P Parameter: Plant Line Value: WS
  misc_feature: MA Experiment 20000182 PARAMETER Experiment Name: At_2mM_SA_P Parameter: Timepoint (hr) Value: 6
  misc_feature: MA Experiment 20000182 PARAMETER Experiment Name: At_2mM_SA_P Parameter: Tissue Value: Aerial
  misc_feature: MA Experiment 20000182 PARAMETER Experiment Name: At_2mM_SA_P Parameter: Treatment Value: 2mM SA vs. No Treatment
  misc_feature: MA Experiment ID: 20000184 Result: Up-regulated in Transcription
  misc_feature: MA Experiment 20000184 PARAMETER Experiment Name: At_Shoots__P Parameter: Age (day) Value: 7
  misc_feature: MA Experiment 20000184 PARAMETER Experiment Name: At_Shoots__P Parameter: Tissue Value: Shoots vs. Whole Plant
  misc_feature: MA Experiment ID: 20000438 Result: Up-regulated in Transcription
  misc_feature: MA Experiment 20000438 PARAMETER Experiment Name: At_Shoots__P Parameter: Age (day) Value: 14
  misc_feature: MA Experiment 20000438 PARAMETER Experiment Name: At_Shoots__P Parameter: Tissue Value: Shoots vs. Whole Plant
  misc_feature: MA Experiment ID: 20000495 Result: Down-regulated in Transcription
  misc_feature: MA Experiment 20000495 PARAMETER Experiment Name: At_Guard_Cells_P Parameter: Harvest Date Value: 8/2/2002
  misc_feature: MA Experiment 20000495 PARAMETER Experiment Name: At_Guard_Cells_P Parameter: Organism Value: A. thaliana
  misc_feature: MA Experiment 20000495 PARAMETER Experiment Name: At_Guard_Cells_P Parameter: Tissue Value: Guard Cells vs. Leaves
  misc_feature: MA Experiment ID: 20000794 Result: Up-regulated in Transcription
  misc_feature: MA Experiment 20000794 PARAMETER Experiment Name: At_Petals_P Parameter: Age (day) Value: 23-25 days
  misc_feature: MA Experiment 20000794 PARAMETER Experiment Name: At_Petals_P Parameter: Plant Line Value: WS
  misc_feature: MA Experiment 20000794 PARAMETER Experiment Name: At_Petals_P Parameter: Tissue Value: Petals vs. Whole plant
  misc_feature: MA Experiment ID: 20001248 Result: Down-regulated in Transcription
  misc_feature: MA Experiment 20001248 PARAMETER Experiment Name: At_Far-red-induction_P Parameter: Age (day) Value: 7
  misc_feature: MA Experiment 20001248 PARAMETER Experiment Name: At_Far-red-induction_P Parameter: Light Value: Far-red vs. White
  misc_feature: MA Experiment 20001248 PARAMETER Experiment Name: At_Far-red-induction_P Parameter: Organism Value: A. thaliana
  misc_feature: MA Experiment 20001248 PARAMETER Experiment Name: At_Far-red-induction_P Parameter: Plant Line Value: Columbia
  misc_feature: MA Experiment 20001248 PARAMETER Experiment Name: At_Far-red-induction_P Parameter: Timepoint (hr) Value: 4
  misc_feature: MA Experiment 20001248 PARAMETER Experiment Name: At_Far-red-induction_P Parameter: Tissue Value: Whole Plant
  misc_feature: MA Experiment ID: 20001904 Result: Up-regulated in Transcription
  misc_feature: MA Experiment 20001904 PARAMETER Experiment Name: At_Drought_Reproduction_P Parameter: Age (day) Value: 37
  misc_feature: MA Experiment 20001904 PARAMETER Experiment Name: At_Drought_Reproduction_P Parameter: Organism Value: A. thaliana
  misc_feature: MA Experiment 20001904 PARAMETER Experiment Name: At_Drought_Reproduction_P Parameter: Plant Line Value: WS
  misc_feature: MA Experiment 20001904 PARAMETER Experiment Name: At_Drought_Reproduction_P Parameter: Timepoint (day) Value: 7
  misc_feature: MA Experiment 20001904 PARAMETER Experiment Name: At_Drought_Reproduction_P Parameter: Tissue Value: Rosettes
  misc_feature: MA Experiment 20001904 PARAMETER Experiment Name: At_Drought_Reproduction_P Parameter: Treatment Value: Drought vs. No Drought
gagctcttctctctgcaaagctttaccacacaatagtctccttctgtttctctttatatttgtctctataactctctttcgttaaagtttcataaaacctcaacgaactccttccatggcagcaggactatcaacaatcgccgtaacactcaaaccactcaaccgctcttctttctccgcaaaccaccctatatccaccgcagttttccctccatctctaagattcaacggcttccgacgtcgaaagattctcaccgtttgtttcgtcgtggaagaacggaaacaaagctctcccatggacgatgacaacaaaccagaaagcacgacaagctcttctgagatcttgatgacgtcgcggcttctcaagaaagcggagaagaagaaatcagagaggttcacttatttaatagcagctgtgatgtcgagctttggtatcacttctatggctataatggctgtttattaccgattttcttggcaaatgaagggaggtgaagtgtctgtgttagagatgtttggtacatttgctctttccgttggtgctgccgttgggatggagttttgggcaagatgggctcatagagctctttggcatgattctttatggaacatgcatgagtcacatcacaaaccaagagaaggagcgtttgagttaaacgatgtgtttgctataacaaacgcggttcctgcgattggtctactctattatggattcttgaataaaggacttgttcctggtctctgcttcggtgccggactgggaataacgatgtttggaatggcttacatgttcgttcacgatggacttgtgcacaagagattccctgtaggtcccattgccaacgttccttaccttcgaaaggtcgccgccgctcaccagctacaccacacagacaaattcaaaggtgtaccatatgggctgtttcttggaccaaaggaagtagaagaagtgggaggaaaagaagagttggagaaagagataagccggagaatcaaattatacaacaagggttcttctacctcttaattgctacaaacccaattttacttctttgatgtttttgtaatacattttgggactagtctttcttttagtatatataaaaaatgacgtagaagaaagagtcaggctaataaagatttagaaaaacat

SEQ ID NO: 48179 - protein, 303 aa, Arabidopsis thaliana
  peptide (1)..(303): Ceres Seq. ID no. 13648599
  misc_feature (134)..(293): Pfam Name: Carotene hydroxylase Pfam Description: Carotene hydroxylase
  misc_feature (1)..(299): Homolog of NCBI NO: 5870600 NR Description: beta-carotene hydroxylase [Lycopersicon
  misc_feature (1)..(294): Homolog of NCBI NO: 21734857 NR Description: beta-carotene hydroxylase [Vitis vinifera]
  misc_feature (24)..(300): Homolog of NCBI NO: 2956717 NR Description: beta-carotene hydroxylase 2 [Capsicum annuum]
  misc_feature (1)..(297): Homolog of NCBI NO: 9971820 NR Description: beta hydroxylase [Tagetes erecta]
  misc_feature (12)..(300): Homolog of NCBI NO: 5870598 NR Description: beta-carotene hydroxylase [Lycopersicon
  misc_feature (37)..(298): Homolog of NCBI NO: 11245486 NR Description: beta-carotene hydroxylase [Citrus unshiu]
  misc_feature (37)..(298): Homolog of NCBI NO: 9988836 NR Description: beta-carotene hydroxylase [Citrus unshiu]
  misc_feature (18)..(302): Homolog of NCBI NO: 1575296 NR Description: beta-carotene hydroxylase [Arabidopsis thaliana]
  misc_feature (1)..(302): Homolog of NCBI NO: 15235959 NR Description: beta-carotene hydroxylase [Arabidopsis thaliana]
  misc_feature (1)..(303): Homolog of NCBI NO: 15237204 NR Description: beta-carotene hydroxylase, putative [Arabidopsis
MAAGLSTIAVTLKPLNRSSFSANHPISTAVFPPSLRFNGFRRRKILTVCFVVEERKQSSPMDDDNKPESTTSSSEILMTSRLLKKAEKKKSERFTYLIAAVMSSFGITSMAIMAVYYRFSWQMKGGEVSVLEMFGTFALSVGAAVGMEFWARWAHRALWHDSLWNMHESHHKPREGAFELNDVFAITNAVPAIGLLYYGFLNKGLVPGLCFGAGLGITMFGMAYMFVHDGLVHKRFPVGPIANVPYLRKVAAAHQLHHTDKFKGVPYGLFLGPKEVEEVGGKEELEKEISRRIKLYNKGSSTS

SEQ ID NO: 48180 - protein, 243 aa, Arabidopsis thaliana
  peptide (1)..(243): Ceres Seq. ID no. 13648600
  misc_feature (74)..(233): Pfam Name: Carotene hydroxylase Pfam Description: Carotene hydroxylase
  misc_feature (1)..(239): Homolog of NCBI NO: 5870600 NR Description: beta-carotene hydroxylase [Lycopersicon
  misc_feature (1)..(234): Homolog of NCBI NO: 21734857 NR Description: beta-carotene hydroxylase [Vitis vinifera]
  misc_feature (1)..(240): Homolog of NCBI NO: 2956717 NR Description: beta-carotene hydroxylase 2 [Capsicum annuum]
  misc_feature (1)..(237): Homolog of NCBI NO: 9971820 NR Description: beta hydroxylase [Tagetes erecta]
  misc_feature (1)..(240): Homolog of NCBI NO: 5870598 NR Description: beta-carotene hydroxylase [Lycopersicon
  misc_feature (1)..(238): Homolog of NCBI NO: 11245486 NR Description: beta-carotene hydroxylase [Citrus unshiu]
  misc_feature (1)..(238): Homolog of NCBI NO: 9988836 NR Description: beta-carotene hydroxylase [Citrus unshiu]
  misc_feature (1)..(242): Homolog of NCBI NO: 1575296 NR Description: beta-carotene hydroxylase [Arabidopsis thaliana]
  misc_feature (1)..(242): Homolog of NCBI NO: 15235959 NR Description: beta-carotene hydroxylase [Arabidopsis thaliana]
  misc_feature (1)..(243): Homolog of NCBI NO: 15237204 NR Description: beta-carotene hydroxylase, putative [Arabidopsis
MDDDNKPESTTSSSEILMTSRLLKKAEKKKSERFTYLIAAVMSSFGITSMAIMAVYYRFSWQMKGGEVSVLEMFGTFALSVGAAVGMEFWARWAHRALWHDSLWNMHESHHKPREGAFELNDVFAITNAVPAIGLLYYGFLNKGLVPGLCFGAGLGITMFGMAYMFVHDGLVHKRFPVGPIANVPYLRKVAAAHQLHHTDKFKGVPYGLFLGPKEVEEVGGKEELEKEISRRIKLYNKGSSTS

SEQ ID NO: 48181 - protein, 226 aa, Arabidopsis thaliana
  peptide (1)..(226): Ceres Seq. ID no. 13648601
  misc_feature (57)..(216): Pfam Name: Carotene hydroxylase Pfam Description: Carotene hydroxylase
  misc_feature (1)..(222): Homolog of NCBI NO: 5870600 NR Description: beta-carotene hydroxylase [Lycopersicon
  misc_feature (1)..(217): Homolog of NCBI NO: 21734857 NR Description: beta-carotene hydroxylase [Vitis vinifera]
  misc_feature (1)..(223): Homolog of NCBI NO: 2956717 NR Description: beta-carotene hydroxylase 2 [Capsicum annuum]
  misc_feature (1)..(220): Homolog of NCBI NO: 9971820 NR Description: beta hydroxylase [Tagetes erecta]
  misc_feature (1)..(223): Homolog of NCBI NO: 5870598 NR Description: beta-carotene hydroxylase [Lycopersicon
  misc_feature (1)..(221): Homolog of NCBI NO: 11245486 NR Description: beta-carotene hydroxylase [Citrus unshiu]
  misc_feature (1)..(221): Homolog of NCBI NO: 9988836 NR Description: beta-carotene hydroxylase [Citrus unshiu]
  misc_feature (1)..(225): Homolog of NCBI NO: 1575296 NR Description: beta-carotene hydroxylase [Arabidopsis thaliana]
  misc_feature (1)..(225): Homolog of NCBI NO: 15235959 NR Description: beta-carotene hydroxylase [Arabidopsis thaliana]
  misc_feature (1)..(226): Homolog of NCBI NO: 15237204 NR Description: beta-carotene hydroxylase, putative [Arabidopsis
MTSRLLKKAEKKKSERFTYLIAAVMSSFGITSMAIMAVYYRFSWQMKGGEVSVLEMFGTFALSVGAAVGMEFWARWAHRALWHDSLWNMHESHHKPREGAFELNDVFAITNAVPAIGLLYYGFLNKGLVPGLCFGAGLGITMFGMAYMFVHDGLVHKRFPVGPIANVPYLRKVAAAHQLHHTDKFKGVPYGLFLGPKEVEEVGGKEELEKEISRRIKLYNKGSSTS

SEQ ID NO: 48182 - DNA, 2049 bp, Arabidopsis thaliana
  misc_feature (1)..(2049): Ceres Seq. ID no. 12575434
  misc_feature: MA Experiment ID: 20000180 Result: Up-regulated in Transcription
  misc_feature: MA Experiment 20000180 PARAMETER Experiment Name: At_Germinating_Seeds_P Parameter: Age (hr) Value: 24 vs. 0
  misc_feature: MA Experiment 20000180 PARAMETER Experiment Name: At_Germinating_Seeds_P Parameter: Tissue Value: Germinating Seeds
  misc_feature: MA Experiment ID: 20000184 Result: Down-regulated in Transcription
  misc_feature: MA Experiment 20000184 PARAMETER Experiment Name: At_Shoots__P Parameter: Age (day) Value: 7
  misc_feature: MA Experiment 20000184 PARAMETER Experiment Name: At_Shoots__P Parameter: Tissue Value: Shoots vs. Whole Plant
  misc_feature: MA Experiment ID: 20000185 Result: Down-regulated in Transcription
  misc_feature: MA Experiment 20000185 PARAMETER Experiment Name: At_Roots__P Parameter: Age (day) Value: 7 vs. 21
  misc_feature: MA Experiment 20000185 PARAMETER Experiment Name: At_Roots__P Parameter: Organism Value: A. thaliana
  misc_feature: MA Experiment 20000185 PARAMETER Experiment Name: At_Roots__P Parameter: Tissue Value: Roots vs. Whole Plant
  misc_feature: MA Experiment ID: 20000234 Result: Up-regulated in Transcription
  misc_feature: MA Experiment 20000234 PARAMETER Experiment Name: At_Siliques_P Parameter: Age (day) Value: 21
  misc_feature: MA Experiment 20000234 PARAMETER Experiment Name: At_Siliques_P Parameter: Organism Value: A. thaliana
  misc_feature: MA Experiment 20000234 PARAMETER Experiment Name: At_Siliques_P Parameter: Plant Line Value: WS
  misc_feature: MA Experiment 20000234 PARAMETER Experiment Name: At_Siliques_P Parameter: Tissue Value: Less Than 5mm Siliques vs. Whole Plant
  misc_feature: MA Experiment ID: 20000439 Result: Down-regulated in Transcription
  misc_feature: MA Experiment 20000439 PARAMETER Experiment Name: At_Roots__P Parameter: Age (day) Value: 14 vs. 21
  misc_feature: MA Experiment 20000439 PARAMETER Experiment Name: At_Roots__P Parameter: Organism Value: A. thaliana
  misc_feature: MA Experiment 20000439 PARAMETER Experiment Name: At_Roots__P Parameter: Tissue Value: Roots vs. Whole Plant
  misc_feature: MA Experiment ID: 20001248 Result: Down-regulated in Transcription
  misc_feature: MA Experiment 20001248 PARAMETER Experiment Name: At_Far-red-induction_P Parameter: Age (day) Value: 7
  misc_feature: MA Experiment 20001248 PARAMETER Experiment Name: At_Far-red-induction_P Parameter: Light Value: Far-red vs. White
  misc_feature: MA Experiment 20001248 PARAMETER Experiment Name: At_Far-red-induction_P Parameter: Organism Value: A. thaliana
  misc_feature: MA Experiment 20001248 PARAMETER Experiment Name: At_Far-red-induction_P Parameter: Plant Line Value: Columbia
  misc_feature: MA Experiment 20001248 PARAMETER Experiment Name: At_Far-red-induction_P Parameter: Timepoint (hr) Value: 4
  misc_feature: MA Experiment 20001248 PARAMETER Experiment Name: At_Far-red-induction_P Parameter: Tissue Value: Whole Plant
  misc_feature: MA Experiment ID: 20001450 Result: Down-regulated in Transcription
  misc_feature: MA Experiment 20001450 PARAMETER Experiment Name: At_Far-red-induction_P Parameter: Age (day) Value: 7
  misc_feature: MA Experiment 20001450 PARAMETER Experiment Name: At_Far-red-induction_P Parameter: Light Value: Far-red vs. White
  misc_feature: MA Experiment 20001450 PARAMETER Experiment Name: At_Far-red-induction_P Parameter: Organism Value: A. thaliana
  misc_feature: MA Experiment 20001450 PARAMETER Experiment Name: At_Far-red-induction_P Parameter: Plant Line Value: Columbia
  misc_feature: MA Experiment 20001450 PARAMETER Experiment Name: At_Far-red-induction_P Parameter: Timepoint (hr) Value: 8
  misc_feature: MA Experiment 20001450 PARAMETER Experiment Name: At_Far-red-induction_P Parameter: Tissue Value: Whole Plant
  misc_feature: MA Experiment ID: 20001557 Result: Down-regulated in Transcription
  misc_feature: MA Experiment 20001557 PARAMETER Experiment Name: At_Drought_Soil_Dry_P Parameter: Age (day) Value: 27
  misc_feature: MA Experiment 20001557 PARAMETER Experiment Name: At_Drought_Soil_Dry_P Parameter: Organism Value: A. thaliana
  misc_feature: MA Experiment 20001557 PARAMETER Experiment Name: At_Drought_Soil_Dry_P Parameter: Plant Line Value: WS
  misc_feature: MA Experiment 20001557 PARAMETER Experiment Name: At_Drought_Soil_Dry_P Parameter: Post Timepoint (hr) Value: 3
  misc_feature: MA Experiment 20001557 PARAMETER Experiment Name: At_Drought_Soil_Dry_P Parameter: Post-Treatment Value: Re-Water vs. No Drought
  misc_feature: MA Experiment 20001557 PARAMETER Experiment Name: At_Drought_Soil_Dry_P Parameter: Timepoint (day) Value: 13
  misc_feature: MA Experiment 20001557 PARAMETER Experiment Name: At_Drought_Soil_Dry_P Parameter: Treatment Value: Drought vs. No Drought
  misc_feature: MA Experiment ID: 20001905 Result: Down-regulated in Transcription
  misc_feature: MA Experiment 20001905 PARAMETER Experiment Name: At_Drought_Reproduction_P Parameter: Age (day) Value: 40
  misc_feature: MA Experiment 20001905 PARAMETER Experiment Name: At_Drought_Reproduction_P Parameter: Organism Value: A. thaliana
  misc_feature: MA Experiment 20001905 PARAMETER Experiment Name: At_Drought_Reproduction_P Parameter: Plant Line Value: WS
  misc_feature: MA Experiment 20001905 PARAMETER Experiment Name: At_Drought_Reproduction_P Parameter: Timepoint (day) Value: 10
  misc_feature: MA Experiment 20001905 PARAMETER Experiment Name: At_Drought_Reproduction_P Parameter: Tissue Value: Rosettes
  misc_feature: MA Experiment 20001905 PARAMETER Experiment Name: At_Drought_Reproduction_P Parameter: Treatment Value: Drought vs. No Drought
  misc_feature: MA Experiment ID: 20001906 Result: Down-regulated in Transcription
  misc_feature: MA Experiment 20001906 PARAMETER Experiment Name: At_Drought_Reproduction_P Parameter: Age (day) Value: 35
  misc_feature: MA Experiment 20001906 PARAMETER Experiment Name: At_Drought_Reproduction_P Parameter: Organism Value: A. thaliana
  misc_feature: MA Experiment 20001906 PARAMETER Experiment Name: At_Drought_Reproduction_P Parameter: Plant Line Value: WS
  misc_feature: MA Experiment 20001906 PARAMETER Experiment Name: At_Drought_Reproduction_P Parameter: Timepoint (day) Value: 5
  misc_feature: MA Experiment 20001906 PARAMETER Experiment Name: At_Drought_Reproduction_P Parameter: Tissue Value: Siliques
  misc_feature: MA Experiment 20001906 PARAMETER Experiment Name: At_Drought_Reproduction_P Parameter: Treatment Value: Drought vs. No Drought
  misc_feature: MA Experiment ID: 20001908 Result: Down-regulated in Transcription
  misc_feature: MA Experiment 20001908 PARAMETER Experiment Name: At_Drought_Reproduction_P Parameter: Age (day) Value: 40
  misc_feature: MA Experiment 20001908 PARAMETER Experiment Name: At_Drought_Reproduction_P Parameter: Organism Value: A. thaliana
  misc_feature: MA Experiment 20001908 PARAMETER Experiment Name: At_Drought_Reproduction_P Parameter: Plant Line Value: WS
  misc_feature: MA Experiment 20001908 PARAMETER Experiment Name: At_Drought_Reproduction_P Parameter: Timepoint (day) Value: 10
  misc_feature: MA Experiment 20001908 PARAMETER Experiment Name: At_Drought_Reproduction_P Parameter: Tissue Value: Siliques
  misc_feature: MA Experiment 20001908 PARAMETER Experiment Name: At_Drought_Reproduction_P Parameter: Treatment Value: Drought vs. No Drought
gctctgtgatttgagtttttattttgcggtggcgttgtatggctatggcctttcctctttcttatactccgacgattactgttaaaccagtaacgtactctcggagatcgaactttgtagttttctcgtcgagttctaatggacgagatcctttagaggagaattcagtacctaatggtgtgaaaagcttggagaagcttcaagaagagaagcgtcgtgctgagttatctgctaggattgcttctggagctttcactgtacggaaatctagttttccatctacagtgaagaatggtttatctaagattggaataccaagcaatgttcttgatttcatgtttgattggactggttctgaccaagactaccccaaggttcctgaggctaaaggctcgattcaggcggtccggaacgaagctttcttcatccctttgtatgagcttttccttacttatggtggaattttcaggttgacctttgggcctaagtcattcttgatcgtgtcggatccttctattgctaaacatatattgaaggacaatgcaaaagcttactccaaggggattttagctgaaattctagattttgtgatgggaaaaggactcattcctgctgatggggagatatggcgtagacgaaggcgtgccattgttcctgcattgcatcaaaagtatgtagcagctatgattagtttattcggagaagcttcagataggctttgtcagaagcttgatgctgctgcattgaaaggggaagaagtagagatggaatcactcttctctcgtttgacacttgatattattggcaaggcggttttcaattacgactttgactcccttactaatgataccggtgtgatcgaggcagtgtacactgttctaagagaagctgaagacagaagtgtttcacctattcctgtttgggacatacccatttggaaagatatttccccacgtcagaggaaagttgctacttccttgaaattaatcaatgacacacttgatgatttgattgcaacatgcaagagaatggtagaagaagaggagttgcagtttcacgaggagtatatgaacgaaagagatcctagcatccttcactttcttttagcttcaggagatgatgtctctagtaagcagcttcgtgatgacttgatgacaatgcttatagccggacatgaaacatcggcggcagtattaacatggaccttttaccttttaacaacggaaccaagtgtagttgccaaacttcaagaagaggttgattctgtaattggagatagattcccaaccatacaagatatgaaaaagctgaaatacactactcgagtcatgaatgagtcattgagattatatccacaaccaccagtactgatccgtcgttctatagataatgatatacttggagagtatccgataaaaaggggagaggatatcttcatctcggtttggaatctacatcgaagtcctctgcattgggatgatgcagagaagttcaatcccgagagatggcctttggatggaccaaacccaaatgagacaaaccaaaacttcagttacttacctttcggtggaggaccgcggaaatgtataggcgacatgtttgcttcctttgagaatgtggtagcaatcgcaatgcttattcgaagatttaactttcagattgcaccaggagctcctccggtgaaaatgactacaggagctacaatacacaccacagaaggattgaaattgacagtaacaaagaggacaaaacctctggacataccatccgtaccgatacttccaatggatacttcacgggatgaagtttcatctgctctttcttaagtcttcatctttacaaaactgaaaacaaacaagctcagatgaagaagcaaaaatcttgtgttagaacagcaaatgttgaattgttggaacatgaccaatgctttctgattatttatctgcactgtaaaatgcagacaagtaaaatgagaagatttattattctttggaaaaaaaaatgtttttgtctgcacagtgaagataatataacttctgggttctatgt

SEQ ID NO: 48183 - protein, 595 aa, Arabidopsis thaliana
  peptide (1)..(595): Ceres Seq. ID no. 12575435
  misc_feature (485)..(576): Homolog of NCBI NO: 18479135 NR Description: cytochrome P450 [Skeletonema costatum]
  misc_feature (118)..(508): Homolog of NCBI NO: 18479135 NR Description: cytochrome P450 [Skeletonema costatum]
  misc_feature (109)..(569): Homolog of NCBI NO: 40218379 NR Description: chloroplast carotenoid epsilon-ring hydroxylase
  misc_feature (109)..(569): Homolog of NCBI NO: 20258842 NR Description: putative cytochrome P450 [Arabidopsis thaliana]
  misc_feature (105)..(566): Homolog of NCBI NO: 37536604 NR Description: putative cytochrome P450 monooxygenase
  misc_feature (485)..(576): Homolog of NCBI NO: 18479135 NR Description: cytochrome P450 [Skeletonema costatum]
  misc_feature (118)..(508): Homolog of NCBI NO: 18479135 NR Description: cytochrome P450 [Skeletonema costatum]
  misc_feature (109)..(569): Homolog of NCBI NO: 40218379 NR Description: chloroplast carotenoid epsilon-ring hydroxylase
  misc_feature (109)..(569): Homolog of NCBI NO: 20258842 NR Description: putative cytochrome P450 [Arabidopsis thaliana]
  misc_feature (105)..(566): Homolog of NCBI NO: 37536604 NR Description: putative cytochrome P450 monooxygenase
MAMAFPLSYTPTITVKPVTYSRRSNFVVFSSSSNGRDPLEENSVPNGVKSLEKLQEEKRRAELSARIASGAFTVRKSSFPSTVKNGLSKIGIPSNVLDFMFDWTGSDQDYPKVPEAKGSIQAVRNEAFFIPLYELFLTYGGIFRLTFGPKSFLIVSDPSIAKHILKDNAKAYSKGILAEILDFVMGKGLIPADGEIWRRRRRAIVPALHQKYVAAMISLFGEASDRLCQKLDAAALKGEEVEMESLFSRLTLDIIGKAVFNYDFDSLTNDTGVIEAVYTVLREAEDRSVSPIPVWDIPIWKDISPRQRKVATSLKLINDTLDDLIATCKRMVEEEELQFHEEYMNERDPSILHFLLASGDDVSSKQLRDDLMTMLIAGHETSAAVLTWTFYLLTTEPSVVAKLQEEVDSVIGDRFPTIQDMKKLKYTTRVMNESLRLYPQPPVLIRRSIDNDILGEYPIKRGEDIFISVWNLHRSPLHWDDAEKFNPERWPLDGPNPNETNQNFSYLPFGGGPRKCIGDMFASFENVVAIAMLIRRFNFQIAPGAPPVKMTTGATIHTTEGLKLTVTKRTKPLDIPSVPILPMDTSRDEVSSALS

SEQ ID NO: 48184 - protein, 593 aa, Arabidopsis thaliana
  peptide (1)..(593): Ceres Seq. ID no. 12575436
  misc_feature (483)..(574): Homolog of NCBI NO: 18479135 NR Description: cytochrome P450 [Skeletonema costatum]
  misc_feature (116)..(506): Homolog of NCBI NO: 18479135 NR Description: cytochrome P450 [Skeletonema costatum]
  misc_feature (107)..(567): Homolog of NCBI NO: 40218379 NR Description: chloroplast carotenoid epsilon-ring hydroxylase
  misc_feature (107)..(567): Homolog of NCBI NO: 20258842 NR Description: putative cytochrome P450 [Arabidopsis thaliana]
  misc_feature (103)..(564): Homolog of NCBI NO: 37536604 NR Description: putative cytochrome P450 monooxygenase
  misc_feature (483)..(574): Homolog of NCBI NO: 18479135 NR Description: cytochrome P450 [Skeletonema costatum]
  misc_feature (116)..(506): Homolog of NCBI NO: 18479135 NR Description: cytochrome P450 [Skeletonema costatum]
  misc_feature (107)..(567): Homolog of NCBI NO: 40218379 NR Description: chloroplast carotenoid epsilon-ring hydroxylase
  misc_feature (107)..(567): Homolog of NCBI NO: 20258842 NR Description: putative cytochrome P450 [Arabidopsis thaliana]
  misc_feature (103)..(564): Homolog of NCBI NO: 37536604 NR Description: putative cytochrome P450 monooxygenase
MAFPLSYTPTITVKPVTYSRRSNFVVFSSSSNGRDPLEENSVPNGVKSLEKLQEEKRRAELSARIASGAFTVRKSSFPSTVKNGLSKIGIPSNVLDFMFDWTGSDQDYPKVPEAKGSIQAVRNEAFFIPLYELFLTYGGIFRLTFGPKSFLIVSDPSIAKHILKDNAKAYSKGILAEILDFVMGKGLIPADGEIWRRRRRAIVPALHQKYVAAMISLFGEASDRLCQKLDAAALKGEEVEMESLFSRLTLDIIGKAVFNYDFDSLTNDTGVIEAVYTVLREAEDRSVSPIPVWDIPIWKDISPRQRKVATSLKLINDTLDDLIATCKRMVEEEELQFHEEYMNERDPSILHFLLASGDDVSSKQLRDDLMTMLIAGHETSAAVLTWTFYLLTTEPSVVAKLQEEVDSVIGDRFPTIQDMKKLKYTTRVMNESLRLYPQPPVLIRRSIDNDILGEYPIKRGEDIFISVWNLHRSPLHWDDAEKFNPERWPLDGPNPNETNQNFSYLPFGGGPRKCIGDMFASFENVVAIAMLIRRFNFQIAPGAPPVKMTTGATIHTTEGLKLTVTKRTKPLDIPSVPILPMDTSRDEVSSALS

SEQ ID NO: 48185 - protein, 496 aa, Arabidopsis thaliana
  peptide (1)..(496): Ceres Seq. ID no. 12575437
  misc_feature (386)..(477): Homolog of NCBI NO: 18479135 NR Description: cytochrome P450 [Skeletonema costatum]
  misc_feature (19)..(409): Homolog of NCBI NO: 18479135 NR Description: cytochrome P450 [Skeletonema costatum]
  misc_feature (10)..(470): Homolog of NCBI NO: 40218379 NR Description: chloroplast carotenoid epsilon-ring hydroxylase
  misc_feature (10)..(470): Homolog of NCBI NO: 20258842 NR Description: putative cytochrome P450 [Arabidopsis thaliana]
  misc_feature (6)..(467): Homolog of NCBI NO: 37536604 NR Description: putative cytochrome P450 monooxygenase
  misc_feature (386)..(477): Homolog of NCBI NO: 18479135 NR Description: cytochrome P450 [Skeletonema costatum]
  misc_feature (19)..(409): Homolog of NCBI NO: 18479135 NR Description: cytochrome P450 [Skeletonema costatum]
  misc_feature (10)..(470): Homolog of NCBI NO: 40218379 NR Description: chloroplast carotenoid epsilon-ring hydroxylase
  misc_feature (10)..(470): Homolog of NCBI NO: 20258842 NR Description: putative cytochrome P450 [Arabidopsis thaliana]
  misc_feature (6)..(467): Homolog of NCBI NO: 37536604 NR Description: putative cytochrome P450 monooxygenase
MFDWTGSDQDYPKVPEAKGSIQAVRNEAFFIPLYELFLTYGGIFRLTFGPKSFLIVSDPSIAKHILKDNAKAYSKGILAEILDFVMGKGLIPADGEIWRRRRRAIVPALHQKYVAAMISLFGEASDRLCQKLDAAALKGEEVEMESLFSRLTLDIIGKAVFNYDFDSLTNDTGVIEAVYTVLREAEDRSVSPIPVWDIPIWKDISPRQRKVATSLKLINDTLDDLIATCKRMVEEEELQFHEEYMNERDPSILHFLLASGDDVSSKQLRDDLMTMLIAGHETSAAVLTWTFYLLTTEPSVVAKLQEEVDSVIGDRFPTIQDMKKLKYTTRVMNESLRLYPQPPVLIRRSIDNDILGEYPIKRGEDIFISVWNLHRSPLHWDDAEKFNPERWPLDGPNPNETNQNFSYLPFGGGPRKCIGDMFASFENVVAIAMLIRRFNFQIAPGAPPVKMTTGATIHTTEGLKLTVTKRTKPLDIPSVPILPMDTSRDEVSSALS

SEQ ID NO: 48186 - DNA, 2007 bp, Arabidopsis thaliana
  misc_feature (1)..(2007): Ceres Seq. ID no. 12718518
  misc_feature: MA Experiment ID: 20000173 Result: Down-regulated in Transcription
  misc_feature: MA Experiment 20000173 PARAMETER Experiment Name: At_42deg_Heat_P Parameter: Age (day) Value: 14
  misc_feature: MA Experiment 20000173 PARAMETER Experiment Name: At_42deg_Heat_P Parameter: Organism Value: A. thaliana
  misc_feature: MA Experiment 20000173 PARAMETER Experiment Name: At_42deg_Heat_P Parameter: Plant Line Value: WS
  misc_feature: MA Experiment 20000173 PARAMETER Experiment Name: At_42deg_Heat_P Parameter: Temperature (deg C) Value: 42 vs. 22
  misc_feature: MA Experiment 20000173 PARAMETER Experiment Name: At_42deg_Heat_P Parameter: Timepoint (hr) Value: 6
  misc_feature: MA Experiment 20000173 PARAMETER Experiment Name: At_42deg_Heat_P Parameter: Tissue Value: Aerial
  misc_feature: MA Experiment ID: 20000179 Result: Up-regulated in Transcription
  misc_feature: MA Experiment 20000179 PARAMETER Experiment Name: At_Germinating_Seeds_P Parameter: Age (hr) Value: 6 vs. 0
  misc_feature: MA Experiment 20000179 PARAMETER Experiment Name: At_Germinating_Seeds_P Parameter: Tissue Value: Germinating Seeds
  misc_feature: MA Experiment ID: 20000180 Result: Up-regulated in Transcription
  misc_feature: MA Experiment 20000180 PARAMETER Experiment Name: At_Germinating_Seeds_P Parameter: Age (hr) Value: 24 vs. 0
  misc_feature: MA Experiment 20000180 PARAMETER Experiment Name: At_Germinating_Seeds_P Parameter: Tissue Value: Germinating Seeds
  misc_feature: MA Experiment ID: 20000185 Result: Down-regulated in Transcription
  misc_feature: MA Experiment 20000185 PARAMETER Experiment Name: At_Roots__P Parameter: Age (day) Value: 7 vs. 21
  misc_feature: MA Experiment 20000185 PARAMETER Experiment Name: At_Roots__P Parameter: Organism Value: A. thaliana
  misc_feature: MA Experiment 20000185 PARAMETER Experiment Name: At_Roots__P Parameter: Tissue Value: Roots vs. Whole Plant
  misc_feature: MA Experiment ID: 20000234 Result: Down-regulated in Transcription
  misc_feature: MA Experiment 20000234 PARAMETER Experiment Name: At_Siliques_P Parameter: Age (day) Value: 21
  misc_feature: MA Experiment 20000234 PARAMETER Experiment Name: At_Siliques_P Parameter: Organism Value: A. thaliana
  misc_feature: MA Experiment 20000234 PARAMETER Experiment Name: At_Siliques_P Parameter: Plant Line Value: WS
  misc_feature: MA Experiment 20000234 PARAMETER Experiment Name: At_Siliques_P Parameter: Tissue Value: Less Than 5mm Siliques vs. Whole Plant
  misc_feature: MA Experiment ID: 20000264 Result: Down-regulated in Transcription
  misc_feature: MA Experiment 20000264 PARAMETER Experiment Name: At_Open_Flower_P Parameter: Age (day) Value: 21
  misc_feature: MA Experiment 20000264 PARAMETER Experiment Name: At_Open_Flower_P Parameter: Plant Line Value: WS
  misc_feature: MA Experiment 20000264 PARAMETER Experiment Name: At_Open_Flower_P Parameter: Tissue Value: Open Flower vs. Whole Plant
  misc_feature: MA Experiment ID: 20000265 Result: Down-regulated in Transcription
  misc_feature: MA Experiment 20000265 PARAMETER Experiment Name: At_Open_Flower_P Parameter: Age (day) Value: 21
  misc_feature: MA Experiment 20000265 PARAMETER Experiment Name: At_Open_Flower_P Parameter: Plant Line Value: WS
  misc_feature: MA Experiment 20000265 PARAMETER Experiment Name: At_Open_Flower_P Parameter: Tissue Value: Closed Flower vs. Whole Plant
  misc_feature: MA Experiment ID: 20000286 Result: Down-regulated in Transcription
  misc_feature: MA Experiment 20000286 PARAMETER Experiment Name: At_Open_Flower_P Parameter: Age (day) Value: 21
  misc_feature: MA Experiment 20000286 PARAMETER Experiment Name: At_Open_Flower_P Parameter: Plant Line Value: WS
  misc_feature: MA Experiment 20000286 PARAMETER Experiment Name: At_Open_Flower_P Parameter: Tissue Value: Half Open vs. Whole Plant
  misc_feature: MA Experiment ID: 20000439 Result: Down-regulated in Transcription
  misc_feature: MA Experiment 20000439 PARAMETER Experiment Name: At_Roots__P Parameter: Age (day) Value: 14 vs. 21
  misc_feature: MA Experiment 20000439 PARAMETER Experiment Name: At_Roots__P Parameter: Organism Value: A. thaliana
  misc_feature: MA Experiment 20000439 PARAMETER Experiment Name: At_Roots__P Parameter: Tissue Value: Roots vs. Whole Plant
  misc_feature: MA Experiment ID: 20000573 Result: Down-regulated in Transcription
  misc_feature: MA Experiment 20000573 PARAMETER Experiment Name: At_100uM_ABA_Mutants__P Parameter: Organism Value: A. thaliana
  misc_feature: MA Experiment 20000573 PARAMETER Experiment Name: At_100uM_ABA_Mutants__P Parameter: Plant Line Value: CS22 vs. Ler wt
  misc_feature: MA Experiment 20000573 PARAMETER Experiment Name: At_100uM_ABA_Mutants__P Parameter: Timepoint (hr) Value: N/A
  misc_feature: MA Experiment 20000573 PARAMETER Experiment Name: At_100uM_ABA_Mutants__P Parameter: Tissue Value: Whole Plant
  misc_feature: MA Experiment 20000573 PARAMETER Experiment Name: At_100uM_ABA_Mutants__P Parameter: Treatment Value: None
  misc_feature: MA Experiment ID: 20000574 Result: Down-regulated in Transcription
  misc_feature: MA Experiment 20000574 PARAMETER Experiment Name: At_100uM_ABA_Mutants__P Parameter: Organism Value: A. thaliana
  misc_feature: MA Experiment 20000574 PARAMETER Experiment Name: At_100uM_ABA_Mutants__P Parameter: Plant Line Value: CS23 vs. Ler wt
  misc_feature: MA Experiment 20000574 PARAMETER Experiment Name: At_100uM_ABA_Mutants__P Parameter: Timepoint (hr) Value: N/A
  misc_feature: MA Experiment 20000574 PARAMETER Experiment Name: At_100uM_ABA_Mutants__P Parameter: Tissue Value: Whole Plant
  misc_feature: MA Experiment 20000574 PARAMETER Experiment Name: At_100uM_ABA_Mutants__P Parameter: Treatment Value: None
  misc_feature: MA Experiment ID: 20000578 Result: Down-regulated in Transcription
  misc_feature: MA Experiment 20000578 PARAMETER Experiment Name: At_CS3726__P Parameter: Organism Value: A. thaliana
  misc_feature: MA Experiment 20000578 PARAMETER Experiment Name: At_CS3726__P Parameter: Plant Line Value: CS3726
  misc_feature: MA Experiment 20000578 PARAMETER Experiment Name: At_CS3726__P Parameter: Tissue Value: Whole Plant
  misc_feature: MA Experiment ID: 20000606 Result: Down-regulated in Transcription
  misc_feature: MA Experiment 20000606 PARAMETER Experiment Name: At_CS8548_Mutant_P Parameter: Age (day) Value: 14
  misc_feature: MA Experiment 20000606 PARAMETER Experiment Name: At_CS8548_Mutant_P Parameter: Plant Line Value: CS8548 vs. wt
  misc_feature: MA Experiment 20000606 PARAMETER Experiment Name: At_CS8548_Mutant_P Parameter: Tissue Value: Whole Plant
  misc_feature: MA Experiment ID: 20000794 Result: Down-regulated in Transcription
  misc_feature: MA Experiment 20000794 PARAMETER Experiment Name: At_Petals_P Parameter: Age (day) Value: 23-25 days
  misc_feature: MA Experiment 20000794 PARAMETER Experiment Name: At_Petals_P Parameter: Plant Line Value: WS
  misc_feature: MA Experiment 20000794 PARAMETER Experiment Name: At_Petals_P Parameter: Tissue Value: Petals vs. Whole plant
  misc_feature: MA Experiment ID: 20001450 Result: Up-regulated in Transcription
  misc_feature: MA Experiment 20001450 PARAMETER Experiment Name: At_Far-red-induction_P Parameter: Age (day) Value: 7
  misc_feature: MA Experiment 20001450 PARAMETER Experiment Name: At_Far-red-induction_P Parameter: Light Value: Far-red vs. White
  misc_feature: MA Experiment 20001450 PARAMETER Experiment Name: At_Far-red-induction_P Parameter: Organism Value: A. thaliana
  misc_feature: MA Experiment 20001450 PARAMETER Experiment Name: At_Far-red-induction_P Parameter: Plant Line Value: Columbia
  misc_feature: MA Experiment 20001450 PARAMETER Experiment Name: At_Far-red-induction_P Parameter: Timepoint (hr) Value: 8
  misc_feature: MA Experiment 20001450 PARAMETER Experiment Name: At_Far-red-induction_P Parameter: Tissue Value: Whole Plant
  misc_feature: MA Experiment ID: 20001451 Result: Up-regulated in Transcription
  misc_feature: MA Experiment 20001451 PARAMETER Experiment Name: At_Far-red-induction_P Parameter: Age (day) Value: 7
  misc_feature: MA Experiment 20001451 PARAMETER Experiment Name: At_Far-red-induction_P Parameter: Light Value: Far-red vs. White
  misc_feature: MA Experiment 20001451 PARAMETER Experiment Name: At_Far-red-induction_P Parameter: Organism Value: A. thaliana
  misc_feature: MA Experiment 20001451 PARAMETER Experiment Name: At_Far-red-induction_P Parameter: Plant Line Value: Columbia
  misc_feature: MA Experiment 20001451 PARAMETER Experiment Name: At_Far-red-induction_P Parameter: Timepoint (hr) Value: 24
  misc_feature: MA Experiment 20001451 PARAMETER Experiment Name: At_Far-red-induction_P Parameter: Tissue Value: Whole Plant
  misc_feature: MA Experiment ID: 20001557 Result: Down-regulated in Transcription
  misc_feature: MA Experiment 20001557 PARAMETER Experiment Name: At_Drought_Soil_Dry_P Parameter: Age (day) Value: 27
  misc_feature: MA Experiment 20001557 PARAMETER Experiment Name: At_Drought_Soil_Dry_P Parameter: Organism Value: A. thaliana
  misc_feature: MA Experiment 20001557 PARAMETER Experiment Name: At_Drought_Soil_Dry_P Parameter: Plant Line Value: WS
  misc_feature: MA Experiment 20001557 PARAMETER Experiment Name: At_Drought_Soil_Dry_P Parameter: Post Timepoint (hr) Value: 3
  misc_feature: MA Experiment 20001557 PARAMETER Experiment Name: At_Drought_Soil_Dry_P Parameter: Post-Treatment Value: Re-Water vs. No Drought
  misc_feature: MA Experiment 20001557 PARAMETER Experiment Name: At_Drought_Soil_Dry_P Parameter: Timepoint (day) Value: 13
  misc_feature: MA Experiment 20001557 PARAMETER Experiment Name: At_Drought_Soil_Dry_P Parameter: Treatment Value: Drought vs. No Drought
  misc_feature: MA Experiment ID: 20001558 Result: Down-regulated in Transcription
  misc_feature: MA Experiment 20001558 PARAMETER Experiment Name: At_Drought_Soil_Dry_P Parameter: Age (day) Value: 27
  misc_feature: MA Experiment 20001558 PARAMETER Experiment Name: At_Drought_Soil_Dry_P Parameter: Organism Value: A. thaliana
  misc_feature: MA Experiment 20001558 PARAMETER Experiment Name: At_Drought_Soil_Dry_P Parameter: Plant Line Value: WS
  misc_feature: MA Experiment 20001558 PARAMETER Experiment Name: At_Drought_Soil_Dry_P Parameter: Post Timepoint (hr) Value: 6
  misc_feature: MA Experiment 20001558 PARAMETER Experiment Name: At_Drought_Soil_Dry_P Parameter: Post-Treatment Value: Re-Water vs. No Drought
  misc_feature: MA Experiment 20001558 PARAMETER Experiment Name: At_Drought_Soil_Dry_P Parameter: Timepoint (day) Value: 13
  misc_feature: MA Experiment 20001558 PARAMETER Experiment Name: At_Drought_Soil_Dry_P Parameter: Treatment Value: Drought vs. No Drought
  misc_feature: MA Experiment ID: 20001771 Result: Up-regulated in Transcription
  misc_feature: MA Experiment 20001771 PARAMETER Experiment Name: At_Far-red-enriched-adult_P Parameter: Age (day) Value: 28
  misc_feature: MA Experiment 20001771 PARAMETER Experiment Name: At_Far-red-enriched-adult_P Parameter: Light Value: Far-red enriched vs. White
  misc_feature: MA Experiment 20001771 PARAMETER Experiment Name: At_Far-red-enriched-adult_P Parameter: Organism Value: A. thaliana
  misc_feature: MA Experiment 20001771 PARAMETER Experiment Name: At_Far-red-enriched-adult_P Parameter: Plant Line Value: Columbia
  misc_feature: MA Experiment 20001771 PARAMETER Experiment Name: At_Far-red-enriched-adult_P Parameter: Timepoint (hr) Value: 16
  misc_feature: MA Experiment 20001771 PARAMETER Experiment Name: At_Far-red-enriched-adult_P Parameter: Tissue Value: Aerial
  misc_feature: MA Experiment ID: 20001905 Result: Down-regulated in Transcription
  misc_feature: MA Experiment 20001905 PARAMETER Experiment Name: At_Drought_Reproduction_P Parameter: Age (day) Value: 40
  misc_feature: MA Experiment 20001905 PARAMETER Experiment Name: At_Drought_Reproduction_P Parameter: Organism Value: A. thaliana
  misc_feature: MA Experiment 20001905 PARAMETER Experiment Name: At_Drought_Reproduction_P Parameter: Plant Line Value: WS
  misc_feature: MA Experiment 20001905 PARAMETER Experiment Name: At_Drought_Reproduction_P Parameter: Timepoint (day) Value: 10
  misc_feature: MA Experiment 20001905 PARAMETER Experiment Name: At_Drought_Reproduction_P Parameter: Tissue Value: Rosettes
  misc_feature: MA Experiment 20001905 PARAMETER Experiment Name: At_Drought_Reproduction_P Parameter: Treatment Value: Drought vs. No Drought
actttctgtctgtacccaaaagaagtaatgaacctctctcatcttcttcttctctgtttctttcatgttttgtgagttgtttctcaacaattttctggtctcttagagtgagaggagagagatagagagttgtgttgggcgtggaacttggactagttccacatatcaggttatatagatcttctctttcaacttctgattcgtccagaagctttcctaatctgagatctgacatggaacaccaaggttggagttttgaggagaattatagtttgtccactaatagaagatctatcaggccacaagatgaactagtggagttattatggcgagatggacaagtggttctgcagagccaaactcatagagaacaaacccaaacccagaaacaagatcatcatgaagaagccctaagatccagcacctttcttgaagatcaagaaactgtctcttggatccaataccctccagatgaagacccattcgaacccgacgacttctcctcccacttcttctcaaccatggatcccctccagagaccaacctcagagacggttaagcctaagtccagtcctgaacctcctcaagtcatggttaagcctaaggcctgtcctgaccctcctcctcaagtcatgcctcctccaaaatttaggttaacaaattcatcatcggggattagggaaacagaaatggaacagtactcggtaacgaccgttggacctagccattgcggaagcaacccatcacagaacgatctcgatgtctcaatgagtcatgatcgaagcaaaaacatagaagaaaagcttaatccgaacgcaagttcctcatcaggtggctcctctggttgcagctttggcaaagatatcaaagaaatggctagtggaagatgcatcacaaccgaccgtaagagaaaacgtataaatcacactgacgaatctgtatctctatcagatgcaatcggtaacaagtcgaaccaacgatcaggatcaaaccgaaggagtcgagcagctgaagttcataatctctccgaaagggtacttcatcggttcgtctatataatatataatatatagtttaatgttagagaatcgtataacatttatacaaagaaaacagatacaaaactctgttttttattttcttcttttcataacttaaatagaggaggagagataggatcaatgagagaatgaaggctttgcaagaactaatacctcactgcagtaaaactgataaagcttcgattttagacgaagccatagattatttgaaatcacttcagttacagcttcaagtgatgtggatggggagtggaatggcggcggcggcggcttcggctccgatgatgttccccggagttcaacctcagcagttcatacgtcagatacagagcccggtacagttacctcgatttccggttatggatcagtctgcaattcagaacaatcccggtttagtttgccaaaacccggtacaaaaccagatcatctccgaccggtttgctagatacatcggtgggttcccacacatgcaggccgcgactcaggtaaggccaatacgaagccgtgtttattaaacgacgattttggtaaaatgttttttgggtttactacattaatacgagataagaaaaaatgttaaaccgacgtagttttagttgacacgttgtgtggttttttattagatgcagccgatggagatgttgagatttagttcaccggcgggacagcaaagtcaacaaccgtcgtctgtgccgacgaagaccaccgacggttctcgtttggaccactaggttggtgagccacttttttacttccttatttttggtatgtttcttttttatatctatctttctgaacatacttaaaacgttcaaggatgtattattatagagtaaacgtgcaacttcattacgttattttctgtatatgtgagtttatgtatgtcaaaatgacatgatgagattttttgtaaacaacatcttaaaaacaggacatgtgatttttg

SEQ ID NO: 48187 - protein, 279 aa, Arabidopsis thaliana
  peptide (1)..(279): Ceres Seq. ID no. 12718519
  misc_feature (17)..(59): Homolog of NCBI NO: 4093153 NR Description: phytochrome-associated protein 3 [Arabidopsis
  misc_feature (6)..(267): Homolog of NCBI NO: 19698849 NR Description: putative protein [Arabidopsis thaliana]
  misc_feature (6)..(267): Homolog of NCBI NO: 20127070 NR Description: putative bHLH transcription factor [Arabidopsis
  misc_feature (6)..(267): Homolog of NCBI NO: 30694919 NR Description: bHLH protein family [Arabidopsis thaliana]
  misc_feature (6)..(267): Homolog of NCBI NO: 30694924 NR Description: bHLH protein family [Arabidopsis thaliana]
  misc_feature (1)..(279): Homolog of NCBI NO: 13430618 NR Description: unknown protein [Arabidopsis thaliana]
  misc_feature (1)..(279): Homolog of NCBI NO: 20197630 NR Description: expressed protein [Arabidopsis thaliana]
  misc_feature (1)..(267): Homolog of NCBI NO: 25408828 NR Description: hypothetical protein At2g43010 [imported] -
  misc_feature (1)..(267): Homolog of NCBI NO: 30689224 NR Description: transcription factor (BHLH9) -related
  misc_feature (1)..(267): Homolog of NCBI NO: 30689218 NR Description: transcription factor (BHLH9) -related
MEHQGWSFEENYSLSTNRRSIRPQDELVELLWRDGQVVLQSQTHREQTQTQKQDHHEEALRSSTFLEDQETVSWIQYPPDEDPFEPDDFSSHFFSTMDPLQRPTSETVKPKSSPEPPQVMVKPKACPDPPPQVMPPPKFRLTNSSSGIRETEMEQYSVTTVGPSHCGSNPSQNDLDVSMSHDRSKNIEEKLNPNASSSSGGSSGCSFGKDIKEMASGRCITTDRKRKRINHTDESVSLSDAIGNKSNQRSGSNRRSRAAEVHNLSERVLHRFVYIIYNI

SEQ ID NO: 48188 - protein, 183 aa, Arabidopsis thaliana
  peptide (1)..(183): Ceres Seq. ID no. 12718520
  misc_feature (1)..(171): Homolog of NCBI NO: 19698849 NR Description: putative protein [Arabidopsis thaliana]
  misc_feature (1)..(171): Homolog of NCBI NO: 20127070 NR Description: putative bHLH transcription factor [Arabidopsis
  misc_feature (1)..(171): Homolog of NCBI NO: 30694919 NR Description: bHLH protein family [Arabidopsis thaliana]
  misc_feature (1)..(171): Homolog of NCBI NO: 30694924 NR Description: bHLH protein family [Arabidopsis thaliana]
  misc_feature (1)..(183): Homolog of NCBI NO: 13430618 NR Description: unknown protein [Arabidopsis thaliana]
  misc_feature (1)..(183): Homolog of NCBI NO: 20197630 NR Description: expressed protein [Arabidopsis thaliana]
  misc_feature (1)..(171): Homolog of NCBI NO: 25408828 NR Description: hypothetical protein At2g43010 [imported] -
  misc_feature (1)..(171): Homolog of NCBI NO: 30689224 NR Description: transcription factor (BHLH9) -related
  misc_feature (1)..(171): Homolog of NCBI NO: 30689218 NR Description: transcription factor (BHLH9) -related
MDPLQRPTSETVKPKSSPEPPQVMVKPKACPDPPPQVMPPPKFRLTNSSSGIRETEMEQYSVTTVGPSHCGSNPSQNDLDVSMSHDRSKNIEEKLNPNASSSSGGSSGCSFGKDIKEMASGRCITTDRKRKRINHTDESVSLSDAIGNKSNQRSGSNRRSRAAEVHNLSERVLHRFVYIIYNI

SEQ ID NO: 48189 - protein, 160 aa, Arabidopsis thaliana
  peptide (1)..(160): Ceres Seq. ID no. 12718521
  misc_feature (1)..(148): Homolog of NCBI NO: 19698849 NR Description: putative protein [Arabidopsis thaliana]
  misc_feature (1)..(148): Homolog of NCBI NO: 20127070 NR Description: putative bHLH transcription factor [Arabidopsis
  misc_feature (1)..(148): Homolog of NCBI NO: 30694919 NR Description: bHLH protein family [Arabidopsis thaliana]
  misc_feature (1)..(148): Homolog of NCBI NO: 30694924 NR Description: bHLH protein family [Arabidopsis thaliana]
  misc_feature (1)..(160): Homolog of NCBI NO: 13430618 NR Description: unknown protein [Arabidopsis thaliana]
  misc_feature (1)..(160): Homolog of NCBI NO: 20197630 NR Description: expressed protein [Arabidopsis thaliana]
  misc_feature (1)..(148): Homolog of NCBI NO: 25408828 NR Description: hypothetical protein At2g43010 [imported] -
  misc_feature (1)..(148): Homolog of NCBI NO: 30689224 NR Description: transcription factor (BHLH9) -related
  misc_feature (1)..(148): Homolog of NCBI NO: 30689218 NR Description: transcription factor (BHLH9) -related
MVKPKACPDPPPQVMPPPKFRLTNSSSGIRETEMEQYSVTTVGPSHCGSNPSQNDLDVSMSHDRSKNIEEKLNPNASSSSGGSSGCSFGKDIKEMASGRCITTDRKRKRINHTDESVSLSDAIGNKSNQRSGSNRRSRAAEVHNLSERVLHRFVYIIYNI

SEQ ID NO: 48190 - DNA, 1946 bp, Arabidopsis thaliana
  misc_feature (1)..(1946): Ceres Seq. ID no. 13649842
  misc_feature: MA Experiment ID: 20000184 Result: Down-regulated in Transcription
  misc_feature: MA Experiment 20000184 PARAMETER Experiment Name: At_Shoots__P Parameter: Age (day) Value: 7
  misc_feature: MA Experiment 20000184 PARAMETER Experiment Name: At_Shoots__P Parameter: Tissue Value: Shoots vs. Whole Plant
  misc_feature: MA Experiment ID: 20000234 Result: Down-regulated in Transcription
  misc_feature: MA Experiment 20000234 PARAMETER Experiment Name: At_Siliques_P Parameter: Age (day) Value: 21
  misc_feature: MA Experiment 20000234 PARAMETER Experiment Name: At_Siliques_P Parameter: Organism Value: A. thaliana
  misc_feature: MA Experiment 20000234 PARAMETER Experiment Name: At_Siliques_P Parameter: Plant Line Value: WS
  misc_feature: MA Experiment 20000234 PARAMETER Experiment Name: At_Siliques_P Parameter: Tissue Value: Less Than 5mm Siliques vs. Whole Plant
  misc_feature: MA Experiment ID: 20000265 Result: Down-regulated in Transcription
  misc_feature: MA Experiment 20000265 PARAMETER Experiment Name: At_Open_Flower_P Parameter: Age (day) Value: 21
  misc_feature: MA Experiment 20000265 PARAMETER Experiment Name: At_Open_Flower_P Parameter: Plant Line Value: WS
  misc_feature: MA Experiment 20000265 PARAMETER Experiment Name: At_Open_Flower_P Parameter: Tissue Value: Closed Flower vs. Whole Plant
  misc_feature: MA Experiment ID: 20000286 Result: Down-regulated in Transcription
  misc_feature: MA Experiment 20000286 PARAMETER Experiment Name: At_Open_Flower_P Parameter: Age (day) Value: 21
  misc_feature: MA Experiment 20000286 PARAMETER Experiment Name: At_Open_Flower_P Parameter: Plant Line Value: WS
  misc_feature: MA Experiment 20000286 PARAMETER Experiment Name: At_Open_Flower_P Parameter: Tissue Value: Half Open vs. Whole Plant
  misc_feature: MA Experiment ID: 20000451 Result: Up-regulated in Transcription
  misc_feature: MA Experiment 20000451 PARAMETER Experiment Name: At_CS6879_Shoots-Roots_P Parameter: Age (day) Value: 14
  misc_feature: MA Experiment 20000451 PARAMETER Experiment Name: At_CS6879_Shoots-Roots_P Parameter: Organism Value: A. thaliana
  misc_feature: MA Experiment 20000451 PARAMETER Experiment Name: At_CS6879_Shoots-Roots_P Parameter: Plant Line Value: CS6879 vs. WS
  misc_feature: MA Experiment 20000451 PARAMETER Experiment Name: At_CS6879_Shoots-Roots_P Parameter: Tissue Value: Roots
gtatttcccttttacgaatttaaataaagtagatgttacaaaagaaaatgaaaatctctgaaaaactctcctgattcaaaagagtaagaaatctacaaaagaaaaccacagagaaaatctctactgatcagtttctctccattggtgatcgctcgtcagaaaaattgagctcgattttgtataaattgaagaaaaagaagaagatcatcaaatgcgtgatttttacttttccgttcaagtgattgatcaagggaacataagcagctagagaccacaccactcagttatttctatctcatagtgcttgtggatgttcaagctataagaatgtgctcggtggttctatgaatatataggaagattggtgttttgatgggatgggacaccaaattgctaaggtttatggtgttatcaattactagtacgtcttatcttctgaacaaccaccaccatggaatctcatctgggaaatggagtaggcagttcgagatctgccaaaaatacaaagaacacttctagttcagttgattggttgagcagagatatgcttgagatgaagataagggacaagacagaggctgatgaggagagagacagtgaaccagatatcattgatggagttggtgcagaacctggccatgtgatcacaactacactccctggacgaaatggtcaatcaagacagacagtcagttacatagcagaacacgtagtcgggactggttcattcggaatggttttccaagctaaatgcagagaaactggggaggttgttgccatcaaaaaagttctacaagacaagcgttacaagaacagagaattacaaattatgcagatgctagaccatccgaatgttgtttgtttaaagcatagcttctattcaagaacagaaaatgaagaggtttatctaaatcttgtccttgagtttgttcccgagactgtcaatcgtactgccagaagctacagtagaatgaaccagctgatgccattgatatatgtcaaactctacacttaccagatttgcagggggcttgcttaccttcataattgctgtggtctttgtcaccgtgatataaagccccaaaacctgctagtgaatccacacacacatcagctgaaaatttgtgattttgggagtgcaaaagtgttggtgaaaggagaacccaatatttcttacatttgttcaagatactatcgtgccccagagctcatttttggagccaccgagtacacaactgcaatagacatatggtccacaggttgtgtgatggctgaactgctgcttggacagcctctgtttcctggcgaaagtggagtcgatcaacttgttgaaatcataaaggttttgggtacaccaacaagggaggagatcaaatgcatgaatccaaactacacagaatttaaatttcctcagataaaacctcatccttggcacaaggtattccagaaacgtctgccacctgaagcagtagatcttctttgtaggttcttccagtattctcctaatttgagatgtacagcggtggaagcttgtatccaccctttctttgatgagctaagagacccaaatgctcgtctgccaaacggccggccacttcctccgctattcaattttaaaccacaagaactctctggtatccctcctgaaactgtggaccgacttgtcccagaacatgcccgtaagcagaaccacttcatggcattacactcgtaagtctcttccgtgttttctgtacgacctatcgggtgttctcttcttttctctaagctctctagatcccagtctttgggaaaaaccagtagagctctctctctgtaaacagaaatcactggaaaaagaagcaatgacttttgtattaaggtgcttgcgcatcccttgtcgtgaagtgaggatgcgtaaaatacaacactactttgttagatatatgatatagaggaacatactt

SEQ ID NO: 48191 - protein, 420 aa, Arabidopsis thaliana
  peptide (1)..(420): Ceres Seq. ID no. 13649843
  misc_feature (82)..(366): Pfam Name: Protein kinase domain Pfam Description: Protein kinase domain
  misc_feature (6)..(411): Homolog of NCBI NO: 7434282 NR Description: shaggy protein kinase (EC 2.7.1.-) 6 - common
  misc_feature (8)..(418): Homolog of NCBI NO: 15230058 NR Description: shaggy-related protein kinase gamma [Arabidopsis
  misc_feature (22)..(418): Homolog of NCBI NO: 18421039 NR Description: shaggy-related protein kinase alpha [Arabidopsis
  misc_feature (8)..(418): Homolog of NCBI NO: 21553877 NR Description: shaggy related protein kinase ASK-GAMMA
  misc_feature (46)..(420): Homolog of NCBI NO: 1504063 NR Description: shaggy-like kinase kappa [Arabidopsis thaliana]
  misc_feature (5)..(420): Homolog of NCBI NO: 24637171 NR Description: GSK-3-like protein MsK4 [Medicago sativa]
  misc_feature (3)..(47): Homolog of NCBI NO: 25287630 NR Description: hypothetical protein [imported] - Arabidopsis
  misc_feature (47)..(420): Homolog of NCBI NO: 25287630 NR Description: hypothetical protein [imported] - Arabidopsis
  misc_feature (3)..(420): Homolog of NCBI NO: 15218288 NR Description: shaggy-related protien kinase kappa [Arabidopsis
  misc_feature (1)..(420): Homolog of NCBI NO: 15217795 NR Description: shaggy-related protein kinase kappa, putative
MESHLGNGVGSSRSAKNTKNTSSSVDWLSRDMLEMKIRDKTEADEERDSEPDIIDGVGAEPGHVITTTLPGRNGQSRQTVSYIAEHVVGTGSFGMVFQAKCRETGEVVAIKKVLQDKRYKNRELQIMQMLDHPNVVCLKHSFYSRTENEEVYLNLVLEFVPETVNRTARSYSRMNQLMPLIYVKLYTYQICRGLAYLHNCCGLCHRDIKPQNLLVNPHTHQLKICDFGSAKVLVKGEPNISYICSRYYRAPELIFGATEYTTAIDIWSTGCVMAELLLGQPLFPGESGVDQLVEIIKVLGTPTREEIKCMNPNYTEFKFPQIKPHPWHKVFQKRLPPEAVDLLCRFFQYSPNLRCTAVEACIHPFFDELRDPNARLPNGRPLPPLFNFKPQELSGIPPETVDRLVPEHARKQNHFMALHS

SEQ ID NO: 48192 - protein, 389 aa, Arabidopsis thaliana
  peptide (1)..(389): Ceres Seq. ID no. 13649844
  misc_feature (51)..(335): Pfam Name: Protein kinase domain Pfam Description: Protein kinase domain
  misc_feature (1)..(380): Homolog of NCBI NO: 7434282 NR Description: shaggy protein kinase (EC 2.7.1.-) 6 - common
  misc_feature (1)..(387): Homolog of NCBI NO: 15230058 NR Description: shaggy-related protein kinase gamma [Arabidopsis
  misc_feature (1)..(387): Homolog of NCBI NO: 18421039 NR Description: shaggy-related protein kinase alpha [Arabidopsis
  misc_feature (1)..(387): Homolog of NCBI NO: 21553877 NR Description: shaggy related protein kinase ASK-GAMMA
  misc_feature (15)..(389): Homolog of NCBI NO: 1504063 NR Description: shaggy-like kinase kappa [Arabidopsis thaliana]
  misc_feature (1)..(389): Homolog of NCBI NO: 24637171 NR Description: GSK-3-like protein MsK4 [Medicago sativa]
  misc_feature (1)..(16): Homolog of NCBI NO: 25287630 NR Description: hypothetical protein [imported] - Arabidopsis
  misc_feature (16)..(389): Homolog of NCBI NO: 25287630 NR Description: hypothetical protein [imported] - Arabidopsis
  misc_feature (1)..(389): Homolog of NCBI NO: 15218288 NR Description: shaggy-related protien kinase kappa [Arabidopsis
  misc_feature (1)..(389): Homolog of NCBI NO: 15217795 NR Description: shaggy-related protein kinase kappa, putative
MLEMKIRDKTEADEERDSEPDIIDGVGAEPGHVITTTLPGRNGQSRQTVSYIAEHVVGTGSFGMVFQAKCRETGEVVAIKKVLQDKRYKNRELQIMQMLDHPNVVCLKHSFYSRTENEEVYLNLVLEFVPETVNRTARSYSRMNQLMPLIYVKLYTYQICRGLAYLHNCCGLCHRDIKPQNLLVNPHTHQLKICDFGSAKVLVKGEPNISYICSRYYRAPELIFGATEYTTAIDIWSTGCVMAELLLGQPLFPGESGVDQLVEIIKVLGTPTREEIKCMNPNYTEFKFPQIKPHPWHKVFQKRLPPEAVDLLCRFFQYSPNLRCTAVEACIHPFFDELRDPNARLPNGRPLPPLFNFKPQELSGIPPETVDRLVPEHARKQNHFMALHS

SEQ ID NO: 48193 - protein, 386 aa, Arabidopsis thaliana
  peptide (1)..(386): Ceres Seq. ID no. 13649845
  misc_feature (48)..(332): Pfam Name: Protein kinase domain Pfam Description: Protein kinase domain
  misc_feature (1)..(377): Homolog of NCBI NO: 7434282 NR Description: shaggy protein kinase (EC 2.7.1.-) 6 - common
  misc_feature (1)..(384): Homolog of NCBI NO: 15230058 NR Description: shaggy-related protein kinase gamma [Arabidopsis
  misc_feature (1)..(384): Homolog of NCBI NO: 18421039 NR Description: shaggy-related protein kinase alpha [Arabidopsis
  misc_feature (1)..(384): Homolog of NCBI NO: 21553877 NR Description: shaggy related protein kinase ASK-GAMMA
  misc_feature (12)..(386): Homolog of NCBI NO: 1504063 NR Description: shaggy-like kinase kappa [Arabidopsis thaliana]
  misc_feature (1)..(386): Homolog of NCBI NO: 24637171 NR Description: GSK-3-like protein MsK4 [Medicago sativa]
  misc_feature (1)..(13): Homolog of NCBI NO: 25287630 NR Description: hypothetical protein [imported] - Arabidopsis
  misc_feature (13)..(386): Homolog of NCBI NO: 25287630 NR Description: hypothetical protein [imported] - Arabidopsis
  misc_feature (1)..(386): Homolog of NCBI NO: 15218288 NR Description: shaggy-related protien kinase kappa [Arabidopsis
  misc_feature (1)..(386): Homolog of NCBI NO: 15217795 NR Description: shaggy-related protein kinase kappa, putative
MKIRDKTEADEERDSEPDIIDGVGAEPGHVITTTLPGRNGQSRQTVSYIAEHVVGTGSFGMVFQAKCRETGEVVAIKKVLQDKRYKNRELQIMQMLDHPNVVCLKHSFYSRTENEEVYLNLVLEFVPETVNRTARSYSRMNQLMPLIYVKLYTYQICRGLAYLHNCCGLCHRDIKPQNLLVNPHTHQLKICDFGSAKVLVKGEPNISYICSRYYRAPELIFGATEYTTAIDIWSTGCVMAELLLGQPLFPGESGVDQLVEIIKVLGTPTREEIKCMNPNYTEFKFPQIKPHPWHKVFQKRLPPEAVDLLCRFFQYSPNLRCTAVEACIHPFFDELRDPNARLPNGRPLPPLFNFKPQELSGIPPETVDRLVPEHARKQNHFMALHS

SEQ ID NO: 48194 - DNA, 1186 bp, Arabidopsis thaliana
  misc_feature (1)..(1186): Ceres Seq. ID no. 13648617
  misc_feature: MA Experiment ID: 20000179 Result: Up-regulated in Transcription
  misc_feature: MA Experiment 20000179 PARAMETER Experiment Name: At_Germinating_Seeds_P Parameter: Age (hr) Value: 6 vs. 0
  misc_feature: MA Experiment 20000179 PARAMETER Experiment Name: At_Germinating_Seeds_P Parameter: Tissue Value: Germinating Seeds
  misc_feature: MA Experiment ID: 20000180 Result: Up-regulated in Transcription
  misc_feature: MA Experiment 20000180 PARAMETER Experiment Name: At_Germinating_Seeds_P Parameter: Age (hr) Value: 24 vs. 0
  misc_feature: MA Experiment 20000180 PARAMETER Experiment Name: At_Germinating_Seeds_P Parameter: Tissue Value: Germinating Seeds
  misc_feature: MA Experiment ID: 20000234 Result: Up-regulated in Transcription
  misc_feature: MA Experiment 20000234 PARAMETER Experiment Name: At_Siliques_P Parameter: Age (day) Value: 21
  misc_feature: MA Experiment 20000234 PARAMETER Experiment Name: At_Siliques_P Parameter: Organism Value: A. thaliana
  misc_feature: MA Experiment 20000234 PARAMETER Experiment Name: At_Siliques_P Parameter: Plant Line Value: WS
  misc_feature: MA Experiment 20000234 PARAMETER Experiment Name: At_Siliques_P Parameter: Tissue Value: Less Than 5mm Siliques vs. Whole Plant
  misc_feature: MA Experiment ID: 20000264 Result: Up-regulated in Transcription
  misc_feature: MA Experiment 20000264 PARAMETER Experiment Name: At_Open_Flower_P Parameter: Age (day) Value: 21
  misc_feature: MA Experiment 20000264 PARAMETER Experiment Name: At_Open_Flower_P Parameter: Plant Line Value: WS
  misc_feature: MA Experiment 20000264 PARAMETER Experiment Name: At_Open_Flower_P Parameter: Tissue Value: Open Flower vs. Whole Plant
  misc_feature: MA Experiment ID: 20000265 Result: Up-regulated in Transcription
  misc_feature: MA Experiment 20000265 PARAMETER Experiment Name: At_Open_Flower_P Parameter: Age (day) Value: 21
  misc_feature: MA Experiment 20000265 PARAMETER Experiment Name: At_Open_Flower_P Parameter: Plant Line Value: WS
  misc_feature: MA Experiment 20000265 PARAMETER Experiment Name: At_Open_Flower_P Parameter: Tissue Value: Closed Flower vs. Whole Plant
  misc_feature: MA Experiment ID: 20000286 Result: Up-regulated in Transcription
  misc_feature: MA Experiment 20000286 PARAMETER Experiment Name: At_Open_Flower_P Parameter: Age (day) Value: 21
  misc_feature: MA Experiment 20000286 PARAMETER Experiment Name: At_Open_Flower_P Parameter: Plant Line Value: WS
  misc_feature: MA Experiment 20000286 PARAMETER Experiment Name: At_Open_Flower_P Parameter: Tissue Value: Half Open vs. Whole Plant
  misc_feature: MA Experiment ID: 20000495 Result: Up-regulated in Transcription
  misc_feature: MA Experiment 20000495 PARAMETER Experiment Name: At_Guard_Cells_P Parameter: Harvest Date Value: 8/2/2002
  misc_feature: MA Experiment 20000495 PARAMETER Experiment Name: At_Guard_Cells_P Parameter: Organism Value: A. thaliana
  misc_feature: MA Experiment 20000495 PARAMETER Experiment Name: At_Guard_Cells_P Parameter: Tissue Value: Guard Cells vs. Leaves
  misc_feature: MA Experiment ID: 20000794 Result: Down-regulated in Transcription
  misc_feature: MA Experiment 20000794 PARAMETER Experiment Name: At_Petals_P Parameter: Age (day) Value: 23-25 days
  misc_feature: MA Experiment 20000794 PARAMETER Experiment Name: At_Petals_P Parameter: Plant Line Value: WS
  misc_feature: MA Experiment 20000794 PARAMETER Experiment Name: At_Petals_P Parameter: Tissue Value: Petals vs. Whole plant
  misc_feature: MA Experiment ID: 20001911 Result: Down-regulated in Transcription
  misc_feature: MA Experiment 20001911 PARAMETER Experiment Name: At_Drought_Reproduction_P Parameter: Age (day) Value: 40
  misc_feature: MA Experiment 20001911 PARAMETER Experiment Name: At_Drought_Reproduction_P Parameter: Organism Value: A. thaliana
  misc_feature: MA Experiment 20001911 PARAMETER Experiment Name: At_Drought_Reproduction_P Parameter: Plant Line Value: WS
  misc_feature: MA Experiment 20001911 PARAMETER Experiment Name: At_Drought_Reproduction_P Parameter: Timepoint (day) Value: 10
  misc_feature: MA Experiment 20001911 PARAMETER Experiment Name: At_Drought_Reproduction_P Parameter: Tissue Value: Flowers
  misc_feature: MA Experiment 20001911 PARAMETER Experiment Name: At_Drought_Reproduction_P Parameter: Treatment Value: Drought vs. No Drought
tgaacaaacgtgtcagctatcttctctctctcactatttctgggttgaagaagatgaagaacaaagcatccatggaagctccacagttgccatctctctctgaccttgaagctcggatgcaaatcctgcgtgagtctggttttcaagaaagccaaggagatgatgatacctttgctcaacgagctgaatggttttaccagggacgacctttgcttctctcactttgtctggacctgtacaacggctacgtcactctcttgggtcgttcttctcatcagaccagacttaaacccactacttctcttccgaaccagcttctccaagatgatgatgactgcatttcggacattgattccgttagtgaggtcagttctgaagttgagagcaccttatcctttcaacagatgaaagatcctactgcggtttctgagaaagtcgatgagcttgtatcccaacttgtgacagcaagcttggacaaagagattctgaaacacgagttacttcacaaggaccaacagtttcatgaagcctccaagactatagagctgttgaagaagtttgtcatgttgctggagatggagaaagaagtggctgtggaggaaaacgctaatcttggctacaaactcacttctctcttggaggagaacagagagctagccactgaggcattgttcatgaagaacgaagctgttgggcttgctaggtgtgtgcttaagatgagagatgaccactttcacaaggtctgcattctccagaaccgcatctactcgcttcaggcatctaggaactcagagcccgtctctgataaggtctcatacggatgctttggcctggataagcataagaccaaaaagaagaaggagaacaaaaccgaagagaagaagcctggattcaagtggttgaagaaactgaacaccattaacctgtttacaaagtgcagccttaacccatcggctgctgctccatcatgctgcactttcgacttgccttattagcttaatcctttgctgtattagtaaactatgaacaatgcatacataactgtgtatgttctatcgccttattaggtttaatgcttttcagtgcatcgccctgatgcacagtttgttgtaccccgcatacaatctgtggctccttgatccacatatgtatggttttcatgactcacttatctggttaacacaac

SEQ ID NO: 48195 - protein, 330 aa, Arabidopsis thaliana
  peptide (1)..(330): Ceres Seq. ID no. 13648618
  misc_feature (31)..(259): Homolog of NCBI NO: 24431596 NR Description: Unknown protein [Oryza sativa (japonica
  misc_feature (27)..(176): Homolog of NCBI NO: 8778711 NR Description: T1N15.1 [Arabidopsis thaliana]
  misc_feature (27)..(316): Homolog of NCBI NO: 22330107 NR Description: hypothetical protein [Arabidopsis thaliana]
  misc_feature (18)..(330): Homolog of NCBI NO: 30684631 NR Description: expressed protein [Arabidopsis thaliana]
  misc_feature (15)..(330): Homolog of NCBI NO: 9294158 NR Description: contains similarity to unknown
NKRVSYLLSLTISGLKKMKNKASMEAPQLPSLSDLEARMQILRESGFQESQGDDDTFAQRAEWFYQGRPLLLSLCLDLYNGYVTLLGRSSHQTRLKPTTSLPNQLLQDDDDCISDIDSVSEVSSEVESTLSFQQMKDPTAVSEKVDELVSQLVTASLDKEILKHELLHKDQQFHEASKTIELLKKFVMLLEMEKEVAVEENANLGYKLTSLLEENRELATEALFMKNEAVGLARCVLKMRDDHFHKVCILQNRIYSLQASRNSEPVSDKVSYGCFGLDKHKTKKKKENKTEEKKPGFKWLKKLNTINLFTKCSLNPSAAAPSCCTFDLPY

SEQ ID NO: 48196 - protein, 313 aa, Arabidopsis thaliana
  peptide (1)..(313): Ceres Seq. ID no. 13648619
  misc_feature (14)..(242): Homolog of NCBI NO: 24431596 NR Description: Unknown protein [Oryza sativa (japonica
  misc_feature (10)..(159): Homolog of NCBI NO: 8778711 NR Description: T1N15.1 [Arabidopsis thaliana]
  misc_feature (10)..(299): Homolog of NCBI NO: 22330107 NR Description: hypothetical protein [Arabidopsis thaliana]
  misc_feature (1)..(313): Homolog of NCBI NO: 30684631 NR Description: expressed protein [Arabidopsis thaliana]
  misc_feature (1)..(313): Homolog of NCBI NO: 9294158 NR Description: contains similarity to unknown
MKNKASMEAPQLPSLSDLEARMQILRESGFQESQGDDDTFAQRAEWFYQGRPLLLSLCLDLYNGYVTLLGRSSHQTRLKPTTSLPNQLLQDDDDCISDIDSVSEVSSEVESTLSFQQMKDPTAVSEKVDELVSQLVTASLDKEILKHELLHKDQQFHEASKTIELLKKFVMLLEMEKEVAVEENANLGYKLTSLLEENRELATEALFMKNEAVGLARCVLKMRDDHFHKVCILQNRIYSLQASRNSEPVSDKVSYGCFGLDKHKTKKKKENKTEEKKPGFKWLKKLNTINLFTKCSLNPSAAAPSCCTFDLPY

SEQ ID NO: 48197 - protein, 307 aa, Arabidopsis thaliana
  peptide (1)..(307): Ceres Seq. ID no. 13648620
  misc_feature (8)..(236): Homolog of NCBI NO: 24431596 NR Description: Unknown protein [Oryza sativa (japonica
  misc_feature (4)..(153): Homolog of NCBI NO: 8778711 NR Description: T1N15.1 [Arabidopsis thaliana]
  misc_feature (4)..(293): Homolog of NCBI NO: 22330107 NR Description: hypothetical protein [Arabidopsis thaliana]
  misc_feature (1)..(307): Homolog of NCBI NO: 30684631 NR Description: expressed protein [Arabidopsis thaliana]
  misc_feature (1)..(307): Homolog of NCBI NO: 9294158 NR Description: contains similarity to unknown
MEAPQLPSLSDLEARMQILRESGFQESQGDDDTFAQRAEWFYQGRPLLLSLCLDLYNGYVTLLGRSSHQTRLKPTTSLPNQLLQDDDDCISDIDSVSEVSSEVESTLSFQQMKDPTAVSEKVDELVSQLVTASLDKEILKHELLHKDQQFHEASKTIELLKKFVMLLEMEKEVAVEENANLGYKLTSLLEENRELATEALFMKNEAVGLARCVLKMRDDHFHKVCILQNRIYSLQASRNSEPVSDKVSYGCFGLDKHKTKKKKENKTEEKKPGFKWLKKLNTINLFTKCSLNPSAAAPSCCTFDLPY

SEQ ID NO: 48198 - DNA, 2044 bp, Arabidopsis thaliana
  misc_feature (1)..(2044): Ceres Seq. ID no. 12669302
  misc_feature: MA Experiment ID: 20000307 Result: Up-regulated in Transcription
  misc_feature: MA Experiment 20000307 PARAMETER Experiment Name: At_Germinating_Seeds_Sub_P Parameter: Age (hr) Value: 24 vs. 0
  misc_feature: MA Experiment 20000307 PARAMETER Experiment Name: At_Germinating_Seeds_Sub_P Parameter: Organism Value: A. thaliana
  misc_feature: MA Experiment 20000307 PARAMETER Experiment Name: At_Germinating_Seeds_Sub_P Parameter: Plant Line Value: WS
  misc_feature: MA Experiment 20000307 PARAMETER Experiment Name: At_Germinating_Seeds_Sub_P Parameter: Tissue Value: Germinating Seeds
  misc_feature: MA Experiment ID: 20000315 Result: Down-regulated in Transcription
  misc_feature: MA Experiment 20000315 PARAMETER Experiment Name: At_14day_Shoots-Roots_Sub_P Parameter: Age (day) Value: 14
  misc_feature: MA Experiment 20000315 PARAMETER Experiment Name: At_14day_Shoots-Roots_Sub_P Parameter: Organism Value: A. thaliana
  misc_feature: MA Experiment 20000315 PARAMETER Experiment Name: At_14day_Shoots-Roots_Sub_P Parameter: Plant Line Value: WS
  misc_feature: MA Experiment 20000315 PARAMETER Experiment Name: At_14day_Shoots-Roots_Sub_P Parameter: Tissue Value: Shoots vs. Whole Plant
  misc_feature: MA Experiment ID: 20000328 Result: Down-regulated in Transcription
  misc_feature: MA Experiment 20000328 PARAMETER Experiment Name: At_42deg_Heat_Sub_P Parameter: Age (day) Value: 14
  misc_feature: MA Experiment 20000328 PARAMETER Experiment Name: At_42deg_Heat_Sub_P Parameter: Organism Value: A. thaliana
  misc_feature: MA Experiment 20000328 PARAMETER Experiment Name: At_42deg_Heat_Sub_P Parameter: Plant Line Value: WS
  misc_feature: MA Experiment 20000328 PARAMETER Experiment Name: At_42deg_Heat_Sub_P Parameter: Temperature (deg C) Value: 42 vs. 22
  misc_feature: MA Experiment 20000328 PARAMETER Experiment Name: At_42deg_Heat_Sub_P Parameter: Timepoint (hr) Value: 6
  misc_feature: MA Experiment 20000328 PARAMETER Experiment Name: At_42deg_Heat_Sub_P Parameter: Tissue Value: Aerial
  misc_feature: MA Experiment ID: 20000355 Result: Down-regulated in Transcription
  misc_feature: MA Experiment 20000355 PARAMETER Experiment Name: At_Siliques_Sub_P Parameter: Age (day) Value: 21
  misc_feature: MA Experiment 20000355 PARAMETER Experiment Name: At_Siliques_Sub_P Parameter: Organism Value: A. thaliana
  misc_feature: MA Experiment 20000355 PARAMETER Experiment Name: At_Siliques_Sub_P Parameter: Plant Line Value: WS
  misc_feature: MA Experiment 20000355 PARAMETER Experiment Name: At_Siliques_Sub_P Parameter: Tissue Value: Less Than 5mm Siliques vs. Whole Plant
  misc_feature: MA Experiment ID: 20000440 Result: Down-regulated in Transcription
  misc_feature: MA Experiment 20000440 PARAMETER Experiment Name: At_Closed-Flower__Sub_P Parameter: Tissue Value: Closed Flower vs. Whole Plant
aattttacgaaaaggtcgaaactttcttcagctgaacccgtgtttcctcttctctgcaactcaccggttcgccggaaaactctacgccgtcgccggattttgcaccaacgaaaacttctttaaactactttcttcattattcttctgctgagtttcaaaaactcagccatgggtaattgtatcgcctgcgtcaagtttgacccagacaactcaaaaccaaaccagaagaagaaacctccacggggacggcaacgaaacccatacgacgatcccgatggtttaagaactcacgcaccgttacgtgtgattcctatgagccatcaatctcagatcagcgacaagtacatcttaggacgagaactcggtcgcggcgaattcggaatcacgtatctttgtacagatagagagactcgtgaagctttagcttgcaaatcaatctccaagagaaagctccgaaccgccgtcgatgtggaagacgtccgtcgtgaagtcacgatcatgtcaactttaccggaacacccaaacgttgtgaaacttaaagcgacttatgaggataacgagaacgtgcatcttgtgatggagctttgtgaaggaggtgagctttttgatcggattgttgccagaggacattatacagagcgtgcggcggctaccgtcgcgagaacgatcgcggaggttgtgaggatgtgtcatgtcaatggtgttatgcatagagatttgaagcctgagaatttcttgtttgctaacaagaaggagaattctgcacttaaggctattgattttggtttatctgttctctttaaacctggagagaggtttacagagattgttggaagtccttattatatggctccagaagtgttgaagagaaattatggaccagaggttgatgtgtggagtgctggagttatcctctacatcttgctttgtggtgttcctccgttttgggcagagactgaacaaggtgtggctcttgccatcttgaggggagttcttgattttaagagagatccttggtcgcagatatcagagagcgcaaagagccttgtgaagcagatgttggaacctgattcaactaagcgtttgactgctcagcaagttcttgatcacccttggatacagaatgcaaagaaagctccaaatgttcctttaggggatattgttaggtcaaggttgaagcaattctccatgatgaatagattgaaaaagaaagctctgcgtgttatcgccgaacacttgtctattcaagaagttgaagtgatcagaaacatgtttacgctgatggatgatgacaacgacggtaaaatatcatatctagaactcagagctggactccggaaagtcggttcacaactgggtgaaccagagatcaaattgttaatggaagtggcggatgttaatggaaatggatgcttggactatggagagtttgtagcagtgataattcacttgcagaagatggagaatgatgagcatttcagacaagcttttatgttctttgacaaagatggaagtggatacatcgaatcagaagaactacgtgaagctttaaccgacgagttaggtgaaccagacaacagtgttataatcgatataatgcgtgaagtcgacactgacaaggacggaaaaataaactatgatgagtttgtggtgatgatgaaagctggaactgattggagaaaggcatcaagacaatactcaagagagaggtttaaaagcttaagcttaaacttgatgaaagacgggtcaatgcatctacacgacgcactcactggacaatctattgcagtttgatctttacacttgtttatcaccaaaacagaagcaatctgatggctgcttttcttacacgttcatgaagggtttttttctgggcttttttcagatgtgattttggcttacttcactttgtttctagagattcttttttttggttttggggaagttggaaatttgtaatttgtgggcgtagttaggcttttcactggagaatgaatgaatgtgtatgtaatatttgtttaattattataaagcttctttctat

SEQ ID NO: 48199 - protein, 541 aa, Arabidopsis thaliana
  peptide (1)..(541): Ceres Seq. ID no. 12669303
  misc_feature (59)..(317): Pfam Name: Protein kinase domain Pfam Description: Protein kinase domain
  misc_feature (1)..(530): Homolog of NCBI NO: 18416872 NR Description: calcium-dependent protein kinase-like protein
  misc_feature (34)..(530): Homolog of NCBI NO: 17064926 NR Description: calcium-dependent protein kinase [Arabidopsis
  misc_feature (34)..(530): Homolog of NCBI NO: 22331739 NR Description: calcium-dependent protein kinase
  misc_feature (21)..(529): Homolog of NCBI NO: 14484895 NR Description: calcium-dependent protein kinase [Funaria
  misc_feature (55)..(530): Homolog of NCBI NO: 34907990 NR Description: putative calcium-dependent protein kinase
  misc_feature (49)..(541): Homolog of NCBI NO: 1084334 NR Description: calcium-dependent protein kinase (EC 2.7.1.-) 1 -
  misc_feature (49)..(541): Homolog of NCBI NO: 18394667 NR Description: calcium-dependent protein kinase, putative
  misc_feature (1)..(541): Homolog of NCBI NO: 28416563 NR Description: At1g18890 [Arabidopsis thaliana]
  misc_feature (1)..(541): Homolog of NCBI NO: 25287677 NR Description: calcium-dependent protein kinase 1
  misc_feature (1)..(541): Homolog of NCBI NO: 30699042 NR Description: calcium-dependent protein kinase, putative (CDPK)
MGNCIACVKFDPDNSKPNQKKKPPRGRQRNPYDDPDGLRTHAPLRVIPMSHQSQISDKYILGRELGRGEFGITYLCTDRETREALACKSISKRKLRTAVDVEDVRREVTIMSTLPEHPNVVKLKATYEDNENVHLVMELCEGGELFDRIVARGHYTERAAATVARTIAEVVRMCHVNGVMHRDLKPENFLFANKKENSALKAIDFGLSVLFKPGERFTEIVGSPYYMAPEVLKRNYGPEVDVWSAGVILYILLCGVPPFWAETEQGVALAILRGVLDFKRDPWSQISESAKSLVKQMLEPDSTKRLTAQQVLDHPWIQNAKKAPNVPLGDIVRSRLKQFSMMNRLKKKALRVIAEHLSIQEVEVIRNMFTLMDDDNDGKISYLELRAGLRKVGSQLGEPEIKLLMEVADVNGNGCLDYGEFVAVIIHLQKMENDEHFRQAFMFFDKDGSGYIESEELREALTDELGEPDNSVIIDIMREVDTDKDGKINYDEFVVMMKAGTDWRKASRQYSRERFKSLSLNLMKDGSMHLHDALTGQSIAV

SEQ ID NO: 48200 - protein, 493 aa, Arabidopsis thaliana
  peptide (1)..(493): Ceres Seq. ID no. 12669304
  misc_feature (11)..(269): Pfam Name: Protein kinase domain Pfam Description: Protein kinase domain
  misc_feature (1)..(482): Homolog of NCBI NO: 18416872 NR Description: calcium-dependent protein kinase-like protein
  misc_feature (1)..(482): Homolog of NCBI NO: 17064926 NR Description: calcium-dependent protein kinase [Arabidopsis
  misc_feature (1)..(482): Homolog of NCBI NO: 22331739 NR Description: calcium-dependent protein kinase
  misc_feature (1)..(481): Homolog of NCBI NO: 14484895 NR Description: calcium-dependent protein kinase [Funaria
  misc_feature (7)..(482): Homolog of NCBI NO: 34907990 NR Description: putative calcium-dependent protein kinase
  misc_feature (1)..(493): Homolog of NCBI NO: 1084334 NR Description: calcium-dependent protein kinase (EC 2.7.1.-) 1 -
  misc_feature (1)..(493): Homolog of NCBI NO: 18394667 NR Description: calcium-dependent protein kinase, putative
  misc_feature (1)..(493): Homolog of NCBI NO: 28416563 NR Description: At1g18890 [Arabidopsis thaliana]
  misc_feature (1)..(493): Homolog of NCBI NO: 25287677 NR Description: calcium-dependent protein kinase 1
  misc_feature (1)..(493): Homolog of NCBI NO: 30699042 NR Description: calcium-dependent protein kinase, putative (CDPK)
MSHQSQISDKYILGRELGRGEFGITYLCTDRETREALACKSISKRKLRTAVDVEDVRREVTIMSTLPEHPNVVKLKATYEDNENVHLVMELCEGGELFDRIVARGHYTERAAATVARTIAEVVRMCHVNGVMHRDLKPENFLFANKKENSALKAIDFGLSVLFKPGERFTEIVGSPYYMAPEVLKRNYGPEVDVWSAGVILYILLCGVPPFWAETEQGVALAILRGVLDFKRDPWSQISESAKSLVKQMLEPDSTKRLTAQQVLDHPWIQNAKKAPNVPLGDIVRSRLKQFSMMNRLKKKALRVIAEHLSIQEVEVIRNMFTLMDDDNDGKISYLELRAGLRKVGSQLGEPEIKLLMEVADVNGNGCLDYGEFVAVIIHLQKMENDEHFRQAFMFFDKDGSGYIESEELREALTDELGEPDNSVIIDIMREVDTDKDGKINYDEFVVMMKAGTDWRKASRQYSRERFKSLSLNLMKDGSMHLHDALTGQSIAV

SEQ ID NO: 48201 - protein, 431 aa, Arabidopsis thaliana
  peptide (1)..(431): Ceres Seq. ID no. 12669305
  misc_feature (1)..(207): Pfam Name: Protein kinase domain Pfam Description: Protein kinase domain
  misc_feature (1)..(420): Homolog of NCBI NO: 18416872 NR Description: calcium-dependent protein kinase-like protein
  misc_feature (1)..(420): Homolog of NCBI NO: 17064926 NR Description: calcium-dependent protein kinase [Arabidopsis
  misc_feature (1)..(420): Homolog of NCBI NO: 22331739 NR Description: calcium-dependent protein kinase
  misc_feature (1)..(419): Homolog of NCBI NO: 14484895 NR Description: calcium-dependent protein kinase [Funaria
  misc_feature (1)..(420): Homolog of NCBI NO: 34907990 NR Description: putative calcium-dependent protein kinase
  misc_feature (1)..(431): Homolog of NCBI NO: 1084334 NR Description: calcium-dependent protein kinase (EC 2.7.1.-) 1 -
  misc_feature (1)..(431): Homolog of NCBI NO: 18394667 NR Description: calcium-dependent protein kinase, putative
  misc_feature (1)..(431): Homolog of NCBI NO: 28416563 NR Description: At1g18890 [Arabidopsis thaliana]
  misc_feature (1)..(431): Homolog of NCBI NO: 25287677 NR Description: calcium-dependent protein kinase 1
  misc_feature (1)..(431): Homolog of NCBI NO: 30699042 NR Description: calcium-dependent protein kinase, putative (CDPK)
MSTLPEHPNVVKLKATYEDNENVHLVMELCEGGELFDRIVARGHYTERAAATVARTIAEVVRMCHVNGVMHRDLKPENFLFANKKENSALKAIDFGLSVLFKPGERFTEIVGSPYYMAPEVLKRNYGPEVDVWSAGVILYILLCGVPPFWAETEQGVALAILRGVLDFKRDPWSQISESAKSLVKQMLEPDSTKRLTAQQVLDHPWIQNAKKAPNVPLGDIVRSRLKQFSMMNRLKKKALRVIAEHLSIQEVEVIRNMFTLMDDDNDGKISYLELRAGLRKVGSQLGEPEIKLLMEVADVNGNGCLDYGEFVAVIIHLQKMENDEHFRQAFMFFDKDGSGYIESEELREALTDELGEPDNSVIIDIMREVDTDKDGKINYDEFVVMMKAGTDWRKASRQYSRERFKSLSLNLMKDGSMHLHDALTGQSIAV

SEQ ID NO: 48202 - DNA, 1330 bp, Arabidopsis thaliana
  misc_feature (1)..(1330): Ceres Seq. ID no. 13649862
  misc_feature: MA Experiment ID: 20000179 Result: Up-regulated in Transcription
  misc_feature: MA Experiment 20000179 PARAMETER Experiment Name: At_Germinating_Seeds_P Parameter: Age (hr) Value: 6 vs. 0
  misc_feature: MA Experiment 20000179 PARAMETER Experiment Name: At_Germinating_Seeds_P Parameter: Tissue Value: Germinating Seeds
  misc_feature: MA Experiment ID: 20000185 Result: Down-regulated in Transcription
  misc_feature: MA Experiment 20000185 PARAMETER Experiment Name: At_Roots__P Parameter: Age (day) Value: 7 vs. 21
  misc_feature: MA Experiment 20000185 PARAMETER Experiment Name: At_Roots__P Parameter: Organism Value: A. thaliana
  misc_feature: MA Experiment 20000185 PARAMETER Experiment Name: At_Roots__P Parameter: Tissue Value: Roots vs. Whole Plant
  misc_feature: MA Experiment ID: 20000439 Result: Down-regulated in Transcription
  misc_feature: MA Experiment 20000439 PARAMETER Experiment Name: At_Roots__P Parameter: Age (day) Value: 14 vs. 21
  misc_feature: MA Experiment 20000439 PARAMETER Experiment Name: At_Roots__P Parameter: Organism Value: A. thaliana
  misc_feature: MA Experiment 20000439 PARAMETER Experiment Name: At_Roots__P Parameter: Tissue Value: Roots vs. Whole Plant
  misc_feature: MA Experiment ID: 20000453 Result: Up-regulated in Transcription
  misc_feature: MA Experiment 20000453 PARAMETER Experiment Name: At_100uM_ABA_P Parameter: Age (day) Value: 15
  misc_feature: MA Experiment 20000453 PARAMETER Experiment Name: At_100uM_ABA_P Parameter: Organism Value: A. thaliana
  misc_feature: MA Experiment 20000453 PARAMETER Experiment Name: At_100uM_ABA_P Parameter: Plant Line Value: WS
  misc_feature: MA Experiment 20000453 PARAMETER Experiment Name: At_100uM_ABA_P Parameter: Timepoint (hr) Value: 24
  misc_feature: MA Experiment 20000453 PARAMETER Experiment Name: At_100uM_ABA_P Parameter: Tissue Value: Aerial
  misc_feature: MA Experiment 20000453 PARAMETER Experiment Name: At_100uM_ABA_P Parameter: Treatment Value: 100uM ABA vs. No Treatment
  misc_feature: MA Experiment ID: 20000495 Result: Up-regulated in Transcription
  misc_feature: MA Experiment 20000495 PARAMETER Experiment Name: At_Guard_Cells_P Parameter: Harvest Date Value: 8/2/2002
  misc_feature: MA Experiment 20000495 PARAMETER Experiment Name: At_Guard_Cells_P Parameter: Organism Value: A. thaliana
  misc_feature: MA Experiment 20000495 PARAMETER Experiment Name: At_Guard_Cells_P Parameter: Tissue Value: Guard Cells vs. Leaves
  misc_feature: MA Experiment ID: 20000794 Result: Down-regulated in Transcription
  misc_feature: MA Experiment 20000794 PARAMETER Experiment Name: At_Petals_P Parameter: Age (day) Value: 23-25 days
  misc_feature: MA Experiment 20000794 PARAMETER Experiment Name: At_Petals_P Parameter: Plant Line Value: WS
  misc_feature: MA Experiment 20000794 PARAMETER Experiment Name: At_Petals_P Parameter: Tissue Value: Petals vs. Whole plant
  misc_feature: MA Experiment ID: 20001247 Result: Up-regulated in Transcription
  misc_feature: MA Experiment 20001247 PARAMETER Experiment Name: At_Far-red-induction_P Parameter: Age (day) Value: 7
  misc_feature: MA Experiment 20001247 PARAMETER Experiment Name: At_Far-red-induction_P Parameter: Light Value: Far-red vs. White
  misc_feature: MA Experiment 20001247 PARAMETER Experiment Name: At_Far-red-induction_P Parameter: Organism Value: A. thaliana
  misc_feature: MA Experiment 20001247 PARAMETER Experiment Name: At_Far-red-induction_P Parameter: Plant Line Value: Columbia
  misc_feature: MA Experiment 20001247 PARAMETER Experiment Name: At_Far-red-induction_P Parameter: Timepoint (hr) Value: 1
  misc_feature: MA Experiment 20001247 PARAMETER Experiment Name: At_Far-red-induction_P Parameter: Tissue Value: Whole Plant
  misc_feature: MA Experiment ID: 20001911 Result: Down-regulated in Transcription
  misc_feature: MA Experiment 20001911 PARAMETER Experiment Name: At_Drought_Reproduction_P Parameter: Age (day) Value: 40
  misc_feature: MA Experiment 20001911 PARAMETER Experiment Name: At_Drought_Reproduction_P Parameter: Organism Value: A. thaliana
  misc_feature: MA Experiment 20001911 PARAMETER Experiment Name: At_Drought_Reproduction_P Parameter: Plant Line Value: WS
  misc_feature: MA Experiment 20001911 PARAMETER Experiment Name: At_Drought_Reproduction_P Parameter: Timepoint (day) Value: 10
  misc_feature: MA Experiment 20001911 PARAMETER Experiment Name: At_Drought_Reproduction_P Parameter: Tissue Value: Flowers
  misc_feature: MA Experiment 20001911 PARAMETER Experiment Name: At_Drought_Reproduction_P Parameter: Treatment Value: Drought vs. No Drought
gagtgtgaattgccattaccatcactctctttgtttcgttactcgcaatgaaggataatcttgaaagagcaaaacttatggtttcttctactgtgttttcatggcttcttctgtgtctctttgcagtgacaacatctgtttcagttcagcctacgtgtacttttccggcgatttacaacttcggagattctaattccgacactggaggtatctccgccgcttttgagcctattagggatccttacggtcaaggtttcttccacagacccgccggaagagactccgatggccgtctcaccattgatttcattgctgagcgtctggggttaccgtatttgagcgcatacttaaactcgttaggatcaaacttcagacatggagcaaactttgcaacaggtggttcaaccataagaagacagaacgaaactatctttcaatatggcattagtccattctctctcgatatgcagattgctcaattcgatcagttcaaagccagatctgcactactcttcacacaaattaagagtagatatgatagagagaagcttccaagacaggaagagtttgcaaaggctttgtatacttttgatattggacagaatgatctctctgttgggtttcggacaatgagcgtcgatcaacttaaggcgacgatacccgacattgtcaaccatttagcttctgctgtccggaacatatatcagcaaggaggaagaacattttgggtacacaacacgggtcctttcggttgtttacccgtgaacatgttttacatgggcactcctgcaccgggctacttggacaaatctggctgcgtgaaggctcaaaatgaaatggcgatggagttcaacagaaagctcaaggaaacagtaatcaatctcagaaaagaactcactcaagcagccattacatatgttgatgtctacactgcgaaatatgaaatgatgagcaatcccaagaaactaggatttgcaaaccccttgaaggtatgttgcggctaccatgagaagtatgatcacatctggtgtggaaacaaagggaaagtgaacaataccgaaatctacggtggctcttgtcccaacccggtaatggctgtgagctgggatggagttcactatacggaagctgcaaacaagcatgtggctgaccgtactctaaatggtttgctcacagaccctccagttccaataacccgagcttgttatagacagtgagatttagtagaagcgctagatgaaccgaaataaaggtttgatccttagactcttagggcaataatgtaagtgttttaaggaacaatcaatgatctatgcaatcctgtgtaacc

SEQ ID NO: 48203 - protein, 389 aa, Arabidopsis thaliana
  peptide (1)..(389): Ceres Seq. ID no. 13649863
  misc_feature (42)..(370): Pfam Name: GDSL-like Lipase/Acylhydrolase Pfam Description: GDSL-like Lipase/Acylhydrolase
  misc_feature (8)..(389): Homolog of NCBI NO: 25457244 NR Description: early nodule-specific protein ENOD8 [imported] -
  misc_feature (8)..(389): Homolog of NCBI NO: 18390045 NR Description: Enod8.1 [Medicago truncatula]
  misc_feature (308)..(388): Homolog of NCBI NO: 34901120 NR Description: contains ESTs
  misc_feature (37)..(308): Homolog of NCBI NO: 34901120 NR Description: contains ESTs
  misc_feature (21)..(388): Homolog of NCBI NO: 30909057 NR Description: ENSP-like protein [Hevea brasiliensis]
  misc_feature (37)..(388): Homolog of NCBI NO: 33147015 NR Description: putative early nodulin 8 precursor
  misc_feature (35)..(388): Homolog of NCBI NO: 15231558 NR Description: GDSL-motif lipase/hydrolase protein [Arabidopsis
  misc_feature (13)..(386): Homolog of NCBI NO: 34901122 NR Description: contains ESTs
  misc_feature (13)..(386): Homolog of NCBI NO: 33147016 NR Description: putative early nodulin 8 precursor
  misc_feature (1)..(389): Homolog of NCBI NO: 15241404 NR Description: GDSL-motif lipase/hydrolase protein [Arabidopsis
MKDNLERAKLMVSSTVFSWLLLCLFAVTTSVSVQPTCTFPAIYNFGDSNSDTGGISAAFEPIRDPYGQGFFHRPAGRDSDGRLTIDFIAERLGLPYLSAYLNSLGSNFRHGANFATGGSTIRRQNETIFQYGISPFSLDMQIAQFDQFKARSALLFTQIKSRYDREKLPRQEEFAKALYTFDIGQNDLSVGFRTMSVDQLKATIPDIVNHLASAVRNIYQQGGRTFWVHNTGPFGCLPVNMFYMGTPAPGYLDKSGCVKAQNEMAMEFNRKLKETVINLRKELTQAAITYVDVYTAKYEMMSNPKKLGFANPLKVCCGYHEKYDHIWCGNKGKVNNTEIYGGSCPNPVMAVSWDGVHYTEAANKHVADRTLNGLLTDPPVPITRACYRQ

SEQ ID NO: 48204 - protein, 379 aa, Arabidopsis thaliana
  peptide (1)..(379): Ceres Seq. ID no. 13649864
  misc_feature (32)..(360): Pfam Name: GDSL-like Lipase/Acylhydrolase Pfam Description: GDSL-like Lipase/Acylhydrolase
  misc_feature (1)..(379): Homolog of NCBI NO: 25457244 NR Description: early nodule-specific protein ENOD8 [imported] -
  misc_feature (1)..(379): Homolog of NCBI NO: 18390045 NR Description: Enod8.1 [Medicago truncatula]
  misc_feature (298)..(378): Homolog of NCBI NO: 34901120 NR Description: contains ESTs
  misc_feature (27)..(298): Homolog of NCBI NO: 34901120 NR Description: contains ESTs
  misc_feature (11)..(378): Homolog of NCBI NO: 30909057 NR Description: ENSP-like protein [Hevea brasiliensis]
  misc_feature (27)..(378): Homolog of NCBI NO: 33147015 NR Description: putative early nodulin 8 precursor
  misc_feature (25)..(378): Homolog of NCBI NO: 15231558 NR Description: GDSL-motif lipase/hydrolase protein [Arabidopsis
  misc_feature (3)..(376): Homolog of NCBI NO: 34901122 NR Description: contains ESTs
  misc_feature (3)..(376): Homolog of NCBI NO: 33147016 NR Description: putative early nodulin 8 precursor
  misc_feature (1)..(379): Homolog of NCBI NO: 15241404 NR Description: GDSL-motif lipase/hydrolase protein [Arabidopsis
MVSSTVFSWLLLCLFAVTTSVSVQPTCTFPAIYNFGDSNSDTGGISAAFEPIRDPYGQGFFHRPAGRDSDGRLTIDFIAERLGLPYLSAYLNSLGSNFRHGANFATGGSTIRRQNETIFQYGISPFSLDMQIAQFDQFKARSALLFTQIKSRYDREKLPRQEEFAKALYTFDIGQNDLSVGFRTMSVDQLKATIPDIVNHLASAVRNIYQQGGRTFWVHNTGPFGCLPVNMFYMGTPAPGYLDKSGCVKAQNEMAMEFNRKLKETVINLRKELTQAAITYVDVYTAKYEMMSNPKKLGFANPLKVCCGYHEKYDHIWCGNKGKVNNTEIYGGSCPNPVMAVSWDGVHYTEAANKHVADRTLNGLLTDPPVPITRACYRQ

SEQ ID NO: 48205 - protein, 250 aa, Arabidopsis thaliana
  peptide (1)..(250): Ceres Seq. ID no. 13649865
  misc_feature (1)..(231): Pfam Name: GDSL-like Lipase/Acylhydrolase Pfam Description: GDSL-like Lipase/Acylhydrolase
  misc_feature (1)..(250): Homolog of NCBI NO: 25457244 NR Description: early nodule-specific protein ENOD8 [imported] -
  misc_feature (1)..(250): Homolog of NCBI NO: 18390045 NR Description: Enod8.1 [Medicago truncatula]
  misc_feature (169)..(249): Homolog of NCBI NO: 34901120 NR Description: contains ESTs
  misc_feature (1)..(169): Homolog of NCBI NO: 34901120 NR Description: contains ESTs
  misc_feature (1)..(249): Homolog of NCBI NO: 30909057 NR Description: ENSP-like protein [Hevea brasiliensis]
  misc_feature (1)..(249): Homolog of NCBI NO: 33147015 NR Description: putative early nodulin 8 precursor
  misc_feature (1)..(249): Homolog of NCBI NO: 15231558 NR Description: GDSL-motif lipase/hydrolase protein [Arabidopsis
  misc_feature (1)..(247): Homolog of NCBI NO: 34901122 NR Description: contains ESTs
  misc_feature (1)..(247): Homolog of NCBI NO: 33147016 NR Description: putative early nodulin 8 precursor
  misc_feature (1)..(250): Homolog of NCBI NO: 15241404 NR Description: GDSL-motif lipase/hydrolase protein [Arabidopsis
MQIAQFDQFKARSALLFTQIKSRYDREKLPRQEEFAKALYTFDIGQNDLSVGFRTMSVDQLKATIPDIVNHLASAVRNIYQQGGRTFWVHNTGPFGCLPVNMFYMGTPAPGYLDKSGCVKAQNEMAMEFNRKLKETVINLRKELTQAAITYVDVYTAKYEMMSNPKKLGFANPLKVCCGYHEKYDHIWCGNKGKVNNTEIYGGSCPNPVMAVSWDGVHYTEAANKHVADRTLNGLLTDPPVPITRACYRQ

SEQ ID NO: 48206 - DNA, 1420 bp, Arabidopsis thaliana
  misc_feature (1)..(1420): Ceres Seq. ID no. 13648858
  misc_feature: MA Experiment ID: 20000182 Result: Up-regulated in Transcription
  misc_feature: MA Experiment 20000182 PARAMETER Experiment Name: At_2mM_SA_P Parameter: Age (day) Value: 14
  misc_feature: MA Experiment 20000182 PARAMETER Experiment Name: At_2mM_SA_P Parameter: Organism Value: A. thaliana
  misc_feature: MA Experiment 20000182 PARAMETER Experiment Name: At_2mM_SA_P Parameter: Plant Line Value: WS
  misc_feature: MA Experiment 20000182 PARAMETER Experiment Name: At_2mM_SA_P Parameter: Timepoint (hr) Value: 6
  misc_feature: MA Experiment 20000182 PARAMETER Experiment Name: At_2mM_SA_P Parameter: Tissue Value: Aerial
  misc_feature: MA Experiment 20000182 PARAMETER Experiment Name: At_2mM_SA_P Parameter: Treatment Value: 2mM SA vs. No Treatment
  misc_feature: MA Experiment ID: 20000265 Result: Down-regulated in Transcription
  misc_feature: MA Experiment 20000265 PARAMETER Experiment Name: At_Open_Flower_P Parameter: Age (day) Value: 21
  misc_feature: MA Experiment 20000265 PARAMETER Experiment Name: At_Open_Flower_P Parameter: Plant Line Value: WS
  misc_feature: MA Experiment 20000265 PARAMETER Experiment Name: At_Open_Flower_P Parameter: Tissue Value: Closed Flower vs. Whole Plant
  misc_feature: MA Experiment ID: 20000456 Result: Up-regulated in Transcription
  misc_feature: MA Experiment 20000456 PARAMETER Experiment Name: At_100uM_BA_P Parameter: Age (day) Value: 14
  misc_feature: MA Experiment 20000456 PARAMETER Experiment Name: At_100uM_BA_P Parameter: Organism Value: A. thaliana
  misc_feature: MA Experiment 20000456 PARAMETER Experiment Name: At_100uM_BA_P Parameter: Plant Line Value: WS
  misc_feature: MA Experiment 20000456 PARAMETER Experiment Name: At_100uM_BA_P Parameter: Timepoint (hr) Value: 6
  misc_feature: MA Experiment 20000456 PARAMETER Experiment Name: At_100uM_BA_P Parameter: Tissue Value: Aerial
  misc_feature: MA Experiment 20000456 PARAMETER Experiment Name: At_100uM_BA_P Parameter: Treatment Value: 100uM BA vs. No Treatment
  misc_feature: MA Experiment ID: 20000709 Result: Up-regulated in Transcription
  misc_feature: MA Experiment 20000709 PARAMETER Experiment Name: At_15mM_NH4NO3_L-to-H_P Parameter: Age (hr) Value: 14
  misc_feature: MA Experiment 20000709 PARAMETER Experiment Name: At_15mM_NH4NO3_L-to-H_P Parameter: Organism Value: A. thaliana
  misc_feature: MA Experiment 20000709 PARAMETER Experiment Name: At_15mM_NH4NO3_L-to-H_P Parameter: Plant Line Value: WS
  misc_feature: MA Experiment 20000709 PARAMETER Experiment Name: At_15mM_NH4NO3_L-to-H_P Parameter: Timepoint (hr) Value: 4
  misc_feature: MA Experiment 20000709 PARAMETER Experiment Name: At_15mM_NH4NO3_L-to-H_P Parameter: Tissue Value: Aerial
  misc_feature: MA Experiment 20000709 PARAMETER Experiment Name: At_15mM_NH4NO3_L-to-H_P Parameter: Treatment Value: 15mM NH4NO3 vs. 30mM Mannitol
  misc_feature: MA Experiment ID: 20001451 Result: Down-regulated in Transcription
  misc_feature: MA Experiment 20001451 PARAMETER Experiment Name: At_Far-red-induction_P Parameter: Age (day) Value: 7
  misc_feature: MA Experiment 20001451 PARAMETER Experiment Name: At_Far-red-induction_P Parameter: Light Value: Far-red vs. White
  misc_feature: MA Experiment 20001451 PARAMETER Experiment Name: At_Far-red-induction_P Parameter: Organism Value: A. thaliana
  misc_feature: MA Experiment 20001451 PARAMETER Experiment Name: At_Far-red-induction_P Parameter: Plant Line Value: Columbia
  misc_feature: MA Experiment 20001451 PARAMETER Experiment Name: At_Far-red-induction_P Parameter: Timepoint (hr) Value: 24
  misc_feature: MA Experiment 20001451 PARAMETER Experiment Name: At_Far-red-induction_P Parameter: Tissue Value: Whole Plant
gattcgtgggaaaaagaaagtctagatttttgtggattttgattttgtgattccgtgattgtatgaacttgagccgttttgcttcgagattaagaatggcggaagaaatctcaaagacgaaggtgggatcttcttctactgcttcggtggctgattcatctgctgctgcgtcggctgcaacgaatgcggccaaatcaagatggaaaattttgtggcctaattcgctccggtggattcctacgtccaccgattacatcatcgccgccgagaaacgtcttctctccatcctcaagacgccttatgtacaagagcaagtcagtattggttcaggaccaccaggttctaaaatcaggtggtttaggtctacgagcaatgagtcacgttacatcaacactgttacatttgatgccaaggagggagctcctacactcgtcatggttcatggttatggtgcttctcaagggtttttcttccgtaattttgatgctcttgccagtcgatttagagtgatcgctattgatcaacttgggtggggtggttcaagtaggcctgattttacatgtagaagcacagaagaaactgaggcatggtttatcgactcctttgaggaatggcgtaaagcccagaatctcagtaactttattctattaggacattcttttggaggctatgttgctgctaaatacgcgcttaagcatcctgaacatgttcaacacttaattctggtgggatctgctgggttctcagcagaagcagatgccaaatcagaatggctcactaaatttagagcaacatggaaaggtgcagtcctaaatcatttatgggagtcaaatttcactcctcagaagctggttagaggattaggtccttggggtccaggtcttgtaaatcggtatacaactgcaagatttggtgcacattcggagggaactgggctaacagaagaggaagccaaattgctaaccgattatgtgtaccatactttggctgcaaaggctagtggagagttatgcttgaaatacatcttctcatttggagcatttgctaggaagcccctcttacaaagtgcatcagagtggaaagtgccaacaacgtttatctatggaatgaatgattggatgaactatcaaggtgcggtggaagcgaggaaatccatgaaggtcccttgcgaaatcattcgggttccacagggtggtcattttgtgttcatagacaacccaattggttttcattctgcagtgctttatgcttgccgcaagtttatatctcaagactcctctcatgatcaacaactcctagatggtctacgattggtttagtcatagtatcttgttccttttaccttccaaatttattctatatgtgtatacaagtatatatgaaaaagaacataaaaaagaattactttctttatttgaat

SEQ ID NO: 48207 - protein, 418 aa, Arabidopsis thaliana
  peptide (1)..(418): Ceres Seq. ID no. 13648859
  misc_feature (147)..(396): Pfam Name: alpha/beta hydrolase fold Pfam Description: alpha/beta hydrolase fold
  misc_feature (252)..(334): Homolog of NCBI NO: 40740327 NR Description: hypothetical protein AN4046.2 [Aspergillus
  misc_feature (83)..(235): Homolog of NCBI NO: 40740327 NR Description: hypothetical protein AN4046.2 [Aspergillus
  misc_feature (26)..(397): Homolog of NCBI NO: 24586385 NR Description: CG1882-PA [Drosophila melanogaster]
  misc_feature (57)..(397): Homolog of NCBI NO: 11545767 NR Description: abhydrolase domain containing 4 [Homo sapiens]
  misc_feature (101)..(397): Homolog of NCBI NO: 26326239 NR Description: unnamed protein product [Mus musculus]
  misc_feature (57)..(397): Homolog of NCBI NO: 19353227 NR Description: hypothetical protein FLJ12816 [Homo sapiens]
  misc_feature (57)..(397): Homolog of NCBI NO: 19527302 NR Description: RIKEN cDNA 1110035H23 [Mus musculus]
  misc_feature (43)..(397): Homolog of NCBI NO: 34875013 NR Description: similar to RIKEN cDNA 1110035H23 [Rattus
  misc_feature (12)..(418): Homolog of NCBI NO: 7446839 NR Description: hypothetical protein T19F6.150 - Arabidopsis
  misc_feature (1)..(418): Homolog of NCBI NO: 30686425 NR Description: hydrolase, alpha/beta fold family [Arabidopsis
MNLSRFASRLRMAEEISKTKVGSSSTASVADSSAAASAATNAAKSRWKILWPNSLRWIPTSTDYIIAAEKRLLSILKTPYVQEQVSIGSGPPGSKIRWFRSTSNESRYINTVTFDAKEGAPTLVMVHGYGASQGFFFRNFDALASRFRVIAIDQLGWGGSSRPDFTCRSTEETEAWFIDSFEEWRKAQNLSNFILLGHSFGGYVAAKYALKHPEHVQHLILVGSAGFSAEADAKSEWLTKFRATWKGAVLNHLWESNFTPQKLVRGLGPWGPGLVNRYTTARFGAHSEGTGLTEEEAKLLTDYVYHTLAAKASGELCLKYIFSFGAFARKPLLQSASEWKVPTTFIYGMNDWMNYQGAVEARKSMKVPCEIIRVPQGGHFVFIDNPIGFHSAVLYACRKFISQDSSHDQQLLDGLRLV

SEQ ID NO: 48208 - protein, 407 aa, Arabidopsis thaliana
  peptide (1)..(407): Ceres Seq. ID no. 13648860
  misc_feature (136)..(385): Pfam Name: alpha/beta hydrolase fold Pfam Description: alpha/beta hydrolase fold
  misc_feature (241)..(323): Homolog of NCBI NO: 40740327 NR Description: hypothetical protein AN4046.2 [Aspergillus
  misc_feature (72)..(224): Homolog of NCBI NO: 40740327 NR Description: hypothetical protein AN4046.2 [Aspergillus
  misc_feature (15)..(386): Homolog of NCBI NO: 24586385 NR Description: CG1882-PA [Drosophila melanogaster]
  misc_feature (46)..(386): Homolog of NCBI NO: 11545767 NR Description: abhydrolase domain containing 4 [Homo sapiens]
  misc_feature (90)..(386): Homolog of NCBI NO: 26326239 NR Description: unnamed protein product [Mus musculus]
  misc_feature (46)..(386): Homolog of NCBI NO: 19353227 NR Description: hypothetical protein FLJ12816 [Homo sapiens]
  misc_feature (46)..(386): Homolog of NCBI NO: 19527302 NR Description: RIKEN cDNA 1110035H23 [Mus musculus]
  misc_feature (32)..(386): Homolog of NCBI NO: 34875013 NR Description: similar to RIKEN cDNA 1110035H23 [Rattus
  misc_feature (1)..(407): Homolog of NCBI NO: 7446839 NR Description: hypothetical protein T19F6.150 - Arabidopsis
  misc_feature (1)..(407): Homolog of NCBI NO: 30686425 NR Description: hydrolase, alpha/beta fold family [Arabidopsis
MAEEISKTKVGSSSTASVADSSAAASAATNAAKSRWKILWPNSLRWIPTSTDYIIAAEKRLLSILKTPYVQEQVSIGSGPPGSKIRWFRSTSNESRYINTVTFDAKEGAPTLVMVHGYGASQGFFFRNFDALASRFRVIAIDQLGWGGSSRPDFTCRSTEETEAWFIDSFEEWRKAQNLSNFILLGHSFGGYVAAKYALKHPEHVQHLILVGSAGFSAEADAKSEWLTKFRATWKGAVLNHLWESNFTPQKLVRGLGPWGPGLVNRYTTARFGAHSEGTGLTEEEAKLLTDYVYHTLAAKASGELCLKYIFSFGAFARKPLLQSASEWKVPTTFIYGMNDWMNYQGAVEARKSMKVPCEIIRVPQGGHFVFIDNPIGFHSAVLYACRKFISQDSSHDQQLLDGLRLV

SEQ ID NO: 48209 - protein, 294 aa, Arabidopsis thaliana
  peptide (1)..(294): Ceres Seq. ID no. 13648861
  misc_feature (23)..(272): Pfam Name: alpha/beta hydrolase fold Pfam Description: alpha/beta hydrolase fold
  misc_feature (128)..(210): Homolog of NCBI NO: 40740327 NR Description: hypothetical protein AN4046.2 [Aspergillus
  misc_feature (1)..(111): Homolog of NCBI NO: 40740327 NR Description: hypothetical protein AN4046.2 [Aspergillus
  misc_feature (1)..(273): Homolog of NCBI NO: 24586385 NR Description: CG1882-PA [Drosophila melanogaster]
  misc_feature (1)..(273): Homolog of NCBI NO: 11545767 NR Description: abhydrolase domain containing 4 [Homo sapiens]
  misc_feature (1)..(273): Homolog of NCBI NO: 26326239 NR Description: unnamed protein product [Mus musculus]
  misc_feature (1)..(273): Homolog of NCBI NO: 19353227 NR Description: hypothetical protein FLJ12816 [Homo sapiens]
  misc_feature (1)..(273): Homolog of NCBI NO: 19527302 NR Description: RIKEN cDNA 1110035H23 [Mus musculus]
  misc_feature (1)..(273): Homolog of NCBI NO: 34875013 NR Description: similar to RIKEN cDNA 1110035H23 [Rattus
  misc_feature (1)..(294): Homolog of NCBI NO: 7446839 NR Description: hypothetical protein T19F6.150 - Arabidopsis
  misc_feature (1)..(294): Homolog of NCBI NO: 30686425 NR Description: hydrolase, alpha/beta fold family [Arabidopsis
MVHGYGASQGFFFRNFDALASRFRVIAIDQLGWGGSSRPDFTCRSTEETEAWFIDSFEEWRKAQNLSNFILLGHSFGGYVAAKYALKHPEHVQHLILVGSAGFSAEADAKSEWLTKFRATWKGAVLNHLWESNFTPQKLVRGLGPWGPGLVNRYTTARFGAHSEGTGLTEEEAKLLTDYVYHTLAAKASGELCLKYIFSFGAFARKPLLQSASEWKVPTTFIYGMNDWMNYQGAVEARKSMKVPCEIIRVPQGGHFVFIDNPIGFHSAVLYACRKFISQDSSHDQQLLDGLRLV

SEQ ID NO: 48210 - DNA, 1211 bp, Arabidopsis thaliana; identical to SEQ ID NO: 43816
  misc_feature (1)..(1211): Ceres Seq. ID no. 13576059
  misc_feature: MA Experiment ID: 20000307 Result: Up-regulated in Transcription
  misc_feature: MA Experiment 20000307 PARAMETER Experiment Name: At_Germinating_Seeds_Sub_P Parameter: Age (hr) Value: 24 vs. 0
  misc_feature: MA Experiment 20000307 PARAMETER Experiment Name: At_Germinating_Seeds_Sub_P Parameter: Organism Value: A. thaliana
  misc_feature: MA Experiment 20000307 PARAMETER Experiment Name: At_Germinating_Seeds_Sub_P Parameter: Plant Line Value: WS
  misc_feature: MA Experiment 20000307 PARAMETER Experiment Name: At_Germinating_Seeds_Sub_P Parameter: Tissue Value: Germinating Seeds
  misc_feature: MA Experiment ID: 20000328 Result: Up-regulated in Transcription
  misc_feature: MA Experiment 20000328 PARAMETER Experiment Name: At_42deg_Heat_Sub_P Parameter: Age (day) Value: 14
  misc_feature: MA Experiment 20000328 PARAMETER Experiment Name: At_42deg_Heat_Sub_P Parameter: Organism Value: A. thaliana
  misc_feature: MA Experiment 20000328 PARAMETER Experiment Name: At_42deg_Heat_Sub_P Parameter: Plant Line Value: WS
  misc_feature: MA Experiment 20000328 PARAMETER Experiment Name: At_42deg_Heat_Sub_P Parameter: Temperature (deg C) Value: 42 vs. 22
  misc_feature: MA Experiment 20000328 PARAMETER Experiment Name: At_42deg_Heat_Sub_P Parameter: Timepoint (hr) Value: 6
  misc_feature: MA Experiment 20000328 PARAMETER Experiment Name: At_42deg_Heat_Sub_P Parameter: Tissue Value: Aerial
  misc_feature: MA Experiment ID: 20000355 Result: Down-regulated in Transcription
  misc_feature: MA Experiment 20000355 PARAMETER Experiment Name: At_Siliques_Sub_P Parameter: Age (day) Value: 21
  misc_feature: MA Experiment 20000355 PARAMETER Experiment Name: At_Siliques_Sub_P Parameter: Organism Value: A. thaliana
  misc_feature: MA Experiment 20000355 PARAMETER Experiment Name: At_Siliques_Sub_P Parameter: Plant Line Value: WS
  misc_feature: MA Experiment 20000355 PARAMETER Experiment Name: At_Siliques_Sub_P Parameter: Tissue Value: Less Than 5mm Siliques vs. Whole Plant
  misc_feature: MA Experiment ID: 20000440 Result: Down-regulated in Transcription
  misc_feature: MA Experiment 20000440 PARAMETER Experiment Name: At_Closed-Flower__Sub_P Parameter: Tissue Value: Closed Flower vs. Whole Plant
  misc_feature: MA Experiment ID: 20001807 Result: Up-regulated in Transcription
  misc_feature: MA Experiment 20001807 PARAMETER Experiment Name: At_50mM_NH4NO3_L-to-H_Sub_P Parameter: Timepoint (hr) Value: 6
  misc_feature: MA Experiment 20001807 PARAMETER Experiment Name: At_50mM_NH4NO3_L-to-H_Sub_P Parameter: Tissue Value: Leaf
  misc_feature: MA Experiment 20001807 PARAMETER Experiment Name: At_50mM_NH4NO3_L-to-H_Sub_P Parameter: Treatment Value: 50mM NH4NO3 vs 100mM Mannitol

SEQ ID NO: 48211 - protein, 289 aa, Arabidopsis thaliana; identical to SEQ ID NO: 43817
  peptide (1)..(289): Ceres Seq. ID no. 13576060
  misc_feature (30)..(265): Pfam Name: Major intrinsic protein Pfam Description: Major intrinsic protein
  misc_feature (30)..(265): Pfam Name: Major intrinsic protein Pfam Description: Major intrinsic protein
  misc_feature (30)..(265): Pfam Name: Major intrinsic protein Pfam Description: Major intrinsic protein
  misc_feature (1)..(282): Homolog of NCBI NO: 5081423 NR Description: plasma membrane intrinsic protein 2 [Brassica
  misc_feature (1)..(282): Homolog of NCBI NO: 15228095 NR Description: plasma membrane intrinsic protein 2B, putative
  misc_feature (1)..(285): Homolog of NCBI NO: 28395420 NR Description: plasma intrinsic protein 2,2 [Juglans regia]
  misc_feature (1)..(285): Homolog of NCBI NO: 13486942 NR Description: plasma membrane intrinsic protein 2-2 [Pyrus
  misc_feature (1)..(285): Homolog of NCBI NO: 15233102 NR Description: plasma membrane aquaporin, putative [Arabidopsis
  misc_feature (1)..(282): Homolog of NCBI NO: 5081423 NR Description: plasma membrane intrinsic protein 2 [Brassica
  misc_feature (1)..(285): Homolog of NCBI NO: 28395420 NR Description: plasma intrinsic protein 2,2 [Juglans regia]
  misc_feature (1)..(285): Homolog of NCBI NO: 15233102 NR Description: plasma membrane aquaporin, putative [Arabidopsis
  misc_feature (1)..(285): Homolog of NCBI NO: 13486942 NR Description: plasma membrane intrinsic protein 2-2 [Pyrus
  misc_feature (1)..(285): Homolog of NCBI NO: 28395420 NR Description: plasma intrinsic protein 2,2 [Juglans regia]
  misc_feature (1)..(282): Homolog of NCBI NO: 15228095 NR Description: plasma membrane intrinsic protein 2B, putative
  misc_feature (1)..(282): Homolog of NCBI NO: 5081423 NR Description: plasma membrane intrinsic protein 2 [Brassica
  misc_feature (1)..(289): Homolog of NCBI NO: 15224999 NR Description: major intrinsic protein aquaporin, putative
  misc_feature (1)..(282): Homolog of NCBI NO: 3158476 NR Description: aquaporin 2 [Samanea saman]
  misc_feature (1)..(282): Homolog of NCBI NO: 8071620 NR Description: putative aquaporin PIP2-1 [Vitis berlandieri x
  misc_feature (1)..(282): Homolog of NCBI NO: 7441275 NR Description: mipC protein - common ice plant
  misc_feature (1)..(282): Homolog of NCBI NO: 7441251 NR Description: plasma membrane intrinsic protein 1 - soybean
  misc_feature (1)..(289): Homolog of NCBI NO: 15224999 NR Description: major intrinsic protein aquaporin, putative
  misc_feature (1)..(282): Homolog of NCBI NO: 3158476 NR Description: aquaporin 2 [Samanea saman]
  misc_feature (1)..(282): Homolog of NCBI NO: 8071620 NR Description: putative aquaporin PIP2-1 [Vitis berlandieri x
  misc_feature (1)..(282): Homolog of NCBI NO: 7441275 NR Description: mipC protein - common ice plant
  misc_feature (1)..(282): Homolog of NCBI NO: 7441251 NR Description: plasma membrane intrinsic protein 1 - soybean
  misc_feature (1)..(285): Homolog of NCBI NO: 15233102 NR Description: plasma membrane aquaporin, putative [Arabidopsis
  misc_feature (1)..(285): Homolog of NCBI NO: 13486942 NR Description: plasma membrane intrinsic protein 2-2 [Pyrus
  misc_feature (1)..(282): Homolog of NCBI NO: 15228095 NR Description: plasma membrane intrinsic protein 2B, putative
  misc_feature (1)..(282): Homolog of NCBI NO: 7441251 NR Description: plasma membrane intrinsic protein 1 - soybean
  misc_feature (1)..(282): Homolog of NCBI NO: 7441275 NR Description: mipC protein - common ice plant
  misc_feature (1)..(282): Homolog of NCBI NO: 8071620 NR Description: putative aquaporin PIP2-1 [Vitis berlandieri x
  misc_feature (1)..(282): Homolog of NCBI NO: 3158476 NR Description: aquaporin 2 [Samanea saman]
  misc_feature (1)..(289): Homolog of NCBI NO: 15224999 NR Description: major intrinsic protein aquaporin, putative

SEQ ID NO: 48212 - protein, 201 aa, Arabidopsis thaliana; identical to SEQ ID NO: 43818
  peptide (1)..(201): Ceres Seq. ID no. 13576061
  misc_feature (1)..(177): Pfam Name: Major intrinsic protein Pfam Description: Major intrinsic protein
  misc_feature (1)..(177): Pfam Name: Major intrinsic protein Pfam Description: Major intrinsic protein
  misc_feature (1)..(177): Pfam Name: Major intrinsic protein Pfam Description: Major intrinsic protein
  misc_feature (1)..(194): Homolog of NCBI NO: 5081423 NR Description: plasma membrane intrinsic protein 2 [Brassica
  misc_feature (1)..(194): Homolog of NCBI NO: 15228095 NR Description: plasma membrane intrinsic protein 2B, putative
  misc_feature (1)..(197): Homolog of NCBI NO: 28395420 NR Description: plasma intrinsic protein 2,2 [Juglans regia]
  misc_feature (1)..(197): Homolog of NCBI NO: 13486942 NR Description: plasma membrane intrinsic protein 2-2 [Pyrus
  misc_feature (1)..(197): Homolog of NCBI NO: 15233102 NR Description: plasma membrane aquaporin, putative [Arabidopsis
  misc_feature (1)..(194): Homolog of NCBI NO: 5081423 NR Description: plasma membrane intrinsic protein 2 [Brassica
  misc_feature (1)..(197): Homolog of NCBI NO: 28395420 NR Description: plasma intrinsic protein 2,2 [Juglans regia]
  misc_feature (1)..(197): Homolog of NCBI NO: 15233102 NR Description: plasma membrane aquaporin, putative [Arabidopsis
  misc_feature (1)..(197): Homolog of NCBI NO: 13486942 NR Description: plasma membrane intrinsic protein 2-2 [Pyrus
  misc_feature (1)..(197): Homolog of NCBI NO: 28395420 NR Description: plasma intrinsic protein 2,2 [Juglans regia]
  misc_feature (1)..(194): Homolog of NCBI NO: 15228095 NR Description: plasma membrane intrinsic protein 2B, putative
  misc_feature (1)..(194): Homolog of NCBI NO: 5081423 NR Description: plasma membrane intrinsic protein 2 [Brassica
  misc_feature (1)..(201): Homolog of NCBI NO: 15224999 NR Description: major intrinsic protein aquaporin, putative
  misc_feature (1)..(194): Homolog of NCBI NO: 3158476 NR Description: aquaporin 2 [Samanea saman]
  misc_feature (1)..(194): Homolog of NCBI NO: 8071620 NR Description: putative aquaporin PIP2-1 [Vitis berlandieri x
  misc_feature (1)..(194): Homolog of NCBI NO: 7441275 NR Description: mipC protein - common ice plant
  misc_feature (1)..(194): Homolog of NCBI NO: 7441251 NR Description: plasma membrane intrinsic protein 1 - soybean
  misc_feature (1)..(201): Homolog of NCBI NO: 15224999 NR Description: major intrinsic protein aquaporin, putative
  misc_feature (1)..(194): Homolog of NCBI NO: 3158476 NR Description: aquaporin 2 [Samanea saman]
  misc_feature (1)..(194): Homolog of NCBI NO: 8071620 NR Description: putative aquaporin PIP2-1 [Vitis berlandieri x
  misc_feature (1)..(194): Homolog of NCBI NO: 7441275 NR Description: mipC protein - common ice plant
  misc_feature (1)..(194): Homolog of NCBI NO: 7441251 NR Description: plasma membrane intrinsic protein 1 - soybean
  misc_feature (1)..(197): Homolog of NCBI NO: 15233102 NR Description: plasma membrane aquaporin, putative [Arabidopsis
  misc_feature (1)..(197): Homolog of NCBI NO: 13486942 NR Description: plasma membrane intrinsic protein 2-2 [Pyrus
  misc_feature (1)..(194): Homolog of NCBI NO: 15228095 NR Description: plasma membrane intrinsic protein 2B, putative
  misc_feature (1)..(194): Homolog of NCBI NO: 7441251 NR Description: plasma membrane intrinsic protein 1 - soybean
  misc_feature (1)..(194): Homolog of NCBI NO: 7441275 NR Description: mipC protein - common ice plant
  misc_feature (1)..(194): Homolog of NCBI NO: 8071620 NR Description: putative aquaporin PIP2-1 [Vitis berlandieri x
  misc_feature (1)..(194): Homolog of NCBI NO: 3158476 NR Description: aquaporin 2 [Samanea saman]
  misc_feature (1)..(201): Homolog of NCBI NO: 15224999 NR Description: major intrinsic protein aquaporin, putative

SEQ ID NO: 48213 - protein, 162 aa, Arabidopsis thaliana; identical to SEQ ID NO: 43819
  peptide (1)..(162): Ceres Seq. ID no. 13576062
  misc_feature (1)..(138): Pfam Name: Major intrinsic protein Pfam Description: Major intrinsic protein
  misc_feature (1)..(138): Pfam Name: Major intrinsic protein Pfam Description: Major intrinsic protein
  misc_feature (1)..(138): Pfam Name: Major intrinsic protein Pfam Description: Major intrinsic protein
  misc_feature (1)..(155): Homolog of NCBI NO: 5081423 NR Description: plasma membrane intrinsic protein 2 [Brassica
  misc_feature (1)..(155): Homolog of NCBI NO: 15228095 NR Description: plasma membrane intrinsic protein 2B, putative
  misc_feature (1)..(158): Homolog of NCBI NO: 28395420 NR Description: plasma intrinsic protein 2,2 [Juglans regia]
  misc_feature (1)..(158): Homolog of NCBI NO: 13486942 NR Description: plasma membrane intrinsic protein 2-2 [Pyrus
  misc_feature (1)..(158): Homolog of NCBI NO: 15233102 NR Description: plasma membrane aquaporin, putative [Arabidopsis
  misc_feature (1)..(155): Homolog of NCBI NO: 5081423 NR Description: plasma membrane intrinsic protein 2 [Brassica
  misc_feature (1)..(158): Homolog of NCBI NO: 28395420 NR Description: plasma intrinsic protein 2,2 [Juglans regia]
  misc_feature (1)..(158): Homolog of NCBI NO: 15233102 NR Description: plasma membrane aquaporin, putative [Arabidopsis
  misc_feature (1)..(158): Homolog of NCBI NO: 13486942 NR Description: plasma membrane intrinsic protein 2-2 [Pyrus
  misc_feature (1)..(158): Homolog of NCBI NO: 28395420 NR Description: plasma intrinsic protein 2,2 [Juglans regia]
  misc_feature (1)..(155): Homolog of NCBI NO: 15228095 NR Description: plasma membrane intrinsic protein 2B, putative
  misc_feature (1)..(155): Homolog of NCBI NO: 5081423 NR Description: plasma membrane intrinsic protein 2 [Brassica
  misc_feature (1)..(162): Homolog of NCBI NO: 15224999 NR Description: major intrinsic protein aquaporin, putative
  misc_feature (1)..(155): Homolog of NCBI NO: 3158476 NR Description: aquaporin 2 [Samanea saman]
  misc_feature (1)..(155): Homolog of NCBI NO: 8071620 NR Description: putative aquaporin PIP2-1 [Vitis berlandieri x
  misc_feature (1)..(155): Homolog of NCBI NO: 7441275 NR Description: mipC protein - common ice plant
  misc_feature (1)..(155): Homolog of NCBI NO: 7441251 NR Description: plasma membrane intrinsic protein 1 - soybean
  misc_feature (1)..(162): Homolog of NCBI NO: 15224999 NR Description: major intrinsic protein aquaporin, putative
  misc_feature (1)..(155): Homolog of NCBI NO: 3158476 NR Description: aquaporin 2 [Samanea saman]
  misc_feature (1)..(155): Homolog of NCBI NO: 8071620 NR Description: putative aquaporin PIP2-1 [Vitis berlandieri x
  misc_feature (1)..(155): Homolog of NCBI NO: 7441275 NR Description: mipC protein - common ice plant
  misc_feature (1)..(155): Homolog of NCBI NO: 7441251 NR Description: plasma membrane intrinsic protein 1 - soybean
  misc_feature (1)..(158): Homolog of NCBI NO: 15233102 NR Description: plasma membrane aquaporin, putative [Arabidopsis
  misc_feature (1)..(158): Homolog of NCBI NO: 13486942 NR Description: plasma membrane intrinsic protein 2-2 [Pyrus
  misc_feature (1)..(155): Homolog of NCBI NO: 15228095 NR Description: plasma membrane intrinsic protein 2B, putative
  misc_feature (1)..(155): Homolog of NCBI NO: 7441251 NR Description: plasma membrane intrinsic protein 1 - soybean
  misc_feature (1)..(155): Homolog of NCBI NO: 7441275 NR Description: mipC protein - common ice plant
  misc_feature (1)..(155): Homolog of NCBI NO: 8071620 NR Description: putative aquaporin PIP2-1 [Vitis berlandieri x
  misc_feature (1)..(155): Homolog of NCBI NO: 3158476 NR Description: aquaporin 2 [Samanea saman]
  misc_feature (1)..(162): Homolog of NCBI NO: 15224999 NR Description: major intrinsic protein aquaporin, putative

SEQ ID NO: 48214 - DNA, 3652 bp, Arabidopsis thaliana; identical to SEQ ID NO: 37223
  misc_feature (1)..(3652): Ceres Seq. ID no. 13648943
  misc_feature: MA Experiment ID: 20000179 Result: Up-regulated in Transcription
  misc_feature: MA Experiment 20000179 PARAMETER Experiment Name: At_Germinating_Seeds_P Parameter: Age (hr) Value: 6 vs. 0
  misc_feature: MA Experiment 20000179 PARAMETER Experiment Name: At_Germinating_Seeds_P Parameter: Tissue Value: Germinating Seeds
  misc_feature: MA Experiment ID: 20000180 Result: Up-regulated in Transcription
  misc_feature: MA Experiment 20000180 PARAMETER Experiment Name: At_Germinating_Seeds_P Parameter: Age (hr) Value: 24 vs. 0
  misc_feature: MA Experiment 20000180 PARAMETER Experiment Name: At_Germinating_Seeds_P Parameter: Tissue Value: Germinating Seeds
  misc_feature: MA Experiment ID: 20000235 Result: Up-regulated in Transcription
  misc_feature: MA Experiment 20000235 PARAMETER Experiment Name: At_Siliques_P Parameter: Age (day) Value: 21
  misc_feature: MA Experiment 20000235 PARAMETER Experiment Name: At_Siliques_P Parameter: Organism Value: A. thaliana
  misc_feature: MA Experiment 20000235 PARAMETER Experiment Name: At_Siliques_P Parameter: Plant Line Value: WS
  misc_feature: MA Experiment 20000235 PARAMETER Experiment Name: At_Siliques_P Parameter: Tissue Value: 5-10mm Siliques vs. Whole Plant
  misc_feature: MA Experiment ID: 20001247 Result: Up-regulated in Transcription
  misc_feature: MA Experiment 20001247 PARAMETER Experiment Name: At_Far-red-induction_P Parameter: Age (day) Value: 7
  misc_feature: MA Experiment 20001247 PARAMETER Experiment Name: At_Far-red-induction_P Parameter: Light Value: Far-red vs. White
  misc_feature: MA Experiment 20001247 PARAMETER Experiment Name: At_Far-red-induction_P Parameter: Organism Value: A. thaliana
  misc_feature: MA Experiment 20001247 PARAMETER Experiment Name: At_Far-red-induction_P Parameter: Plant Line Value: Columbia
  misc_feature: MA Experiment 20001247 PARAMETER Experiment Name: At_Far-red-induction_P Parameter: Timepoint (hr) Value: 1
  misc_feature: MA Experiment 20001247 PARAMETER Experiment Name: At_Far-red-induction_P Parameter: Tissue Value: Whole Plant
  misc_feature: MA Experiment ID: 20001557 Result: Up-regulated in Transcription
  misc_feature: MA Experiment 20001557 PARAMETER Experiment Name: At_Drought_Soil_Dry_P Parameter: Age (day) Value: 27
  misc_feature: MA Experiment 20001557 PARAMETER Experiment Name: At_Drought_Soil_Dry_P Parameter: Organism Value: A. thaliana
  misc_feature: MA Experiment 20001557 PARAMETER Experiment Name: At_Drought_Soil_Dry_P Parameter: Plant Line Value: WS
  misc_feature: MA Experiment 20001557 PARAMETER Experiment Name: At_Drought_Soil_Dry_P Parameter: Post Timepoint (hr) Value: 3
  misc_feature: MA Experiment 20001557 PARAMETER Experiment Name: At_Drought_Soil_Dry_P Parameter: Post-Treatment Value: Re-Water vs. No Drought
  misc_feature: MA Experiment 20001557 PARAMETER Experiment Name: At_Drought_Soil_Dry_P Parameter: Timepoint (day) Value: 13
  misc_feature: MA Experiment 20001557 PARAMETER Experiment Name: At_Drought_Soil_Dry_P Parameter: Treatment Value: Drought vs. No Drought
  misc_feature: MA Experiment ID: 20001905 Result: Down-regulated in Transcription
  misc_feature: MA Experiment 20001905 PARAMETER Experiment Name: At_Drought_Reproduction_P Parameter: Age (day) Value: 40
  misc_feature: MA Experiment 20001905 PARAMETER Experiment Name: At_Drought_Reproduction_P Parameter: Organism Value: A. thaliana
  misc_feature: MA Experiment 20001905 PARAMETER Experiment Name: At_Drought_Reproduction_P Parameter: Plant Line Value: WS
  misc_feature: MA Experiment 20001905 PARAMETER Experiment Name: At_Drought_Reproduction_P Parameter: Timepoint (day) Value: 10
  misc_feature: MA Experiment 20001905 PARAMETER Experiment Name: At_Drought_Reproduction_P Parameter: Tissue Value: Rosettes
  misc_feature: MA Experiment 20001905 PARAMETER Experiment Name: At_Drought_Reproduction_P Parameter: Treatment Value: Drought vs. No Drought

SEQ ID NO: 48215 - protein, 1065 aa, Arabidopsis thaliana; identical to SEQ ID NO: 37224
  peptide (1)..(1065): Ceres Seq. ID no. 13648944
  misc_feature (219)..(453): Homolog of NCBI NO: 27372782 NR Description: cellulose synthase-like protein D4 [Populus
  misc_feature (456)..(1048): Homolog of NCBI NO: 27372782 NR Description: cellulose synthase-like protein D4 [Populus
  misc_feature (39)..(85): Homolog of NCBI NO: 15217853 NR Description: cellulose synthase family [Arabidopsis thaliana]
  misc_feature (238)..(453): Homolog of NCBI NO: 15217853 NR Description: cellulose synthase family [Arabidopsis thaliana]
  misc_feature (476)..(1048): Homolog of NCBI NO: 15217853 NR Description: cellulose synthase family [Arabidopsis thaliana]
  misc_feature (220)..(453): Homolog of NCBI NO: 15228448 NR Description: cellulose synthase family [Arabidopsis thaliana]
  misc_feature (417)..(1048): Homolog of NCBI NO: 15228448 NR Description: cellulose synthase family [Arabidopsis thaliana]
  misc_feature (19)..(70): Homolog of NCBI NO: 15237873 NR Description: cellulose synthase family [Arabidopsis thaliana]
  misc_feature (220)..(453): Homolog of NCBI NO: 15237873 NR Description: cellulose synthase family [Arabidopsis thaliana]
  misc_feature (417)..(1048): Homolog of NCBI NO: 15237873 NR Description: cellulose synthase family [Arabidopsis thaliana]
  misc_feature (219)..(453): Homolog of NCBI NO: 27372782 NR Description: cellulose synthase-like protein D4 [Populus
  misc_feature (456)..(1048): Homolog of NCBI NO: 27372782 NR Description: cellulose synthase-like protein D4 [Populus
  misc_feature (39)..(85): Homolog of NCBI NO: 15217853 NR Description: cellulose synthase family [Arabidopsis thaliana]
  misc_feature (238)..(453): Homolog of NCBI NO: 15217853 NR Description: cellulose synthase family [Arabidopsis thaliana]
  misc_feature (476)..(1048): Homolog of NCBI NO: 15217853 NR Description: cellulose synthase family [Arabidopsis thaliana]
  misc_feature (220)..(453): Homolog of NCBI NO: 15228448 NR Description: cellulose synthase family [Arabidopsis thaliana]
  misc_feature (417)..(1048): Homolog of NCBI NO: 15228448 NR Description: cellulose synthase family [Arabidopsis thaliana]
  misc_feature (19)..(70): Homolog of NCBI NO: 15237873 NR Description: cellulose synthase family [Arabidopsis thaliana]
  misc_feature (220)..(453): Homolog of NCBI NO: 15237873 NR Description: cellulose synthase family [Arabidopsis thaliana]
  misc_feature (417)..(1048): Homolog of NCBI NO: 15237873 NR Description: cellulose synthase family [Arabidopsis thaliana]
  misc_feature (219)..(453): Homolog of NCBI NO: 27372782 NR Description: cellulose synthase-like protein D4 [Populus
  misc_feature (456)..(1048): Homolog of NCBI NO: 27372782 NR Description: cellulose synthase-like protein D4 [Populus
  misc_feature (39)..(85): Homolog of NCBI NO: 15217853 NR Description: cellulose synthase family [Arabidopsis thaliana]
  misc_feature (238)..(453): Homolog of NCBI NO: 15217853 NR Description: cellulose synthase family [Arabidopsis thaliana]
  misc_feature (476)..(1048): Homolog of NCBI NO: 15217853 NR Description: cellulose synthase family [Arabidopsis thaliana]
  misc_feature (220)..(453): Homolog of NCBI NO: 15228448 NR Description: cellulose synthase family [Arabidopsis thaliana]
  misc_feature (417)..(1048): Homolog of NCBI NO: 15228448 NR Description: cellulose synthase family [Arabidopsis thaliana]
  misc_feature (19)..(70): Homolog of NCBI NO: 15237873 NR Description: cellulose synthase family [Arabidopsis thaliana]
  misc_feature (220)..(453): Homolog of NCBI NO: 15237873 NR Description: cellulose synthase family [Arabidopsis thaliana]
  misc_feature (417)..(1048): Homolog of NCBI NO: 15237873 NR Description: cellulose synthase family [Arabidopsis thaliana]

SEQ ID NO: 48216 - protein, 1054 aa, Arabidopsis thaliana; identical to SEQ ID NO: 37225
  peptide (1)..(1054): Ceres Seq. ID no. 13648945
  misc_feature (208)..(442): Homolog of NCBI NO: 27372782 NR Description: cellulose synthase-like protein D4 [Populus
  misc_feature (445)..(1037): Homolog of NCBI NO: 27372782 NR Description: cellulose synthase-like protein D4 [Populus
  misc_feature (28)..(74): Homolog of NCBI NO: 15217853 NR Description: cellulose synthase family [Arabidopsis thaliana]
  misc_feature (227)..(442): Homolog of NCBI NO: 15217853 NR Description: cellulose synthase family [Arabidopsis thaliana]
  misc_feature (465)..(1037): Homolog of NCBI NO: 15217853 NR Description: cellulose synthase family [Arabidopsis thaliana]
  misc_feature (209)..(442): Homolog of NCBI NO: 15228448 NR Description: cellulose synthase family [Arabidopsis thaliana]
  misc_feature (406)..(1037): Homolog of NCBI NO: 15228448 NR Description: cellulose synthase family [Arabidopsis thaliana]
  misc_feature (8)..(59): Homolog of NCBI NO: 15237873 NR Description: cellulose synthase family [Arabidopsis thaliana]
  misc_feature (209)..(442): Homolog of NCBI NO: 15237873 NR Description: cellulose synthase family [Arabidopsis thaliana]
  misc_feature (406)..(1037): Homolog of NCBI NO: 15237873 NR Description: cellulose synthase family [Arabidopsis thaliana]
  misc_feature (208)..(442): Homolog of NCBI NO: 27372782 NR Description: cellulose synthase-like protein D4 [Populus
  misc_feature (445)..(1037): Homolog of NCBI NO: 27372782 NR Description: cellulose synthase-like protein D4 [Populus
  misc_feature (28)..(74): Homolog of NCBI NO: 15217853 NR Description: cellulose synthase family [Arabidopsis thaliana]
  misc_feature (227)..(442): Homolog of NCBI NO: 15217853 NR Description: cellulose synthase family [Arabidopsis thaliana]
  misc_feature (465)..(1037): Homolog of NCBI NO: 15217853 NR Description: cellulose synthase family [Arabidopsis thaliana]
  misc_feature (209)..(442): Homolog of NCBI NO: 15228448 NR Description: cellulose synthase family [Arabidopsis thaliana]
  misc_feature (406)..(1037): Homolog of NCBI NO: 15228448 NR Description: cellulose synthase family [Arabidopsis thaliana]
  misc_feature (8)..(59): Homolog of NCBI NO: 15237873 NR Description: cellulose synthase family [Arabidopsis thaliana]
  misc_feature (209)..(442): Homolog of NCBI NO: 15237873 NR Description: cellulose synthase family [Arabidopsis thaliana]
  misc_feature (406)..(1037): Homolog of NCBI NO: 15237873 NR Description: cellulose synthase family [Arabidopsis thaliana]
  misc_feature (208)..(442): Homolog of NCBI NO: 27372782 NR Description: cellulose synthase-like protein D4 [Populus
  misc_feature (445)..(1037): Homolog of NCBI NO: 27372782 NR Description: cellulose synthase-like protein D4 [Populus
  misc_feature (28)..(74): Homolog of NCBI NO: 15217853 NR Description: cellulose synthase family [Arabidopsis thaliana]
  misc_feature (227)..(442): Homolog of NCBI NO: 15217853 NR Description: cellulose synthase family [Arabidopsis thaliana]
  misc_feature (465)..(1037): Homolog of NCBI NO: 15217853 NR Description: cellulose synthase family [Arabidopsis thaliana]
  misc_feature (209)..(442): Homolog of NCBI NO: 15228448 NR Description: cellulose synthase family [Arabidopsis thaliana]
  misc_feature (406)..(1037): Homolog of NCBI NO: 15228448 NR Description: cellulose synthase family [Arabidopsis thaliana]
  misc_feature (8)..(59): Homolog of NCBI NO: 15237873 NR Description: cellulose synthase family [Arabidopsis thaliana]
  misc_feature (209)..(442): Homolog of NCBI NO: 15237873 NR Description: cellulose synthase family [Arabidopsis thaliana]
  misc_feature (406)..(1037): Homolog of NCBI NO: 15237873 NR Description: cellulose synthase family [Arabidopsis thaliana]

SEQ ID NO: 48217 - protein, 959 aa, Arabidopsis thaliana; identical to SEQ ID NO: 37226
  peptide (1)..(959): Ceres Seq. ID no. 13648946
  misc_feature (618)..(944): Homolog of NCBI NO: 28973666 NR Description: unknown protein [Arabidopsis thaliana]
  misc_feature (618)..(944): Homolog of NCBI NO: 15233733 NR Description: cellulose synthase family [Arabidopsis thaliana]
  misc_feature (113)..(347): Homolog of NCBI NO: 27372782 NR Description: cellulose synthase-like protein D4 [Populus
  misc_feature (350)..(942): Homolog of NCBI NO: 27372782 NR Description: cellulose synthase-like protein D4 [Populus
  misc_feature (132)..(347): Homolog of NCBI NO: 15217853 NR Description: cellulose synthase family [Arabidopsis thaliana]
  misc_feature (370)..(942): Homolog of NCBI NO: 15217853 NR Description: cellulose synthase family [Arabidopsis thaliana]
  misc_feature (114)..(347): Homolog of NCBI NO: 15228448 NR Description: cellulose synthase family [Arabidopsis thaliana]
  misc_feature (311)..(942): Homolog of NCBI NO: 15228448 NR Description: cellulose synthase family [Arabidopsis thaliana]
  misc_feature (114)..(347): Homolog of NCBI NO: 15237873 NR Description: cellulose synthase family [Arabidopsis thaliana]
  misc_feature (311)..(942): Homolog of NCBI NO: 15237873 NR Description: cellulose synthase family [Arabidopsis thaliana]
  misc_feature (618)..(944): Homolog of NCBI NO: 28973666 NR Description: unknown protein [Arabidopsis thaliana]
  misc_feature (618)..(944): Homolog of NCBI NO: 15233733 NR Description: cellulose synthase family [Arabidopsis thaliana]
  misc_feature (113)..(347): Homolog of NCBI NO: 27372782 NR Description: cellulose synthase-like protein D4 [Populus
  misc_feature (350)..(942): Homolog of NCBI NO: 27372782 NR Description: cellulose synthase-like protein D4 [Populus
  misc_feature (132)..(347): Homolog of NCBI NO: 15217853 NR Description: cellulose synthase family [Arabidopsis thaliana]
  misc_feature (370)..(942): Homolog of NCBI NO: 15217853 NR Description: cellulose synthase family [Arabidopsis thaliana]
  misc_feature (114)..(347): Homolog of NCBI NO: 15228448 NR Description: cellulose synthase family [Arabidopsis thaliana]
  misc_feature (311)..(942): Homolog of NCBI NO: 15228448 NR Description: cellulose synthase family [Arabidopsis thaliana]
  misc_feature (114)..(347): Homolog of NCBI NO: 15237873 NR Description: cellulose synthase family [Arabidopsis thaliana]
  misc_feature (311)..(942): Homolog of NCBI NO: 15237873 NR Description: cellulose synthase family [Arabidopsis thaliana]
  misc_feature (618)..(944): Homolog of NCBI NO: 28973666 NR Description: unknown protein [Arabidopsis thaliana]
  misc_feature (618)..(944): Homolog of NCBI NO: 15233733 NR Description: cellulose synthase family [Arabidopsis thaliana]
  misc_feature (113)..(347): Homolog of NCBI NO: 27372782 NR Description: cellulose synthase-like protein D4 [Populus
  misc_feature (350)..(942): Homolog of NCBI NO: 27372782 NR Description: cellulose synthase-like protein D4 [Populus
  misc_feature (132)..(347): Homolog of NCBI NO: 15217853 NR Description: cellulose synthase family [Arabidopsis thaliana]
  misc_feature (370)..(942): Homolog of NCBI NO: 15217853 NR Description: cellulose synthase family [Arabidopsis thaliana]
  misc_feature (114)..(347): Homolog of NCBI NO: 15228448 NR Description: cellulose synthase family [Arabidopsis thaliana]
  misc_feature (311)..(942): Homolog of NCBI NO: 15228448 NR Description: cellulose synthase family [Arabidopsis thaliana]
  misc_feature (114)..(347): Homolog of NCBI NO: 15237873 NR Description: cellulose synthase family [Arabidopsis thaliana]
  misc_feature (311)..(942): Homolog of NCBI NO: 15237873 NR Description: cellulose synthase family [Arabidopsis thaliana]

SEQ ID NO: 48218 - DNA, 2334 bp, Arabidopsis thaliana
  misc_feature (1)..(2334): Ceres Seq. ID no. 13649885
  misc_feature: MA Experiment ID: 20000185 Result: Up-regulated in Transcription
  misc_feature: MA Experiment 20000185 PARAMETER Experiment Name: At_Roots__P Parameter: Age (day) Value: 7 vs. 21
  misc_feature: MA Experiment 20000185 PARAMETER Experiment Name: At_Roots__P Parameter: Organism Value: A. thaliana
  misc_feature: MA Experiment 20000185 PARAMETER Experiment Name: At_Roots__P Parameter: Tissue Value: Roots vs. Whole Plant
  misc_feature: MA Experiment ID: 20000234 Result: Up-regulated in Transcription
  misc_feature: MA Experiment 20000234 PARAMETER Experiment Name: At_Siliques_P Parameter: Age (day) Value: 21
  misc_feature: MA Experiment 20000234 PARAMETER Experiment Name: At_Siliques_P Parameter: Organism Value: A. thaliana
  misc_feature: MA Experiment 20000234 PARAMETER Experiment Name: At_Siliques_P Parameter: Plant Line Value: WS
  misc_feature: MA Experiment 20000234 PARAMETER Experiment Name: At_Siliques_P Parameter: Tissue Value: Less Than 5mm Siliques vs. Whole Plant
  misc_feature: MA Experiment ID: 20000264 Result: Up-regulated in Transcription
  misc_feature: MA Experiment 20000264 PARAMETER Experiment Name: At_Open_Flower_P Parameter: Age (day) Value: 21
  misc_feature: MA Experiment 20000264 PARAMETER Experiment Name: At_Open_Flower_P Parameter: Plant Line Value: WS
  misc_feature: MA Experiment 20000264 PARAMETER Experiment Name: At_Open_Flower_P Parameter: Tissue Value: Open Flower vs. Whole Plant
  misc_feature: MA Experiment ID: 20000286 Result: Up-regulated in Transcription
  misc_feature: MA Experiment 20000286 PARAMETER Experiment Name: At_Open_Flower_P Parameter: Age (day) Value: 21
  misc_feature: MA Experiment 20000286 PARAMETER Experiment Name: At_Open_Flower_P Parameter: Plant Line Value: WS
  misc_feature: MA Experiment 20000286 PARAMETER Experiment Name: At_Open_Flower_P Parameter: Tissue Value: Half Open vs. Whole Plant
  misc_feature: MA Experiment ID: 20000437 Result: Down-regulated in Transcription
  misc_feature: MA Experiment 20000437 PARAMETER Experiment Name: At_Drought_P Parameter: Age (day) Value: 8
  misc_feature: MA Experiment 20000437 PARAMETER Experiment Name: At_Drought_P Parameter: Organism Value: A. thaliana
  misc_feature: MA Experiment 20000437 PARAMETER Experiment Name: At_Drought_P Parameter: Plant Line Value: WS
  misc_feature: MA Experiment 20000437 PARAMETER Experiment Name: At_Drought_P Parameter: Timepoint (hr) Value: 24
  misc_feature: MA Experiment 20000437 PARAMETER Experiment Name: At_Drought_P Parameter: Tissue Value: Whole Plant
  misc_feature: MA Experiment 20000437 PARAMETER Experiment Name: At_Drought_P Parameter: Treatment Value: Drought vs. No Drought
  misc_feature: MA Experiment ID: 20000439 Result: Up-regulated in Transcription
  misc_feature: MA Experiment 20000439 PARAMETER Experiment Name: At_Roots__P Parameter: Age (day) Value: 14 vs. 21
  misc_feature: MA Experiment 20000439 PARAMETER Experiment Name: At_Roots__P Parameter: Organism Value: A. thaliana
  misc_feature: MA Experiment 20000439 PARAMETER Experiment Name: At_Roots__P Parameter: Tissue Value: Roots vs. Whole Plant
  misc_feature: MA Experiment ID: 20000496 Result: Up-regulated in Transcription
  misc_feature: MA Experiment 20000496 PARAMETER Experiment Name: At_Guard_Cells_P Parameter: Harvest Date Value: 7/19/2002
  misc_feature: MA Experiment 20000496 PARAMETER Experiment Name: At_Guard_Cells_P Parameter: Organism Value: Canola
  misc_feature: MA Experiment 20000496 PARAMETER Experiment Name: At_Guard_Cells_P Parameter: Tissue Value: Guard Cells vs. Leaves
  misc_feature: MA Experiment ID: 20001450 Result: Down-regulated in Transcription
  misc_feature: MA Experiment 20001450 PARAMETER Experiment Name: At_Far-red-induction_P Parameter: Age (day) Value: 7
  misc_feature: MA Experiment 20001450 PARAMETER Experiment Name: At_Far-red-induction_P Parameter: Light Value: Far-red vs. White
  misc_feature: MA Experiment 20001450 PARAMETER Experiment Name: At_Far-red-induction_P Parameter: Organism Value: A. thaliana
  misc_feature: MA Experiment 20001450 PARAMETER Experiment Name: At_Far-red-induction_P Parameter: Plant Line Value: Columbia
  misc_feature: MA Experiment 20001450 PARAMETER Experiment Name: At_Far-red-induction_P Parameter: Timepoint (hr) Value: 8
  misc_feature: MA Experiment 20001450 PARAMETER Experiment Name: At_Far-red-induction_P Parameter: Tissue Value: Whole Plant
  misc_feature: MA Experiment ID: 20001451 Result: Down-regulated in Transcription
  misc_feature: MA Experiment 20001451 PARAMETER Experiment Name: At_Far-red-induction_P Parameter: Age (day) Value: 7
  misc_feature: MA Experiment 20001451 PARAMETER Experiment Name: At_Far-red-induction_P Parameter: Light Value: Far-red vs. White
  misc_feature: MA Experiment 20001451 PARAMETER Experiment Name: At_Far-red-induction_P Parameter: Organism Value: A. thaliana
  misc_feature: MA Experiment 20001451 PARAMETER Experiment Name: At_Far-red-induction_P Parameter: Plant Line Value: Columbia
  misc_feature: MA Experiment 20001451 PARAMETER Experiment Name: At_Far-red-induction_P Parameter: Timepoint (hr) Value: 24
  misc_feature: MA Experiment 20001451 PARAMETER Experiment Name: At_Far-red-induction_P Parameter: Tissue Value: Whole Plant
atgtttaagaaaaaggaagcgctctcaagtattccttttgacaagcgaaggaaggagacgcaaggtactggaagaagacaagtgctttcgacagtgaacagacaagatgcgaacagcgatgtgggaagcacagaggagtgtggtaaagttgagtttacaaaagatgaagtgttggctttgcttaacgagagagctaaagctggaaaatttgataccaagggtaagattgagcaaatgacggatattatcaagaagcttaaggtctgtgttagatggtaccaacaagtggatgaaactcatgttcaagacaaggaaaatctttcttcttctcttcaatctgcagagaaaagatacagtgataaagagttggatgcaaagaccaaagaggaagagctacgagcaactataacagagatgaaggagaacatagaatcacttcaggaaaagctgtccaaggagaagttgagtaaactggatgcaattgaaaatcacagaagagaaaaagattgtagagttgtagctgagaagcttcaggtttctctcagagaagagcttgacaaagttaaagaggaaaaaatggctgcgaagcagaaggtgacgtctctagaagatatgtacaagaggctgcaagagtacaacacaagtttgcaacaatataacaccaaactccagactgatcttgaagtagctagagaggctcacactcgtgctgaaaaagaaaagtcaagtatactggagaatcttactacactaagaggtcacagtaaatcactacaagatcaattagcatcgagccgggtttcacaagatgaagcggtaaaacaaaaggattcattgctgatggaagttaataaccttcaaagcgagctgcaacaagtccgtgatgatcgtgatcgccatgttgtacagtcacaaaagctggctggtgagatactgatgtataaggagagtgttggaaagtcatctcatgagttggacattcttatagccaaatcaggatctttagaggaaacatgttcgttgcaaaaagagcgtattaaaatgttggagcaggaattagcttttgctaaggaaaagcttaagatggtggatttatctatgtctcatacaatgacagaatttgaggagcagaaacaatgtatgcatgaactgcaagatcgccttgcagacacggagcgtcaactttttgaaggagagttattaaagaaaaagcttcataacaccattcttgaactcaaaggaaacatacgcgtgttctgccgagtgcgccccttgctaccagatgatggaggacgccaagaggccagtgttattgcctatcctacatcaactgaatctcttggtagaggcattgatgtggtccaaagtggtaacaaacatcctttcactttcgacaaggtcttcgaccacggagcttctcaggaggaagtattctttgaaatatctcaacttgtgcagagcgcattggatggctacaaggtttgtatttttgcctacggtcagacaggttctggcaaaacctataccatgatgggcaggcctgaaacaccagaacagaaaggactgatccctcgatcactcgaacaaatattcaaaaccagccaaagtcttagtacacaaggctggaaatacaagatgcaggtctcaatgttggagatatataatgagtccatcagagacttgttgtctacaagccgaacgattgctatagaatctgtgcgggcagacagtagcacatctggaagacaatatacaatcacacatgatgttaatggaaacactcatgttagcgacctgacaatagtagatgtatgcagcattggacaaatttcctcacttttgcaacaagctgctcagagcaggtctgttgggaagacgcatatgaatgaacaatcatcaagaagtcatttcgtgtttactcttaggatttctggtgtgaatgagagcactgaacagcaagtacaaggtgttcttaacctaattgatcttgctggaagtgagcgactttcaaggagcggggcaaccggagaccggttaaaggagacacaggctataaacaaaagcttgtctgcattgagtgatgttatatttgcattggcaaagaaagaggatcatgtacctttcagaaactcaaagttaacatatctgctccagccatgtttaggaggggactcaaagaccttaatgtttgtgaacatatcacctgatccatcttcaactggagagtctctatgctctcttcggtttgctgctagagttaatgcatgtgagattggaatacctcgcagacaaacttccgcaaaactcctcgactctcgcctaagttacggttaa

SEQ ID NO: 48219 - protein, 777 aa, Arabidopsis thaliana
  peptide (1)..(777): Ceres Seq. ID no. 13649886
  misc_feature (29)..(413): Pfam Name: Myosin tail Pfam Description: Myosin tail
  misc_feature (238)..(764): Homolog of NCBI NO: 3133267 NR Description: kinesin-related protein K2 [Dictyostelium
  misc_feature (485)..(761): Homolog of NCBI NO: 15208463 NR Description: kinesin heavy chain [Zea mays]
  misc_feature (411)..(765): Homolog of NCBI NO: 15208457 NR Description: kinesin heavy chain [Zea mays]
  misc_feature (411)..(770): Homolog of NCBI NO: 31193926 NR Description: putative kinesin heavy chain, 5'-partial
  misc_feature (4)..(381): Homolog of NCBI NO: 4455160 NR Description: kinesin-related protein katA (fragment)
  misc_feature (115)..(770): Homolog of NCBI NO: 34915504 NR Description: putative kinesin-related protein katA
  misc_feature (118)..(777): Homolog of NCBI NO: 10176794 NR Description: kinesin-like protein [Arabidopsis thaliana]
  misc_feature (35)..(777): Homolog of NCBI NO: 7446304 NR Description: kinesin-related protein katB - Arabidopsis
  misc_feature (38)..(777): Homolog of NCBI NO: 18423656 NR Description: kinesin-like protein C (katC) [Arabidopsis
  misc_feature (35)..(777): Homolog of NCBI NO: 18416938 NR Description: kinesin-like protein B (katB) [Arabidopsis
MFKKKEALSSIPFDKRRKETQGTGRRQVLSTVNRQDANSDVGSTEECGKVEFTKDEVLALLNERAKAGKFDTKGKIEQMTDIIKKLKVCVRWYQQVDETHVQDKENLSSSLQSAEKRYSDKELDAKTKEEELRATITEMKENIESLQEKLSKEKLSKLDAIENHRREKDCRVVAEKLQVSLREELDKVKEEKMAAKQKVTSLEDMYKRLQEYNTSLQQYNTKLQTDLEVAREAHTRAEKEKSSILENLTTLRGHSKSLQDQLASSRVSQDEAVKQKDSLLMEVNNLQSELQQVRDDRDRHVVQSQKLAGEILMYKESVGKSSHELDILIAKSGSLEETCSLQKERIKMLEQELAFAKEKLKMVDLSMSHTMTEFEEQKQCMHELQDRLADTERQLFEGELLKKKLHNTILELKGNIRVFCRVRPLLPDDGGRQEASVIAYPTSTESLGRGIDVVQSGNKHPFTFDKVFDHGASQEEVFFEISQLVQSALDGYKVCIFAYGQTGSGKTYTMMGRPETPEQKGLIPRSLEQIFKTSQSLSTQGWKYKMQVSMLEIYNESIRDLLSTSRTIAIESVRADSSTSGRQYTITHDVNGNTHVSDLTIVDVCSIGQISSLLQQAAQSRSVGKTHMNEQSSRSHFVFTLRISGVNESTEQQVQGVLNLIDLAGSERLSRSGATGDRLKETQAINKSLSALSDVIFALAKKEDHVPFRNSKLTYLLQPCLGGDSKTLMFVNISPDPSSTGESLCSLRFAARVNACEIGIPRRQTSAKLLDSRLSYG

SEQ ID NO: 48220 - protein, 699 aa, Arabidopsis thaliana
  peptide (1)..(699): Ceres Seq. ID no. 13649887
  misc_feature (1)..(335): Pfam Name: Myosin tail Pfam Description: Myosin tail
  misc_feature (160)..(686): Homolog of NCBI NO: 3133267 NR Description: kinesin-related protein K2 [Dictyostelium
  misc_feature (407)..(683): Homolog of NCBI NO: 15208463 NR Description: kinesin heavy chain [Zea mays]
  misc_feature (333)..(687): Homolog of NCBI NO: 15208457 NR Description: kinesin heavy chain [Zea mays]
  misc_feature (333)..(692): Homolog of NCBI NO: 31193926 NR Description: putative kinesin heavy chain, 5'-partial
  misc_feature (1)..(303): Homolog of NCBI NO: 4455160 NR Description: kinesin-related protein katA (fragment)
  misc_feature (37)..(692): Homolog of NCBI NO: 34915504 NR Description: putative kinesin-related protein katA
  misc_feature (40)..(699): Homolog of NCBI NO: 10176794 NR Description: kinesin-like protein [Arabidopsis thaliana]
  misc_feature (1)..(699): Homolog of NCBI NO: 7446304 NR Description: kinesin-related protein katB - Arabidopsis
  misc_feature (1)..(699): Homolog of NCBI NO: 18423656 NR Description: kinesin-like protein C (katC) [Arabidopsis
  misc_feature (1)..(699): Homolog of NCBI NO: 18416938 NR Description: kinesin-like protein B (katB) [Arabidopsis
MTDIIKKLKVCVRWYQQVDETHVQDKENLSSSLQSAEKRYSDKELDAKTKEEELRATITEMKENIESLQEKLSKEKLSKLDAIENHRREKDCRVVAEKLQVSLREELDKVKEEKMAAKQKVTSLEDMYKRLQEYNTSLQQYNTKLQTDLEVAREAHTRAEKEKSSILENLTTLRGHSKSLQDQLASSRVSQDEAVKQKDSLLMEVNNLQSELQQVRDDRDRHVVQSQKLAGEILMYKESVGKSSHELDILIAKSGSLEETCSLQKERIKMLEQELAFAKEKLKMVDLSMSHTMTEFEEQKQCMHELQDRLADTERQLFEGELLKKKLHNTILELKGNIRVFCRVRPLLPDDGGRQEASVIAYPTSTESLGRGIDVVQSGNKHPFTFDKVFDHGASQEEVFFEISQLVQSALDGYKVCIFAYGQTGSGKTYTMMGRPETPEQKGLIPRSLEQIFKTSQSLSTQGWKYKMQVSMLEIYNESIRDLLSTSRTIAIESVRADSSTSGRQYTITHDVNGNTHVSDLTIVDVCSIGQISSLLQQAAQSRSVGKTHMNEQSSRSHFVFTLRISGVNESTEQQVQGVLNLIDLAGSERLSRSGATGDRLKETQAINKSLSALSDVIFALAKKEDHVPFRNSKLTYLLQPCLGGDSKTLMFVNISPDPSSTGESLCSLRFAARVNACEIGIPRRQTSAKLLDSRLSYG

SEQ ID NO: 48221 - protein, 639 aa, Arabidopsis thaliana
  peptide (1)..(639): Ceres Seq. ID no. 13649888
  misc_feature (1)..(275): Pfam Name: Myosin tail Pfam Description: Myosin tail
  misc_feature (100)..(626): Homolog of NCBI NO: 3133267 NR Description: kinesin-related protein K2 [Dictyostelium
  misc_feature (347)..(623): Homolog of NCBI NO: 15208463 NR Description: kinesin heavy chain [Zea mays]
  misc_feature (273)..(627): Homolog of NCBI NO: 15208457 NR Description: kinesin heavy chain [Zea mays]
  misc_feature (273)..(632): Homolog of NCBI NO: 31193926 NR Description: putative kinesin heavy chain, 5'-partial
  misc_feature (1)..(243): Homolog of NCBI NO: 4455160 NR Description: kinesin-related protein katA (fragment)
  misc_feature (1)..(632): Homolog of NCBI NO: 34915504 NR Description: putative kinesin-related protein katA
  misc_feature (1)..(639): Homolog of NCBI NO: 10176794 NR Description: kinesin-like protein [Arabidopsis thaliana]
  misc_feature (1)..(639): Homolog of NCBI NO: 7446304 NR Description: kinesin-related protein katB - Arabidopsis
  misc_feature (1)..(639): Homolog of NCBI NO: 18423656 NR Description: kinesin-like protein C (katC) [Arabidopsis
  misc_feature (1)..(639): Homolog of NCBI NO: 18416938 NR Description: kinesin-like protein B (katB) [Arabidopsis
MKENIESLQEKLSKEKLSKLDAIENHRREKDCRVVAEKLQVSLREELDKVKEEKMAAKQKVTSLEDMYKRLQEYNTSLQQYNTKLQTDLEVAREAHTRAEKEKSSILENLTTLRGHSKSLQDQLASSRVSQDEAVKQKDSLLMEVNNLQSELQQVRDDRDRHVVQSQKLAGEILMYKESVGKSSHELDILIAKSGSLEETCSLQKERIKMLEQELAFAKEKLKMVDLSMSHTMTEFEEQKQCMHELQDRLADTERQLFEGELLKKKLHNTILELKGNIRVFCRVRPLLPDDGGRQEASVIAYPTSTESLGRGIDVVQSGNKHPFTFDKVFDHGASQEEVFFEISQLVQSALDGYKVCIFAYGQTGSGKTYTMMGRPETPEQKGLIPRSLEQIFKTSQSLSTQGWKYKMQVSMLEIYNESIRDLLSTSRTIAIESVRADSSTSGRQYTITHDVNGNTHVSDLTIVDVCSIGQISSLLQQAAQSRSVGKTHMNEQSSRSHFVFTLRISGVNESTEQQVQGVLNLIDLAGSERLSRSGATGDRLKETQAINKSLSALSDVIFALAKKEDHVPFRNSKLTYLLQPCLGGDSKTLMFVNISPDPSSTGESLCSLRFAARVNACEIGIPRRQTSAKLLDSRLSYG

SEQ ID NO: 48222 - DNA, 1065 bp, Arabidopsis thaliana
  misc_feature (1)..(1065): Ceres Seq. ID no. 13649889
  misc_feature: MA Experiment ID: 108434 Result: Down-regulated in Transcription
  misc_feature: MA Experiment 108434 PARAMETER Experiment Name: At_Root_Tips_cDNA_P Parameter: Tissue Value: Root Tips
  misc_feature: MA Experiment ID: 108464 Result: Up-regulated in Transcription
  misc_feature: MA Experiment 108464 PARAMETER Experiment Name: At_Germinating_Seeds_cDNA_P Parameter: Age (day) Value: 4 vs. 0
  misc_feature: MA Experiment 108464 PARAMETER Experiment Name: At_Germinating_Seeds_cDNA_P Parameter: Tissue Value: Germinating Seeds
  misc_feature: MA Experiment ID: 108488 Result: Down-regulated in Transcription
  misc_feature: MA Experiment ID: 108561 Result: Up-regulated in Transcription
  misc_feature: MA Experiment 108561 PARAMETER Experiment Name: At_100uM_ABA_cDNA_P Parameter: Timepoint (hr) Value: 6
  misc_feature: MA Experiment 108561 PARAMETER Experiment Name: At_100uM_ABA_cDNA_P Parameter: Tissue Value: Aerial
  misc_feature: MA Experiment 108561 PARAMETER Experiment Name: At_100uM_ABA_cDNA_P Parameter: Treatment Value: 100uM ABA vs. No Treatment
  misc_feature: MA Experiment ID: 108573 Result: Up-regulated in Transcription
  misc_feature: MA Experiment 108573 PARAMETER Experiment Name: At_Drought_cDNA_P Parameter: Timepoint (hr) Value: 6
  misc_feature: MA Experiment 108573 PARAMETER Experiment Name: At_Drought_cDNA_P Parameter: Tissue Value: Aerial
  misc_feature: MA Experiment 108573 PARAMETER Experiment Name: At_Drought_cDNA_P Parameter: Treatment Value: Drought vs. No Drought
  misc_feature: MA Experiment ID: 108579 Result: Up-regulated in Transcription
  misc_feature: MA Experiment 108579 PARAMETER Experiment Name: At_4deg_Cold_cDNA_P Parameter: Temperature (deg C) Value: 4 vs. 22
  misc_feature: MA Experiment 108579 PARAMETER Experiment Name: At_4deg_Cold_cDNA_P Parameter: Timepoint (hr) Value: 6
  misc_feature: MA Experiment 108579 PARAMETER Experiment Name: At_4deg_Cold_cDNA_P Parameter: Tissue Value: Aerial
  misc_feature: MA Experiment ID: 108585 Result: Up-regulated in Transcription
  misc_feature: MA Experiment 108585 PARAMETER Experiment Name: At_5mM_NaNP_cDNA_P Parameter: Timepoint (hr) Value: 6
  misc_feature: MA Experiment 108585 PARAMETER Experiment Name: At_5mM_NaNP_cDNA_P Parameter: Tissue Value: Aerial
  misc_feature: MA Experiment 108585 PARAMETER Experiment Name: At_5mM_NaNP_cDNA_P Parameter: Treatment Value: null
  misc_feature: MA Experiment ID: 108595 Result: Up-regulated in Transcription
  misc_feature: MA Experiment 108595 PARAMETER Experiment Name: At_Ler-pi_Ovule_cDNA_P Parameter: Plant Line Value: null
  misc_feature: MA Experiment ID: 108605 Result: Up-regulated in Transcription
  misc_feature: MA Experiment 108605 PARAMETER Experiment Name: At_100uM_ABA_cDNA_P Parameter: Timepoint (hr) Value: 6
  misc_feature: MA Experiment 108605 PARAMETER Experiment Name: At_100uM_ABA_cDNA_P Parameter: Tissue Value: Aerial
  misc_feature: MA Experiment 108605 PARAMETER Experiment Name: At_100uM_ABA_cDNA_P Parameter: Treatment Value: 100uM ABA vs. No Treatment
  misc_feature: MA Experiment ID: 108607 Result: Up-regulated in Transcription
  misc_feature: MA Experiment 108607 PARAMETER Experiment Name: At_100uM_ABA_cDNA_P Parameter: Timepoint (hr) Value: 4
  misc_feature: MA Experiment 108607 PARAMETER Experiment Name: At_100uM_ABA_cDNA_P Parameter: Tissue Value: Aerial
  misc_feature: MA Experiment 108607 PARAMETER Experiment Name: At_100uM_ABA_cDNA_P Parameter: Treatment Value: 100uM ABA vs. No Treatment
  misc_feature: MA Experiment ID: 108668 Result: Up-regulated in Transcription
  misc_feature: MA Experiment 108668 PARAMETER Experiment Name: At_2mM_SA_cDNA_P Parameter: Plant Line Value: WS
  misc_feature: MA Experiment 108668 PARAMETER Experiment Name: At_2mM_SA_cDNA_P Parameter: Timepoint (hr) Value: 6
  misc_feature: MA Experiment 108668 PARAMETER Experiment Name: At_2mM_SA_cDNA_P Parameter: Treatment Value: 2mM SA vs. No Treatment
  misc_feature: MA Experiment ID: 20000089 Result: Down-regulated in Transcription
  misc_feature: MA Experiment ID: 20000144 Result: Down-regulated in Transcription
  misc_feature: MA Experiment 20000144 PARAMETER Experiment Name: At_42deg_Heat_cDNA_P Parameter: Temperature (deg C) Value: 42 vs. 22
  misc_feature: MA Experiment 20000144 PARAMETER Experiment Name: At_42deg_Heat_cDNA_P Parameter: Timepoint (hr) Value: 1
  misc_feature: MA Experiment 20000144 PARAMETER Experiment Name: At_42deg_Heat_cDNA_P Parameter: Tissue Value: Aerial
  misc_feature: MA Experiment ID: 20000171 Result: Down-regulated in Transcription
  misc_feature: MA Experiment 20000171 PARAMETER Experiment Name: At_42deg_Heat_P Parameter: Age (day) Value: 14
  misc_feature: MA Experiment 20000171 PARAMETER Experiment Name: At_42deg_Heat_P Parameter: Organism Value: A. thaliana
  misc_feature: MA Experiment 20000171 PARAMETER Experiment Name: At_42deg_Heat_P Parameter: Plant Line Value: WS
  misc_feature: MA Experiment 20000171 PARAMETER Experiment Name: At_42deg_Heat_P Parameter: Temperature (deg C) Value: 42 vs. 22
  misc_feature: MA Experiment 20000171 PARAMETER Experiment Name: At_42deg_Heat_P Parameter: Timepoint (hr) Value: 1
  misc_feature: MA Experiment 20000171 PARAMETER Experiment Name: At_42deg_Heat_P Parameter: Tissue Value: Aerial
  misc_feature: MA Experiment ID: 20000182 Result: Up-regulated in Transcription
  misc_feature: MA Experiment 20000182 PARAMETER Experiment Name: At_2mM_SA_P Parameter: Age (day) Value: 14
  misc_feature: MA Experiment 20000182 PARAMETER Experiment Name: At_2mM_SA_P Parameter: Organism Value: A. thaliana
  misc_feature: MA Experiment 20000182 PARAMETER Experiment Name: At_2mM_SA_P Parameter: Plant Line Value: WS
  misc_feature: MA Experiment 20000182 PARAMETER Experiment Name: At_2mM_SA_P Parameter: Timepoint (hr) Value: 6
  misc_feature: MA Experiment 20000182 PARAMETER Experiment Name: At_2mM_SA_P Parameter: Tissue Value: Aerial
  misc_feature: MA Experiment 20000182 PARAMETER Experiment Name: At_2mM_SA_P Parameter: Treatment Value: 2mM SA vs. No Treatment
  misc_feature: MA Experiment ID: 20000224 Result: Down-regulated in Transcription
  misc_feature: MA Experiment ID: 20000234 Result: Down-regulated in Transcription
  misc_feature: MA Experiment 20000234 PARAMETER Experiment Name: At_Siliques_P Parameter: Age (day) Value: 21
  misc_feature: MA Experiment 20000234 PARAMETER Experiment Name: At_Siliques_P Parameter: Organism Value: A. thaliana
  misc_feature: MA Experiment 20000234 PARAMETER Experiment Name: At_Siliques_P Parameter: Plant Line Value: WS
  misc_feature: MA Experiment 20000234 PARAMETER Experiment Name: At_Siliques_P Parameter: Tissue Value: Less Than 5mm Siliques vs. Whole Plant
  misc_feature: MA Experiment ID: 20000235 Result: Down-regulated in Transcription
  misc_feature: MA Experiment 20000235 PARAMETER Experiment Name: At_Siliques_P Parameter: Age (day) Value: 21
  misc_feature: MA Experiment 20000235 PARAMETER Experiment Name: At_Siliques_P Parameter: Organism Value: A. thaliana
  misc_feature: MA Experiment 20000235 PARAMETER Experiment Name: At_Siliques_P Parameter: Plant Line Value: WS
  misc_feature: MA Experiment 20000235 PARAMETER Experiment Name: At_Siliques_P Parameter: Tissue Value: 5-10mm Siliques vs. Whole Plant
  misc_feature: MA Experiment ID: 20000265 Result: Down-regulated in Transcription
  misc_feature: MA Experiment 20000265 PARAMETER Experiment Name: At_Open_Flower_P Parameter: Age (day) Value: 21
  misc_feature: MA Experiment 20000265 PARAMETER Experiment Name: At_Open_Flower_P Parameter: Plant Line Value: WS
  misc_feature: MA Experiment 20000265 PARAMETER Experiment Name: At_Open_Flower_P Parameter: Tissue Value: Closed Flower vs. Whole Plant
  misc_feature: MA Experiment ID: 20000436 Result: Up-regulated in Transcription
  misc_feature: MA Experiment 20000436 PARAMETER Experiment Name: At_Drought_P Parameter: Age (day) Value: 7
  misc_feature: MA Experiment 20000436 PARAMETER Experiment Name: At_Drought_P Parameter: Organism Value: A. thaliana
  misc_feature: MA Experiment 20000436 PARAMETER Experiment Name: At_Drought_P Parameter: Plant Line Value: WS
  misc_feature: MA Experiment 20000436 PARAMETER Experiment Name: At_Drought_P Parameter: Timepoint (hr) Value: 12
  misc_feature: MA Experiment 20000436 PARAMETER Experiment Name: At_Drought_P Parameter: Tissue Value: Whole Plant
  misc_feature: MA Experiment 20000436 PARAMETER Experiment Name: At_Drought_P Parameter: Treatment Value: Drought vs. No Drought
  misc_feature: MA Experiment ID: 20000438 Result: Down-regulated in Transcription
  misc_feature: MA Experiment 20000438 PARAMETER Experiment Name: At_Shoots__P Parameter: Age (day) Value: 14
  misc_feature: MA Experiment 20000438 PARAMETER Experiment Name: At_Shoots__P Parameter: Tissue Value: Shoots vs. Whole Plant
  misc_feature: MA Experiment ID: 20000460 Result: Up-regulated in Transcription
  misc_feature: MA Experiment 20000460 PARAMETER Experiment Name: At_10percent_PEG_P Parameter: Age (day) Value: 12
  misc_feature: MA Experiment 20000460 PARAMETER Experiment Name: At_10percent_PEG_P Parameter: Organism Value: A. thaliana
  misc_feature: MA Experiment 20000460 PARAMETER Experiment Name: At_10percent_PEG_P Parameter: Plant Line Value: WS
  misc_feature: MA Experiment 20000460 PARAMETER Experiment Name: At_10percent_PEG_P Parameter: Timepoint (day) Value: 12
  misc_feature: MA Experiment 20000460 PARAMETER Experiment Name: At_10percent_PEG_P Parameter: Tissue Value: Whole Plant
  misc_feature: MA Experiment 20000460 PARAMETER Experiment Name: At_10percent_PEG_P Parameter: Treatment Value: 10percent PEG vs. No Treatment
  misc_feature: MA Experiment ID: 20000495 Result: Down-regulated in Transcription
  misc_feature: MA Experiment 20000495 PARAMETER Experiment Name: At_Guard_Cells_P Parameter: Harvest Date Value: 8/2/2002
  misc_feature: MA Experiment 20000495 PARAMETER Experiment Name: At_Guard_Cells_P Parameter: Organism Value: A. thaliana
  misc_feature: MA Experiment 20000495 PARAMETER Experiment Name: At_Guard_Cells_P Parameter: Tissue Value: Guard Cells vs. Leaves
  misc_feature: MA Experiment ID: 20001247 Result: Up-regulated in Transcription
  misc_feature: MA Experiment 20001247 PARAMETER Experiment Name: At_Far-red-induction_P Parameter: Age (day) Value: 7
  misc_feature: MA Experiment 20001247 PARAMETER Experiment Name: At_Far-red-induction_P Parameter: Light Value: Far-red vs. White
  misc_feature: MA Experiment 20001247 PARAMETER Experiment Name: At_Far-red-induction_P Parameter: Organism Value: A. thaliana
  misc_feature: MA Experiment 20001247 PARAMETER Experiment Name: At_Far-red-induction_P Parameter: Plant Line Value: Columbia
  misc_feature: MA Experiment 20001247 PARAMETER Experiment Name: At_Far-red-induction_P Parameter: Timepoint (hr) Value: 1
  misc_feature: MA Experiment 20001247 PARAMETER Experiment Name: At_Far-red-induction_P Parameter: Tissue Value: Whole Plant
  misc_feature: MA Experiment ID: 20001451 Result: Up-regulated in Transcription
  misc_feature: MA Experiment 20001451 PARAMETER Experiment Name: At_Far-red-induction_P Parameter: Age (day) Value: 7
  misc_feature: MA Experiment 20001451 PARAMETER Experiment Name: At_Far-red-induction_P Parameter: Light Value: Far-red vs. White
  misc_feature: MA Experiment 20001451 PARAMETER Experiment Name: At_Far-red-induction_P Parameter: Organism Value: A. thaliana
  misc_feature: MA Experiment 20001451 PARAMETER Experiment Name: At_Far-red-induction_P Parameter: Plant Line Value: Columbia
  misc_feature: MA Experiment 20001451 PARAMETER Experiment Name: At_Far-red-induction_P Parameter: Timepoint (hr) Value: 24
  misc_feature: MA Experiment 20001451 PARAMETER Experiment Name: At_Far-red-induction_P Parameter: Tissue Value: Whole Plant
  misc_feature: MA Experiment ID: 20001905 Result: Up-regulated in Transcription
  misc_feature: MA Experiment 20001905 PARAMETER Experiment Name: At_Drought_Reproduction_P Parameter: Age (day) Value: 40
  misc_feature: MA Experiment 20001905 PARAMETER Experiment Name: At_Drought_Reproduction_P Parameter: Organism Value: A. thaliana
  misc_feature: MA Experiment 20001905 PARAMETER Experiment Name: At_Drought_Reproduction_P Parameter: Plant Line Value: WS
  misc_feature: MA Experiment 20001905 PARAMETER Experiment Name: At_Drought_Reproduction_P Parameter: Timepoint (day) Value: 10
  misc_feature: MA Experiment 20001905 PARAMETER Experiment Name: At_Drought_Reproduction_P Parameter: Tissue Value: Rosettes
  misc_feature: MA Experiment 20001905 PARAMETER Experiment Name: At_Drought_Reproduction_P Parameter: Treatment Value: Drought vs. No Drought
ggttgtttccttcttcttcttcttctttctctttcttatatcttttttctcttcccaattttctcatcgatcactgaatcttcttcttcttcttcttcctcctcttctccttctttttctctcctctctcaaaaacagattttttttaaacgagcttgatcaataaattctctcaagatctatggcggaagagcatcgatgtcagacaccagaaagcaaccgtctctgtgttaacaactgtggcttcctcggcagctccgccaccatgaatctctgttctaattgttacggcgatctttgtctcaaacaacaacaacaatcctcctccatcaaatccaccgttgaatcttccctctctgtatctcctccgtcgtcatcatcatcggagatctcttctccgatcatccctcctctccttaaaaatccatcagtcaagctagaggtaccggagaaaaaggcggtgatttcgctgccgacgacggagcagaatcagcaacagaggccgaatcggtgcacgacgtgtaggaaacgggtcgggttaaccggattcaagtgccggtgcggtacgatgttttgcggggttcataggtacccggagatccatggatgcagctacgatttcaaatcggccggacgtgaagagatcgcgaaagcgaatccgttggtgaaagcagcgaagcttcagaagatatgatcagagccgttcgatgcgttgacttttcctctcgtaagtcttcatttctacgcgtatgtgtgtcctccgtcccccgagaaatacggatggtgtcgatttgattgatctcagccgttggatcaaaaatggtttattattgtaaaagattgattatgtatttatcaaagggacacgtgtcacgtggttttaggatggagacgctttcgctttttctccttcattttattttctttttcctttcagaaagaaataagattattcgcgttggctttttctttttattaaattccggcttattattattattattgtgtggcttttgcgtgtacaaagtctattcagaaaaataaaaaaaatgatattaatttccc

SEQ ID NO: 48223 - protein, 170 aa, Arabidopsis thaliana
  peptide (1)..(170): Ceres Seq. ID no. 15219596
  misc_feature (111)..(151): Pfam Name: AN1-like Zinc finger Pfam Description: AN1-like Zinc finger
  misc_feature (3)..(170): Homolog of NCBI NO: 11361253 NR Description: hypothetical protein p85RF [imported] - Prunus
  misc_feature (10)..(170): Homolog of NCBI NO: 15234402 NR Description: expressed protein [Arabidopsis thaliana]
  misc_feature (14)..(169): Homolog of NCBI NO: 15235819 NR Description: zinc finger -related protein [Arabidopsis
  misc_feature (4)..(170): Homolog of NCBI NO: 35187687 NR Description: zinc-finger protein [Oryza sativa (indica
  misc_feature (7)..(170): Homolog of NCBI NO: 25082726 NR Description: expressed protein [Arabidopsis thaliana]
  misc_feature (7)..(170): Homolog of NCBI NO: 18403408 NR Description: expressed protein [Arabidopsis thaliana]
  misc_feature (1)..(170): Homolog of NCBI NO: 15225894 NR Description: zinc finger protein -related [Arabidopsis
  misc_feature (1)..(170): Homolog of NCBI NO: 18404102 NR Description: expressed protein [Arabidopsis thaliana]
  misc_feature (1)..(170): Homolog of NCBI NO: 14596167 NR Description: zinc finger-like protein [Arabidopsis thaliana]
  misc_feature (1)..(170): Homolog of NCBI NO: 15231686 NR Description: zinc finger - like protein [Arabidopsis thaliana]
MAEEHRCQTPESNRLCVNNCGFLGSSATMNLCSNCYGDLCLKQQQQSSSIKSTVESSLSVSPPSSSSSEISSPIIPPLLKNPSVKLEVPEKKAVISLPTTEQNQQQRPNRCTTCRKRVGLTGFKCRCGTMFCGVHRYPEIHGCSYDFKSAGREEIAKANPLVKAAKLQKI

SEQ ID NO: 48224 - protein, 142 aa, Arabidopsis thaliana; identical to SEQ ID NO: 29088
  peptide (1)..(142): Ceres Seq. ID no. 15219597
  misc_feature (83)..(123): Pfam Name: AN1-like Zinc finger Pfam Description: AN1-like Zinc finger
  misc_feature (1)..(142): Homolog of NCBI NO: 11361253 NR Description: hypothetical protein p85RF [imported] - Prunus
  misc_feature (1)..(142): Homolog of NCBI NO: 15234402 NR Description: expressed protein [Arabidopsis thaliana]
  misc_feature (1)..(141): Homolog of NCBI NO: 15235819 NR Description: zinc finger -related protein [Arabidopsis
  misc_feature (1)..(142): Homolog of NCBI NO: 35187687 NR Description: zinc-finger protein [Oryza sativa (indica
  misc_feature (1)..(142): Homolog of NCBI NO: 25082726 NR Description: expressed protein [Arabidopsis thaliana]
  misc_feature (1)..(142): Homolog of NCBI NO: 18403408 NR Description: expressed protein [Arabidopsis thaliana]
  misc_feature (1)..(142): Homolog of NCBI NO: 15225894 NR Description: zinc finger protein -related [Arabidopsis
  misc_feature (1)..(142): Homolog of NCBI NO: 18404102 NR Description: expressed protein [Arabidopsis thaliana]
  misc_feature (1)..(142): Homolog of NCBI NO: 14596167 NR Description: zinc finger-like protein [Arabidopsis thaliana]
  misc_feature (1)..(142): Homolog of NCBI NO: 15231686 NR Description: zinc finger - like protein [Arabidopsis thaliana]

SEQ ID NO: 48225 - DNA, 1108 bp, Arabidopsis thaliana
  misc_feature (1)..(1108): Ceres Seq. ID no. 13648877
  misc_feature: MA Experiment ID: 20000185 Result: Up-regulated in Transcription
  misc_feature: MA Experiment 20000185 PARAMETER Experiment Name: At_Roots__P Parameter: Age (day) Value: 7 vs. 21
  misc_feature: MA Experiment 20000185 PARAMETER Experiment Name: At_Roots__P Parameter: Organism Value: A. thaliana
  misc_feature: MA Experiment 20000185 PARAMETER Experiment Name: At_Roots__P Parameter: Tissue Value: Roots vs. Whole Plant
  misc_feature: MA Experiment ID: 20000437 Result: Down-regulated in Transcription
  misc_feature: MA Experiment 20000437 PARAMETER Experiment Name: At_Drought_P Parameter: Age (day) Value: 8
  misc_feature: MA Experiment 20000437 PARAMETER Experiment Name: At_Drought_P Parameter: Organism Value: A. thaliana
  misc_feature: MA Experiment 20000437 PARAMETER Experiment Name: At_Drought_P Parameter: Plant Line Value: WS
  misc_feature: MA Experiment 20000437 PARAMETER Experiment Name: At_Drought_P Parameter: Timepoint (hr) Value: 24
  misc_feature: MA Experiment 20000437 PARAMETER Experiment Name: At_Drought_P Parameter: Tissue Value: Whole Plant
  misc_feature: MA Experiment 20000437 PARAMETER Experiment Name: At_Drought_P Parameter: Treatment Value: Drought vs. No Drought
  misc_feature: MA Experiment ID: 20000439 Result: Up-regulated in Transcription
  misc_feature: MA Experiment 20000439 PARAMETER Experiment Name: At_Roots__P Parameter: Age (day) Value: 14 vs. 21
  misc_feature: MA Experiment 20000439 PARAMETER Experiment Name: At_Roots__P Parameter: Organism Value: A. thaliana
  misc_feature: MA Experiment 20000439 PARAMETER Experiment Name: At_Roots__P Parameter: Tissue Value: Roots vs. Whole Plant
  misc_feature: MA Experiment ID: 20000451 Result: Down-regulated in Transcription
  misc_feature: MA Experiment 20000451 PARAMETER Experiment Name: At_CS6879_Shoots-Roots_P Parameter: Age (day) Value: 14
  misc_feature: MA Experiment 20000451 PARAMETER Experiment Name: At_CS6879_Shoots-Roots_P Parameter: Organism Value: A. thaliana
  misc_feature: MA Experiment 20000451 PARAMETER Experiment Name: At_CS6879_Shoots-Roots_P Parameter: Plant Line Value: CS6879 vs. WS
  misc_feature: MA Experiment 20000451 PARAMETER Experiment Name: At_CS6879_Shoots-Roots_P Parameter: Tissue Value: Roots
gatatacaaaaggaagaaacacttaaaagaaaatatcaaatctaaagtcgatcacatggctaataagagtttagagattcggtttttatttccacttgttttgtttttggttgtgaaattactttgtgttgatggtaaaggattcaataataatggccataagataagaaaaggaagatgggaaggtaagctgaagatgaacttctatcacaatagctgccctggagccgaggatatcgtgaggcagatagtgtggaagaaagtcgaagcaaaccgtagcctggctcccaagttactgagggttcattaccatgactgctttgttagggggtgcgacgcatcgctgcttttagattcggttgctggaaaagcagtgtccgagaaggaagcgagacctaatctctcgctttccgggtttgaaatcatcgatgagatcaagtatattctcgaaaaacgatgccctaacaccgtctcttgcgctgacattctcactttagccgcccgagatgccgtctcttatgaatttgaacggccgctatggaatgtgtttaccggacgtgttgatggaagagtttcattggcaacggaggcggccagagacttaccatccgctggggcaaacttcaccactctacagaaactctttgccgagagcgatttggacgtcgttgacctcgtcgctttatcaggagcacacacgataggaatagcacattgcggtgtgtttggcagaaggctcttgaacttcaccggaaaaggggacacagatccttccctaaaccctagttacgcctccttcctcaaatccgaatgctccgacaaatctttaagactcaacccttccgcagtggtcggaatggaccctactggtcctctcgcctttgacagtggctacttcgtctctctactcaagaacaaaggactcttcacctccgacgccgccttgttgactgatccctccgccgctcacattgctagtgttttccaaaactccggcgcttttcttgctcagtttggtcggtccatgataaagatgagttccatcaaagtccttactcttggagatcaaggtggtgagattcgtaaaaattgtcgcctcgtcaactga

SEQ ID NO: 48226 - protein, 368 aa, Arabidopsis thaliana
  peptide (1)..(368): Ceres Seq. ID no. 13648878
  misc_feature (80)..(331): Pfam Name: Peroxidase Pfam Description: Peroxidase
  misc_feature (65)..(368): Homolog of NCBI NO: 7433066 NR Description: peroxidase (EC 1.11.1.7) isozyme 40K precursor,
  misc_feature (65)..(368): Homolog of NCBI NO: 7433067 NR Description: peroxidase (EC 1.11.1.7) isozyme 38K precursor,
  misc_feature (19)..(368): Homolog of NCBI NO: 15225011 NR Description: peroxidase, putative [Arabidopsis thaliana]
IYKRKKHLKENIKSKVDHMANKSLEIRFLFPLVLFLVVKLLCVDGKGFNNNGHKIRKGRWEGKLKMNFYHNSCPGAEDIVRQIVWKKVEANRSLAPKLLRVHYHDCFVRGCDASLLLDSVAGKAVSEKEARPNLSLSGFEIIDEIKYILEKRCPNTVSCADILTLAARDAVSYEFERPLWNVFTGRVDGRVSLATEAARDLPSAGANFTTLQKLFAESDLDVVDLVALSGAHTIGIAHCGVFGRRLLNFTGKGDTDPSLNPSYASFLKSECSDKSLRLNPSAVVGMDPTGPLAFDSGYFVSLLKNKGLFTSDAALLTDPSAAHIASVFQNSGAFLAQFGRSMIKMSSIKVLTLGDQGGEIRKNCRLVN

SEQ ID NO: 48227 - protein, 350 aa, Arabidopsis thaliana
  peptide (1)..(350): Ceres Seq. ID no. 13648879
  misc_feature (62)..(313): Pfam Name: Peroxidase Pfam Description: Peroxidase
  misc_feature (47)..(350): Homolog of NCBI NO: 7433066 NR Description: peroxidase (EC 1.11.1.7) isozyme 40K precursor,
  misc_feature (47)..(350): Homolog of NCBI NO: 7433067 NR Description: peroxidase (EC 1.11.1.7) isozyme 38K precursor,
  misc_feature (1)..(350): Homolog of NCBI NO: 15225011 NR Description: peroxidase, putative [Arabidopsis thaliana]
MANKSLEIRFLFPLVLFLVVKLLCVDGKGFNNNGHKIRKGRWEGKLKMNFYHNSCPGAEDIVRQIVWKKVEANRSLAPKLLRVHYHDCFVRGCDASLLLDSVAGKAVSEKEARPNLSLSGFEIIDEIKYILEKRCPNTVSCADILTLAARDAVSYEFERPLWNVFTGRVDGRVSLATEAARDLPSAGANFTTLQKLFAESDLDVVDLVALSGAHTIGIAHCGVFGRRLLNFTGKGDTDPSLNPSYASFLKSECSDKSLRLNPSAVVGMDPTGPLAFDSGYFVSLLKNKGLFTSDAALLTDPSAAHIASVFQNSGAFLAQFGRSMIKMSSIKVLTLGDQGGEIRKNCRLVN

SEQ ID NO: 48228 - protein, 303 aa, Arabidopsis thaliana
  peptide (1)..(303): Ceres Seq. ID no. 13648880
  misc_feature (15)..(266): Pfam Name: Peroxidase Pfam Description: Peroxidase
  misc_feature (1)..(303): Homolog of NCBI NO: 7433066 NR Description: peroxidase (EC 1.11.1.7) isozyme 40K precursor,
  misc_feature (1)..(303): Homolog of NCBI NO: 7433067 NR Description: peroxidase (EC 1.11.1.7) isozyme 38K precursor,
  misc_feature (1)..(303): Homolog of NCBI NO: 15225011 NR Description: peroxidase, putative [Arabidopsis thaliana]
MNFYHNSCPGAEDIVRQIVWKKVEANRSLAPKLLRVHYHDCFVRGCDASLLLDSVAGKAVSEKEARPNLSLSGFEIIDEIKYILEKRCPNTVSCADILTLAARDAVSYEFERPLWNVFTGRVDGRVSLATEAARDLPSAGANFTTLQKLFAESDLDVVDLVALSGAHTIGIAHCGVFGRRLLNFTGKGDTDPSLNPSYASFLKSECSDKSLRLNPSAVVGMDPTGPLAFDSGYFVSLLKNKGLFTSDAALLTDPSAAHIASVFQNSGAFLAQFGRSMIKMSSIKVLTLGDQGGEIRKNCRLVN

SEQ ID NO: 48229 - DNA, 2485 bp, Arabidopsis thaliana
  misc_feature (1)..(2485): Ceres Seq. ID no. 12671602
  misc_feature: MA Experiment ID: 20000315 Result: Down-regulated in Transcription
  misc_feature: MA Experiment 20000315 PARAMETER Experiment Name: At_14day_Shoots-Roots_Sub_P Parameter: Age (day) Value: 14
  misc_feature: MA Experiment 20000315 PARAMETER Experiment Name: At_14day_Shoots-Roots_Sub_P Parameter: Organism Value: A. thaliana
  misc_feature: MA Experiment 20000315 PARAMETER Experiment Name: At_14day_Shoots-Roots_Sub_P Parameter: Plant Line Value: WS
  misc_feature: MA Experiment 20000315 PARAMETER Experiment Name: At_14day_Shoots-Roots_Sub_P Parameter: Tissue Value: Shoots vs. Whole Plant
  misc_feature: MA Experiment ID: 20000327 Result: Down-regulated in Transcription
  misc_feature: MA Experiment 20000327 PARAMETER Experiment Name: At_42deg_Heat_Sub_P Parameter: Age (day) Value: 14
  misc_feature: MA Experiment 20000327 PARAMETER Experiment Name: At_42deg_Heat_Sub_P Parameter: Organism Value: A. thaliana
  misc_feature: MA Experiment 20000327 PARAMETER Experiment Name: At_42deg_Heat_Sub_P Parameter: Plant Line Value: WS
  misc_feature: MA Experiment 20000327 PARAMETER Experiment Name: At_42deg_Heat_Sub_P Parameter: Temperature (deg C) Value: 42 vs. 22
  misc_feature: MA Experiment 20000327 PARAMETER Experiment Name: At_42deg_Heat_Sub_P Parameter: Timepoint (hr) Value: 1
  misc_feature: MA Experiment 20000327 PARAMETER Experiment Name: At_42deg_Heat_Sub_P Parameter: Tissue Value: Aerial
  misc_feature: MA Experiment ID: 20000328 Result: Down-regulated in Transcription
  misc_feature: MA Experiment 20000328 PARAMETER Experiment Name: At_42deg_Heat_Sub_P Parameter: Age (day) Value: 14
  misc_feature: MA Experiment 20000328 PARAMETER Experiment Name: At_42deg_Heat_Sub_P Parameter: Organism Value: A. thaliana
  misc_feature: MA Experiment 20000328 PARAMETER Experiment Name: At_42deg_Heat_Sub_P Parameter: Plant Line Value: WS
  misc_feature: MA Experiment 20000328 PARAMETER Experiment Name: At_42deg_Heat_Sub_P Parameter: Temperature (deg C) Value: 42 vs. 22
  misc_feature: MA Experiment 20000328 PARAMETER Experiment Name: At_42deg_Heat_Sub_P Parameter: Timepoint (hr) Value: 6
  misc_feature: MA Experiment 20000328 PARAMETER Experiment Name: At_42deg_Heat_Sub_P Parameter: Tissue Value: Aerial
acaatttgtgctcttcttcttccgtttcttcttcgccgtcagattcgactgtaactgattcatgagttaaaagagtatgttcgatacttgtggcccaaaaggagtcaaatctcaagtcatcagtggccaacgcgagaactttgtgaggttagatagtatggactcaaggtactcgcaaagttccgaaacgggtctaaacaaatgcacattgaatatacaaggaggacctaaacgttttgctcaaggaagcaaagcatcatctggatcttttaagaaagggtttagaaaaggatcagaggggctttggtctataggtcgatcgattggactcggtgtttcgcgcgctgtgtttccagaagatcttgaagtatcagagaagaagatatttgatccacaagacaagtttcttttactctgcaacaagttgttcgtcgcttcgtgtatactcgcagtatccgttgatcctctcttcttgtatcttcctttcattaatgataaagcgaaatgtgttggtatagatcggaaactggctattatagtaactacaataaggacagttatagattcgttttatctctttcatatggctctacggtttagaacagcttatgttgctccctcgtcacgggtttttggccgcggagagcttgttatagacccggcgcagatagctaagcggtatctgcaacagtatttcatcattgatttactttctgttcttccggttccacagattatagtttggagattcctctatacttcgaggggtgcgaatgtactggcgacaaaacaagcacttagatatatcgttttagttcagtatattccgcggtttcttcgaatgtatcctttaagttcagaactgaagagaactgccggggtattcgctgaaactgcgtgggcgggtgcagcgtactacttgttgctttacatgctcgcaagtcatattgttggggctttgtggtatttgcttgctttagaacgcaataacgactgttggagtaaggcttgccacaataaccagaactgtactagaaacttcttgttttgtggtaaccaaaatatgaaaggttatgctgcttgggacaatattaaagtttcgtatcttcaactaaagtgccctgtcaatgtccccgaagatgaagaacctccttttgattttggaatctacttaagagcactctcctctggcatcgtctcgtctaagaactttgtctctaagtacttcttctgtttgtggtggggactacagaatcttagtacacttggtcaagggcttgaaaccagcacatatcctggagaggttatattctctataacacttgctattgctggacttctactatttgcacttctcattggaaacatgcagacttatcttcaatcgcttaccattcggttagaagaaatgcgagtaaaaagacgtgactcagaacagtggatgcatcatcgaatgcttccaccagaactgcgggaacgggttagacgatatgaccagtacaagtggttggagacgcgtggagttgatgaagagaatcttgttcagaatctcccaaaggatcttagaagagatatcaaacgtcatctctgtctcgcgttagtccgaagagttccattgtttgagaatatggatgagaggctgttagatgcaatctgtgagaggcttaagccatgtctgttcactgagaagtcgtacttggttcgtgagggagatccagtcaacgagatgctcttcattatccgtggtaggctcgaaagtgtaaccactgatggcggtagaagcggattctacaaccggagtttacttaaagaaggagatttctgcggtgacgagcttttgacatgggcgcttgatcccaaatccggttctaacctcccttcctctacaagaaccgtgaaggccttaaccgaagtggaagctttcgctctgatagccgatgagctgaaattcgtggcaagccagttcaggagactccatagcagacaagtacaacacacgttcagattctattcacagcaatggaggacttgggccgcttgcttcatgcaagcagcatggcgacggtacataaagaggaagaaattggagcaacttagaaaagaagaggaagaagaagaagcggcagcagcatcagttatagcaggaggaagtccttatagcataagagcaacgttcttggcttcaaagtttgcggcaaatgcacttcgtagcgttcacaagaaccggaccgcgaaatcaacattgttgttgtcatctactaaagaattggtgaaatttcagaaacctccagaaccagatttctctgctgaagatcactgatccaatatcgcatacgcaagaattctttttctttttaacttgtacacaatctctaagaatgctccaaatttttttgttgttgtttaaacacttactgtaatataaatgattatttgtgatcgttcttaatcttgttattacatagaaatgttttttaagattttc

SEQ ID NO: 48230 - protein, 747 aa, Arabidopsis thaliana
  peptide (1)..(747): Ceres Seq. ID no. 12671603
  misc_feature (154)..(431): Pfam Name: Ion transport protein Pfam Description: Ion transport protein
  misc_feature (99)..(743): Homolog of NCBI NO: 22328204 NR Description: cyclic nucleotide-regulated ion channel, putative
  misc_feature (99)..(743): Homolog of NCBI NO: 7484881 NR Description: cyclic nucleotide gated channel homolog F3I3.30 -
  misc_feature (92)..(747): Homolog of NCBI NO: 6969231 NR Description: cyclic nucleotide-gated calmodulin-binding ion
  misc_feature (18)..(746): Homolog of NCBI NO: 15238657 NR Description: cyclic nucleotide-regulated ion channel (CNGC1)
  misc_feature (1)..(746): Homolog of NCBI NO: 38344883 NR Description: OSJNBa0033G05.7 [Oryza sativa (japonica
  misc_feature (59)..(745): Homolog of NCBI NO: 15219100 NR Description: cyclic nucleotide-regulated ion channel, putative
  misc_feature (35)..(746): Homolog of NCBI NO: 15223667 NR Description: cyclic nucleotide-regulated ion channel, putative
  misc_feature (11)..(746): Homolog of NCBI NO: 25513728 NR Description: probable cyclic nucleotide and
  misc_feature (15)..(745): Homolog of NCBI NO: 15242908 NR Description: cyclic nucleotide-regulated ion channel (CNGC5)
  misc_feature (15)..(745): Homolog of NCBI NO: 30696976 NR Description: cyclic nucleotide-regulated ion channel (CNGC5)
MFDTCGPKGVKSQVISGQRENFVRLDSMDSRYSQSSETGLNKCTLNIQGGPKRFAQGSKASSGSFKKGFRKGSEGLWSIGRSIGLGVSRAVFPEDLEVSEKKIFDPQDKFLLLCNKLFVASCILAVSVDPLFLYLPFINDKAKCVGIDRKLAIIVTTIRTVIDSFYLFHMALRFRTAYVAPSSRVFGRGELVIDPAQIAKRYLQQYFIIDLLSVLPVPQIIVWRFLYTSRGANVLATKQALRYIVLVQYIPRFLRMYPLSSELKRTAGVFAETAWAGAAYYLLLYMLASHIVGALWYLLALERNNDCWSKACHNNQNCTRNFLFCGNQNMKGYAAWDNIKVSYLQLKCPVNVPEDEEPPFDFGIYLRALSSGIVSSKNFVSKYFFCLWWGLQNLSTLGQGLETSTYPGEVIFSITLAIAGLLLFALLIGNMQTYLQSLTIRLEEMRVKRRDSEQWMHHRMLPPELRERVRRYDQYKWLETRGVDEENLVQNLPKDLRRDIKRHLCLALVRRVPLFENMDERLLDAICERLKPCLFTEKSYLVREGDPVNEMLFIIRGRLESVTTDGGRSGFYNRSLLKEGDFCGDELLTWALDPKSGSNLPSSTRTVKALTEVEAFALIADELKFVASQFRRLHSRQVQHTFRFYSQQWRTWAACFMQAAWRRYIKRKKLEQLRKEEEEEEAAAASVIAGGSPYSIRATFLASKFAANALRSVHKNRTAKSTLLLSSTKELVKFQKPPEPDFSAEDH

SEQ ID NO: 48231 - protein, 720 aa, Arabidopsis thaliana
  peptide (1)..(720): Ceres Seq. ID no. 12671604
  misc_feature (127)..(404): Pfam Name: Ion transport protein Pfam Description: Ion transport protein
  misc_feature (72)..(716): Homolog of NCBI NO: 22328204 NR Description: cyclic nucleotide-regulated ion channel, putative
  misc_feature (72)..(716): Homolog of NCBI NO: 7484881 NR Description: cyclic nucleotide gated channel homolog F3I3.30 -
  misc_feature (65)..(720): Homolog of NCBI NO: 6969231 NR Description: cyclic nucleotide-gated calmodulin-binding ion
  misc_feature (1)..(719): Homolog of NCBI NO: 15238657 NR Description: cyclic nucleotide-regulated ion channel (CNGC1)
  misc_feature (1)..(719): Homolog of NCBI NO: 38344883 NR Description: OSJNBa0033G05.7 [Oryza sativa (japonica
  misc_feature (32)..(718): Homolog of NCBI NO: 15219100 NR Description: cyclic nucleotide-regulated ion channel, putative
  misc_feature (8)..(719): Homolog of NCBI NO: 15223667 NR Description: cyclic nucleotide-regulated ion channel, putative
  misc_feature (1)..(719): Homolog of NCBI NO: 25513728 NR Description: probable cyclic nucleotide and
  misc_feature (1)..(718): Homolog of NCBI NO: 15242908 NR Description: cyclic nucleotide-regulated ion channel (CNGC5)
  misc_feature (1)..(718): Homolog of NCBI NO: 30696976 NR Description: cyclic nucleotide-regulated ion channel (CNGC5)
MDSRYSQSSETGLNKCTLNIQGGPKRFAQGSKASSGSFKKGFRKGSEGLWSIGRSIGLGVSRAVFPEDLEVSEKKIFDPQDKFLLLCNKLFVASCILAVSVDPLFLYLPFINDKAKCVGIDRKLAIIVTTIRTVIDSFYLFHMALRFRTAYVAPSSRVFGRGELVIDPAQIAKRYLQQYFIIDLLSVLPVPQIIVWRFLYTSRGANVLATKQALRYIVLVQYIPRFLRMYPLSSELKRTAGVFAETAWAGAAYYLLLYMLASHIVGALWYLLALERNNDCWSKACHNNQNCTRNFLFCGNQNMKGYAAWDNIKVSYLQLKCPVNVPEDEEPPFDFGIYLRALSSGIVSSKNFVSKYFFCLWWGLQNLSTLGQGLETSTYPGEVIFSITLAIAGLLLFALLIGNMQTYLQSLTIRLEEMRVKRRDSEQWMHHRMLPPELRERVRRYDQYKWLETRGVDEENLVQNLPKDLRRDIKRHLCLALVRRVPLFENMDERLLDAICERLKPCLFTEKSYLVREGDPVNEMLFIIRGRLESVTTDGGRSGFYNRSLLKEGDFCGDELLTWALDPKSGSNLPSSTRTVKALTEVEAFALIADELKFVASQFRRLHSRQVQHTFRFYSQQWRTWAACFMQAAWRRYIKRKKLEQLRKEEEEEEAAAASVIAGGSPYSIRATFLASKFAANALRSVHKNRTAKSTLLLSSTKELVKFQKPPEPDFSAEDH

SEQ ID NO: 48232 - protein, 578 aa, Arabidopsis thaliana
  peptide (1)..(578): Ceres Seq. ID no. 12671605
  misc_feature (1)..(262): Pfam Name: Ion transport protein Pfam Description: Ion transport protein
  misc_feature (1)..(574): Homolog of NCBI NO: 22328204 NR Description: cyclic nucleotide-regulated ion channel, putative
  misc_feature (1)..(574): Homolog of NCBI NO: 7484881 NR Description: cyclic nucleotide gated channel homolog F3I3.30 -
  misc_feature (1)..(578): Homolog of NCBI NO: 6969231 NR Description: cyclic nucleotide-gated calmodulin-binding ion
  misc_feature (1)..(577): Homolog of NCBI NO: 15238657 NR Description: cyclic nucleotide-regulated ion channel (CNGC1)
  misc_feature (1)..(577): Homolog of NCBI NO: 38344883 NR Description: OSJNBa0033G05.7 [Oryza sativa (japonica
  misc_feature (1)..(576): Homolog of NCBI NO: 15219100 NR Description: cyclic nucleotide-regulated ion channel, putative
  misc_feature (1)..(577): Homolog of NCBI NO: 15223667 NR Description: cyclic nucleotide-regulated ion channel, putative
  misc_feature (1)..(577): Homolog of NCBI NO: 25513728 NR Description: probable cyclic nucleotide and
  misc_feature (1)..(576): Homolog of NCBI NO: 15242908 NR Description: cyclic nucleotide-regulated ion channel (CNGC5)
  misc_feature (1)..(576): Homolog of NCBI NO: 30696976 NR Description: cyclic nucleotide-regulated ion channel (CNGC5)
MALRFRTAYVAPSSRVFGRGELVIDPAQIAKRYLQQYFIIDLLSVLPVPQIIVWRFLYTSRGANVLATKQALRYIVLVQYIPRFLRMYPLSSELKRTAGVFAETAWAGAAYYLLLYMLASHIVGALWYLLALERNNDCWSKACHNNQNCTRNFLFCGNQNMKGYAAWDNIKVSYLQLKCPVNVPEDEEPPFDFGIYLRALSSGIVSSKNFVSKYFFCLWWGLQNLSTLGQGLETSTYPGEVIFSITLAIAGLLLFALLIGNMQTYLQSLTIRLEEMRVKRRDSEQWMHHRMLPPELRERVRRYDQYKWLETRGVDEENLVQNLPKDLRRDIKRHLCLALVRRVPLFENMDERLLDAICERLKPCLFTEKSYLVREGDPVNEMLFIIRGRLESVTTDGGRSGFYNRSLLKEGDFCGDELLTWALDPKSGSNLPSSTRTVKALTEVEAFALIADELKFVASQFRRLHSRQVQHTFRFYSQQWRTWAACFMQAAWRRYIKRKKLEQLRKEEEEEEAAAASVIAGGSPYSIRATFLASKFAANALRSVHKNRTAKSTLLLSSTKELVKFQKPPEPDFSAEDH

SEQ ID NO: 48233 - DNA, 812 bp, Arabidopsis thaliana
  misc_feature (1)..(812): Ceres Seq. ID no. 13649904
  misc_feature: MA Experiment ID: 20000314 Result: Up-regulated in Transcription
  misc_feature: MA Experiment 20000314 PARAMETER Experiment Name: At_14day_Shoots-Roots_Sub_P Parameter: Age (day) Value: 14
  misc_feature: MA Experiment 20000314 PARAMETER Experiment Name: At_14day_Shoots-Roots_Sub_P Parameter: Organism Value: A. thaliana
  misc_feature: MA Experiment 20000314 PARAMETER Experiment Name: At_14day_Shoots-Roots_Sub_P Parameter: Plant Line Value: WS
  misc_feature: MA Experiment 20000314 PARAMETER Experiment Name: At_14day_Shoots-Roots_Sub_P Parameter: Tissue Value: Roots vs. Whole Plant
  misc_feature: MA Experiment ID: 20000315 Result: Up-regulated in Transcription
  misc_feature: MA Experiment 20000315 PARAMETER Experiment Name: At_14day_Shoots-Roots_Sub_P Parameter: Age (day) Value: 14
  misc_feature: MA Experiment 20000315 PARAMETER Experiment Name: At_14day_Shoots-Roots_Sub_P Parameter: Organism Value: A. thaliana
  misc_feature: MA Experiment 20000315 PARAMETER Experiment Name: At_14day_Shoots-Roots_Sub_P Parameter: Plant Line Value: WS
  misc_feature: MA Experiment 20000315 PARAMETER Experiment Name: At_14day_Shoots-Roots_Sub_P Parameter: Tissue Value: Shoots vs. Whole Plant
gaaccatcgtctctatatatgtatcgacgacttcaaaagcttcaagttattctttatcagtaatggaaccaattacttattccaaagatcttccattattcttctcaatcttcatcttcgtttatcttctcggttacttattcattttcaaaaaatggactccggagactcgtcctttagcttccagctgtttaatctccctcctccacggcgtctccgccgtcgtcctcgccacgaacgccttactctccgatcctaaccgtggattctcctccgtcaacacccaatctcaaaactcaattctcgatttcagctccgcttatttcctcgctgatctcgtccaccttgccgtgtttccttctcccgccggcggagactcgcttttcgccgctcatcacctcgccgtgcttttcgttttcctcacctgccgttacatggttgctcacggcgcctgcgctctgctcgcgctgctagtcgtcgcggaggccacgagcgcgtgtcagaacacgtggacgctcgcggatgcgcgtgggaaagacgcgcctctagcggtgagtttgcaccggttcgttacggtgccgttttacgcgtcctatagcgtctgcaggtgcgttctagcgccgttgcttatcgttaagatgacgtggttttacgtcagcggaggcgctgatgacgtcatacccagatgggtttgggtttcgtggaccgttgttattgttactgccgttaccgttagtatcctttggatttggaatttgtgggtactgttttttcaggaaagatattccaaatttaccaaaaaggttaggtaa

SEQ ID NO: 48234 - protein, 269 aa, Arabidopsis thaliana
  peptide (1)..(269): Ceres Seq. ID no. 13649905
  misc_feature (23)..(248): Homolog of NCBI NO: 9279600 NR Description: gene_id:MPE11.12~unknown protein [Arabidopsis
  misc_feature (23)..(269): Homolog of NCBI NO: 15230950 NR Description: hypothetical protein [Arabidopsis thaliana]
  misc_feature (29)..(269): Homolog of NCBI NO: 26450181 NR Description: unknown protein [Arabidopsis thaliana]
  misc_feature (4)..(269): Homolog of NCBI NO: 15241364 NR Description: expressed protein [Arabidopsis thaliana]
  misc_feature (21)..(269): Homolog of NCBI NO: 15232128 NR Description: expressed protein [Arabidopsis thaliana]
TIVSIYVSTTSKASSYSLSVMEPITYSKDLPLFFSIFIFVYLLGYLFIFKKWTPETRPLASSCLISLLHGVSAVVLATNALLSDPNRGFSSVNTQSQNSILDFSSAYFLADLVHLAVFPSPAGGDSLFAAHHLAVLFVFLTCRYMVAHGACALLALLVVAEATSACQNTWTLADARGKDAPLAVSLHRFVTVPFYASYSVCRCVLAPLLIVKMTWFYVSGGADDVIPRWVWVSWTVVIVTAVTVSILWIWNLWVLFFQERYSKFTKKVR

SEQ ID NO: 48235 - protein, 249 aa, Arabidopsis thaliana
  peptide (1)..(249): Ceres Seq. ID no. 13649906
  misc_feature (3)..(228): Homolog of NCBI NO: 9279600 NR Description: gene_id:MPE11.12~unknown protein [Arabidopsis
  misc_feature (3)..(249): Homolog of NCBI NO: 15230950 NR Description: hypothetical protein [Arabidopsis thaliana]
  misc_feature (9)..(249): Homolog of NCBI NO: 26450181 NR Description: unknown protein [Arabidopsis thaliana]
  misc_feature (1)..(249): Homolog of NCBI NO: 15241364 NR Description: expressed protein [Arabidopsis thaliana]
  misc_feature (1)..(249): Homolog of NCBI NO: 15232128 NR Description: expressed protein [Arabidopsis thaliana]
MEPITYSKDLPLFFSIFIFVYLLGYLFIFKKWTPETRPLASSCLISLLHGVSAVVLATNALLSDPNRGFSSVNTQSQNSILDFSSAYFLADLVHLAVFPSPAGGDSLFAAHHLAVLFVFLTCRYMVAHGACALLALLVVAEATSACQNTWTLADARGKDAPLAVSLHRFVTVPFYASYSVCRCVLAPLLIVKMTWFYVSGGADDVIPRWVWVSWTVVIVTAVTVSILWIWNLWVLFFQERYSKFTKKVR

SEQ ID NO: 48236 - DNA, 1284 bp, Arabidopsis thaliana
  misc_feature (1)..(1284): Ceres Seq. ID no. 13593575
  misc_feature: MA Experiment ID: 20000179 Result: Down-regulated in Transcription
  misc_feature: MA Experiment 20000179 PARAMETER Experiment Name: At_Germinating_Seeds_P Parameter: Age (hr) Value: 6 vs. 0
  misc_feature: MA Experiment 20000179 PARAMETER Experiment Name: At_Germinating_Seeds_P Parameter: Tissue Value: Germinating Seeds
  misc_feature: MA Experiment ID: 20000180 Result: Down-regulated in Transcription
  misc_feature: MA Experiment 20000180 PARAMETER Experiment Name: At_Germinating_Seeds_P Parameter: Age (hr) Value: 24 vs. 0
  misc_feature: MA Experiment 20000180 PARAMETER Experiment Name: At_Germinating_Seeds_P Parameter: Tissue Value: Germinating Seeds
  misc_feature: MA Experiment ID: 20000437 Result: Up-regulated in Transcription
  misc_feature: MA Experiment 20000437 PARAMETER Experiment Name: At_Drought_P Parameter: Age (day) Value: 8
  misc_feature: MA Experiment 20000437 PARAMETER Experiment Name: At_Drought_P Parameter: Organism Value: A. thaliana
  misc_feature: MA Experiment 20000437 PARAMETER Experiment Name: At_Drought_P Parameter: Plant Line Value: WS
  misc_feature: MA Experiment 20000437 PARAMETER Experiment Name: At_Drought_P Parameter: Timepoint (hr) Value: 24
  misc_feature: MA Experiment 20000437 PARAMETER Experiment Name: At_Drought_P Parameter: Tissue Value: Whole Plant
  misc_feature: MA Experiment 20000437 PARAMETER Experiment Name: At_Drought_P Parameter: Treatment Value: Drought vs. No Drought
atggctaccgagggagttgttccttcagcgcaggatattgctgctgaatttgtgagacagtactatcatgttttaggacagcttcctcatgaagctcgtaggttatatgttgatgctagtgttgtcagcagacctgatgttactggtactatgatgtcttttacttccgttgaggctatcaacaagcatatcctgtcctgtgactttgagaatactaaatttgaggttctgagtgttgactctcagaattctttggaagatgggatttttattatggtgatcggtttcatgactggaaaagacaaccagaggaggaagttttctcagatgttctatcttgctcgtcaaaataccctcgttgttctcaatgacatgttacgatacgttgatcaagaggattcttctaccactgaaactccatgtgagccggtaactgagattgtgagaccagctgatggtctaaagaaggccgagaagactgagctgaaacagaaaaacgttgcttcggtggagaaatctgttaatgctgctgttgaaaagaatgctgctccattggacaacggaaagatgaagcaatctgaaaaagctgttattactcagaaagttacagagccagatgctgctcctcagcccgatggagccaagagatcgtttgctgacatagttggatcaatggcgaaaaacgctgctccgtttcaagttaaatcccctgttcaagccccggttcagaaacctaaatacgtgggacaaccccgtgctgctgcagcacctcaaaaacctgcttacgtcagtaaatctataaagaaaaatgatcagaaggtcattgaagtaccaggcacttcgatatttgttgcaaatctgccattgaatgcaatgccgcctcaactctttgaactgttcaaggattttggtcctatcaaagaaaacgggattcaagtccgaagctccaggggtaatgctaatccagtttgcttcgggtttatctcctttgaaactgttgcctcagtccagagcgtgcttcaggctgccaagaacacgcccttcatgcttgcagaccgtaagcttcgtgtaaaggaaaaagaagttgattatgatggaagcaaaccttctggtaaaaccaaaggtggaagcaacaagacgcagaatggctctgcagatagcagcaagactgagaatggctctgcagatgacagcaagacaaatggctccgcagaagatggcgagaaagaattcaaacaggttaaaagtcgtagaaataggaaaaaaagtgaagccgcacattga

SEQ ID NO: 48237 - protein, 427 aa, Arabidopsis thaliana
  peptide (1)..(427): Ceres Seq. ID no. 13593576
  misc_feature (13)..(128): Pfam Name: Nuclear transport factor 2 (NTF2) domain Pfam Description: Nuclear transport factor 2 (NTF2) domain
  misc_feature (13)..(383): Homolog of NCBI NO: 6642640 NR Description: putative RNA-binding protein [Arabidopsis
  misc_feature (9)..(130): Homolog of NCBI NO: 15233299 NR Description: hypothetical protein [Arabidopsis thaliana]
  misc_feature (9)..(424): Homolog of NCBI NO: 31126693 NR Description: putative GAP SH3 binding protein
  misc_feature (8)..(424): Homolog of NCBI NO: 21553535 NR Description: ras-GTPase-activating protein SH3-domain binding
  misc_feature (8)..(424): Homolog of NCBI NO: 30697455 NR Description: NTF2-containing RNA-binding protein, putative
  misc_feature (8)..(424): Homolog of NCBI NO: 30697452 NR Description: NTF2-containing RNA-binding protein, putative
  misc_feature (1)..(409): Homolog of NCBI NO: 30678068 NR Description: NTF2-containing RNA-binding protein, putative
  misc_feature (1)..(419): Homolog of NCBI NO: 25411027 NR Description: hypothetical protein At2g03640 [imported] -
  misc_feature (1)..(408): Homolog of NCBI NO: 18394029 NR Description: NTF2-containing RNA-binding protein, putative
  misc_feature (1)..(427): Homolog of NCBI NO: 15222258 NR Description: NTF2-containing RNA-binding protein, putative
MATEGVVPSAQDIAAEFVRQYYHVLGQLPHEARRLYVDASVVSRPDVTGTMMSFTSVEAINKHILSCDFENTKFEVLSVDSQNSLEDGIFIMVIGFMTGKDNQRRKFSQMFYLARQNTLVVLNDMLRYVDQEDSSTTETPCEPVTEIVRPADGLKKAEKTELKQKNVASVEKSVNAAVEKNAAPLDNGKMKQSEKAVITQKVTEPDAAPQPDGAKRSFADIVGSMAKNAAPFQVKSPVQAPVQKPKYVGQPRAAAAPQKPAYVSKSIKKNDQKVIEVPGTSIFVANLPLNAMPPQLFELFKDFGPIKENGIQVRSSRGNANPVCFGFISFETVASVQSVLQAAKNTPFMLADRKLRVKEKEVDYDGSKPSGKTKGGSNKTQNGSADSSKTENGSADDSKTNGSAEDGEKEFKQVKSRRNRKKSEAAH

SEQ ID NO: 48238 - protein, 377 aa, Arabidopsis thaliana
  peptide (1)..(377): Ceres Seq. ID no. 13593577
  misc_feature (1)..(78): Pfam Name: Nuclear transport factor 2 (NTF2) domain Pfam Description: Nuclear transport factor 2 (NTF2) domain
  misc_feature (1)..(333): Homolog of NCBI NO: 6642640 NR Description: putative RNA-binding protein [Arabidopsis
  misc_feature (1)..(80): Homolog of NCBI NO: 15233299 NR Description: hypothetical protein [Arabidopsis thaliana]
  misc_feature (1)..(374): Homolog of NCBI NO: 31126693 NR Description: putative GAP SH3 binding protein
  misc_feature (1)..(374): Homolog of NCBI NO: 21553535 NR Description: ras-GTPase-activating protein SH3-domain binding
  misc_feature (1)..(374): Homolog of NCBI NO: 30697455 NR Description: NTF2-containing RNA-binding protein, putative
  misc_feature (1)..(374): Homolog of NCBI NO: 30697452 NR Description: NTF2-containing RNA-binding protein, putative
  misc_feature (1)..(359): Homolog of NCBI NO: 30678068 NR Description: NTF2-containing RNA-binding protein, putative
  misc_feature (1)..(369): Homolog of NCBI NO: 25411027 NR Description: hypothetical protein At2g03640 [imported] -
  misc_feature (1)..(358): Homolog of NCBI NO: 18394029 NR Description: NTF2-containing RNA-binding protein, putative
  misc_feature (1)..(377): Homolog of NCBI NO: 15222258 NR Description: NTF2-containing RNA-binding protein, putative
MMSFTSVEAINKHILSCDFENTKFEVLSVDSQNSLEDGIFIMVIGFMTGKDNQRRKFSQMFYLARQNTLVVLNDMLRYVDQEDSSTTETPCEPVTEIVRPADGLKKAEKTELKQKNVASVEKSVNAAVEKNAAPLDNGKMKQSEKAVITQKVTEPDAAPQPDGAKRSFADIVGSMAKNAAPFQVKSPVQAPVQKPKYVGQPRAAAAPQKPAYVSKSIKKNDQKVIEVPGTSIFVANLPLNAMPPQLFELFKDFGPIKENGIQVRSSRGNANPVCFGFISFETVASVQSVLQAAKNTPFMLADRKLRVKEKEVDYDGSKPSGKTKGGSNKTQNGSADSSKTENGSADDSKTNGSAEDGEKEFKQVKSRRNRKKSEAAH

SEQ ID NO: 48239 - protein, 376 aa, Arabidopsis thaliana
  peptide (1)..(376): Ceres Seq. ID no. 13593578
  misc_feature (1)..(77): Pfam Name: Nuclear transport factor 2 (NTF2) domain Pfam Description: Nuclear transport factor 2 (NTF2) domain
  misc_feature (1)..(332): Homolog of NCBI NO: 6642640 NR Description: putative RNA-binding protein [Arabidopsis
  misc_feature (1)..(79): Homolog of NCBI NO: 15233299 NR Description: hypothetical protein [Arabidopsis thaliana]
  misc_feature (1)..(373): Homolog of NCBI NO: 31126693 NR Description: putative GAP SH3 binding protein
  misc_feature (1)..(373): Homolog of NCBI NO: 21553535 NR Description: ras-GTPase-activating protein SH3-domain binding
  misc_feature (1)..(373): Homolog of NCBI NO: 30697455 NR Description: NTF2-containing RNA-binding protein, putative
  misc_feature (1)..(373): Homolog of NCBI NO: 30697452 NR Description: NTF2-containing RNA-binding protein, putative
  misc_feature (1)..(358): Homolog of NCBI NO: 30678068 NR Description: NTF2-containing RNA-binding protein, putative
  misc_feature (1)..(368): Homolog of NCBI NO: 25411027 NR Description: hypothetical protein At2g03640 [imported] -
  misc_feature (1)..(357): Homolog of NCBI NO: 18394029 NR Description: NTF2-containing RNA-binding protein, putative
  misc_feature (1)..(376): Homolog of NCBI NO: 15222258 NR Description: NTF2-containing RNA-binding protein, putative
MSFTSVEAINKHILSCDFENTKFEVLSVDSQNSLEDGIFIMVIGFMTGKDNQRRKFSQMFYLARQNTLVVLNDMLRYVDQEDSSTTETPCEPVTEIVRPADGLKKAEKTELKQKNVASVEKSVNAAVEKNAAPLDNGKMKQSEKAVITQKVTEPDAAPQPDGAKRSFADIVGSMAKNAAPFQVKSPVQAPVQKPKYVGQPRAAAAPQKPAYVSKSIKKNDQKVIEVPGTSIFVANLPLNAMPPQLFELFKDFGPIKENGIQVRSSRGNANPVCFGFISFETVASVQSVLQAAKNTPFMLADRKLRVKEKEVDYDGSKPSGKTKGGSNKTQNGSADSSKTENGSADDSKTNGSAEDGEKEFKQVKSRRNRKKSEAAH

SEQ ID NO: 48240 - DNA, 1960 bp, Arabidopsis thaliana
  misc_feature (1)..(1960): Ceres Seq. ID no. 13648802
  misc_feature: MA Experiment ID: 20001557 Result: Up-regulated in Transcription
  misc_feature: MA Experiment 20001557 PARAMETER Experiment Name: At_Drought_Soil_Dry_P Parameter: Age (day) Value: 27
  misc_feature: MA Experiment 20001557 PARAMETER Experiment Name: At_Drought_Soil_Dry_P Parameter: Organism Value: A. thaliana
  misc_feature: MA Experiment 20001557 PARAMETER Experiment Name: At_Drought_Soil_Dry_P Parameter: Plant Line Value: WS
  misc_feature: MA Experiment 20001557 PARAMETER Experiment Name: At_Drought_Soil_Dry_P Parameter: Post Timepoint (hr) Value: 3
  misc_feature: MA Experiment 20001557 PARAMETER Experiment Name: At_Drought_Soil_Dry_P Parameter: Post-Treatment Value: Re-Water vs. No Drought
  misc_feature: MA Experiment 20001557 PARAMETER Experiment Name: At_Drought_Soil_Dry_P Parameter: Timepoint (day) Value: 13
  misc_feature: MA Experiment 20001557 PARAMETER Experiment Name: At_Drought_Soil_Dry_P Parameter: Treatment Value: Drought vs. No Drought
  misc_feature: MA Experiment ID: 20001558 Result: Up-regulated in Transcription
  misc_feature: MA Experiment 20001558 PARAMETER Experiment Name: At_Drought_Soil_Dry_P Parameter: Age (day) Value: 27
  misc_feature: MA Experiment 20001558 PARAMETER Experiment Name: At_Drought_Soil_Dry_P Parameter: Organism Value: A. thaliana
  misc_feature: MA Experiment 20001558 PARAMETER Experiment Name: At_Drought_Soil_Dry_P Parameter: Plant Line Value: WS
  misc_feature: MA Experiment 20001558 PARAMETER Experiment Name: At_Drought_Soil_Dry_P Parameter: Post Timepoint (hr) Value: 6
  misc_feature: MA Experiment 20001558 PARAMETER Experiment Name: At_Drought_Soil_Dry_P Parameter: Post-Treatment Value: Re-Water vs. No Drought
  misc_feature: MA Experiment 20001558 PARAMETER Experiment Name: At_Drought_Soil_Dry_P Parameter: Timepoint (day) Value: 13
  misc_feature: MA Experiment 20001558 PARAMETER Experiment Name: At_Drought_Soil_Dry_P Parameter: Treatment Value: Drought vs. No Drought
  misc_feature: MA Experiment ID: 20001757 Result: Up-regulated in Transcription
  misc_feature: MA Experiment 20001757 PARAMETER Experiment Name: At_50mM_NH4NO3_L-to-H_P Parameter: Timepoint (hr) Value: 6
  misc_feature: MA Experiment 20001757 PARAMETER Experiment Name: At_50mM_NH4NO3_L-to-H_P Parameter: Tissue Value: Leaf
  misc_feature: MA Experiment 20001757 PARAMETER Experiment Name: At_50mM_NH4NO3_L-to-H_P Parameter: Treatment Value: 50mM NH4NO3 vs 100mM Mannitol
gccgcgttatcactcttacgtttctctctctctctcaacttcttccacagcaaatttcttcgattctctgagctctctcccatccttttcaagtggcttcgtttctaaaaaattgattggttgaagaaagtggaaacatggttgaatcggacaagtcatccgttgaagagctgaagaagagggttaggaagagaagccgtgggaagaagaatgagcagcaaaaggctgaagaaaaaacccacactgtagaggaaaacgctgatgaaacgcagaagaagagtgaaaagaaggttaagaaagtgagaggcaaaatcgaggaagaggaagaaaaggtggaagcaatggaagatggtgaagatgagaagaatattgtgattgtcgggaaagggataatgactaatgtgacttttgattccctcgacttatctgagcaaacttctatagctatcaaggagatgggctttcagtacatgactcagattcaagctggatcaattcagccccttttggaggggaaggatgttcttggtgctgccagaactggttctggtaaaactcttgcttttctcattccggctgttgagttgctgtttaaagagcgtttctctcctcgcaacgggactggtgtgattgttatttgccccacaagggaacttgctatccagactaaaaatgtggcggaggagttactcaagcatcattcacagacagtcagcatggttattggtggcaataacagaaggtcggaagcacaacgcattgccagtggttcaaacttggtgatagcaactcctggtcgtcttcttgaccatcttcagaatacaaaggctttcatttataaacacttgaagtgccttgtgatcgatgaagctgataggatactggaagagaattttgaggaagacatgaataagattctaaagattttaccaaagactaggcaaactgcgttattctctgccacccagacctctaaggttaaagatcttgctcgggtgtcattgacatcacctgttcatgtggatgtcgatgatggcagacgcaaggtgacaaatgaaggattggagcaaggctattgtgttgttccgagcaaacaaagacttatccttctaatttcctttttgaaaaagaacctaaataaaaagattatggtatttttctcgacttgcaagtcggtacaattccatacggaaatcatgaaaataagcgacgtggatgtctctgatattcatggaggcatggatcagaacagaagaactaaaacctttttcgacttcatgaaagcaaagaaaggtatcttgttatgtactgatgttgctgctcgtggtctcgatattccttccgtggactggattatacagtatgatccaccagacaagccaacggaatatatccatagggttggtcgaacagcccgtggagaaggagcaaagggaaaggcattacttgtcttgattcctgaagaacttcagtttattcgctacctgaaggctgcgaaagtacctgttaaagagcttgagttcaatgagaagaggcttagtaatgttcaatctgcgctggagaaatgtgttgccaaggactacaatctgaacaagttagccaaagatgcgtacagggcttatctctcagcatacaattcacactctttgaaagacatctttaatgttcaccgacttgacctcctggctgttgctgaatcgttctgcttctcttcgccgcctaaagtgaatctgaacatagaaagtggagctgggaaggtgaggaaggcgagaaagcagcaaggtcgcaatggcttcagtccttacagtccctatggcaagtccacacctacaaaggaggcataaagtgtcatttgtttacaaaattactattttgctccgtagttttgactaattaccaccaccaagttttgtttaaagagtaaacagtgcatttgatttaaatgaaatgttccttggcc

SEQ ID NO: 48241 - protein, 568 aa, Arabidopsis thaliana
  peptide (1)..(568): Ceres Seq. ID no. 13648803
  misc_feature (102)..(312): Pfam Name: DEAD/DEAH box helicase Pfam Description: DEAD/DEAH box helicase
  misc_feature (25)..(553): Homolog of NCBI NO: 31981163 NR Description: RIKEN cDNA 2310005B10 [Mus musculus]
  misc_feature (25)..(553): Homolog of NCBI NO: 12860207 NR Description: unnamed protein product [Mus musculus]
  misc_feature (1)..(560): Homolog of NCBI NO: 40745958 NR Description: hypothetical protein AN1949.2 [Aspergillus
  misc_feature (6)..(553): Homolog of NCBI NO: 12654791 NR Description: DEAD/H (Asp-Glu-Ala-Asp/His) box polypeptide 18
  misc_feature (6)..(553): Homolog of NCBI NO: 7446077 NR Description: DEAD box protein MrDb, Myc-regulated - human
  misc_feature (1)..(553): Homolog of NCBI NO: 32423207 NR Description: hypothetical protein [Neurospora crassa]
  misc_feature (6)..(561): Homolog of NCBI NO: 19115400 NR Description: probable ATP-dependent RNA helicase
  misc_feature (3)..(561): Homolog of NCBI NO: 29150366 NR Description: putative RNA helicase [Oryza sativa (japonica
  misc_feature (5)..(562): Homolog of NCBI NO: 15239187 NR Description: DEAD/DEAH box helicase, putative [Arabidopsis
  misc_feature (1)..(568): Homolog of NCBI NO: 15229677 NR Description: DEAD/DEAH box helicase, putative [Arabidopsis
MVESDKSSVEELKKRVRKRSRGKKNEQQKAEEKTHTVEENADETQKKSEKKVKKVRGKIEEEEEKVEAMEDGEDEKNIVIVGKGIMTNVTFDSLDLSEQTSIAIKEMGFQYMTQIQAGSIQPLLEGKDVLGAARTGSGKTLAFLIPAVELLFKERFSPRNGTGVIVICPTRELAIQTKNVAEELLKHHSQTVSMVIGGNNRRSEAQRIASGSNLVIATPGRLLDHLQNTKAFIYKHLKCLVIDEADRILEENFEEDMNKILKILPKTRQTALFSATQTSKVKDLARVSLTSPVHVDVDDGRRKVTNEGLEQGYCVVPSKQRLILLISFLKKNLNKKIMVFFSTCKSVQFHTEIMKISDVDVSDIHGGMDQNRRTKTFFDFMKAKKGILLCTDVAARGLDIPSVDWIIQYDPPDKPTEYIHRVGRTARGEGAKGKALLVLIPEELQFIRYLKAAKVPVKELEFNEKRLSNVQSALEKCVAKDYNLNKLAKDAYRAYLSAYNSHSLKDIFNVHRLDLLAVAESFCFSSPPKVNLNIESGAGKVRKARKQQGRNGFSPYSPYGKSTPTKEA

SEQ ID NO: 48242 - protein, 500 aa, Arabidopsis thaliana
  peptide (1)..(500): Ceres Seq. ID no. 13648804
  misc_feature (34)..(244): Pfam Name: DEAD/DEAH box helicase Pfam Description: DEAD/DEAH box helicase
  misc_feature (1)..(485): Homolog of NCBI NO: 31981163 NR Description: RIKEN cDNA 2310005B10 [Mus musculus]
  misc_feature (1)..(485): Homolog of NCBI NO: 12860207 NR Description: unnamed protein product [Mus musculus]
  misc_feature (1)..(492): Homolog of NCBI NO: 40745958 NR Description: hypothetical protein AN1949.2 [Aspergillus
  misc_feature (1)..(485): Homolog of NCBI NO: 12654791 NR Description: DEAD/H (Asp-Glu-Ala-Asp/His) box polypeptide 18
  misc_feature (1)..(485): Homolog of NCBI NO: 7446077 NR Description: DEAD box protein MrDb, Myc-regulated - human
  misc_feature (1)..(485): Homolog of NCBI NO: 32423207 NR Description: hypothetical protein [Neurospora crassa]
  misc_feature (1)..(493): Homolog of NCBI NO: 19115400 NR Description: probable ATP-dependent RNA helicase
  misc_feature (1)..(493): Homolog of NCBI NO: 29150366 NR Description: putative RNA helicase [Oryza sativa (japonica
  misc_feature (1)..(494): Homolog of NCBI NO: 15239187 NR Description: DEAD/DEAH box helicase, putative [Arabidopsis
  misc_feature (1)..(500): Homolog of NCBI NO: 15229677 NR Description: DEAD/DEAH box helicase, putative [Arabidopsis
MEDGEDEKNIVIVGKGIMTNVTFDSLDLSEQTSIAIKEMGFQYMTQIQAGSIQPLLEGKDVLGAARTGSGKTLAFLIPAVELLFKERFSPRNGTGVIVICPTRELAIQTKNVAEELLKHHSQTVSMVIGGNNRRSEAQRIASGSNLVIATPGRLLDHLQNTKAFIYKHLKCLVIDEADRILEENFEEDMNKILKILPKTRQTALFSATQTSKVKDLARVSLTSPVHVDVDDGRRKVTNEGLEQGYCVVPSKQRLILLISFLKKNLNKKIMVFFSTCKSVQFHTEIMKISDVDVSDIHGGMDQNRRTKTFFDFMKAKKGILLCTDVAARGLDIPSVDWIIQYDPPDKPTEYIHRVGRTARGEGAKGKALLVLIPEELQFIRYLKAAKVPVKELEFNEKRLSNVQSALEKCVAKDYNLNKLAKDAYRAYLSAYNSHSLKDIFNVHRLDLLAVAESFCFSSPPKVNLNIESGAGKVRKARKQQGRNGFSPYSPYGKSTPTKEA

SEQ ID NO: 48243 - protein, 483 aa, Arabidopsis thaliana
  peptide (1)..(483): Ceres Seq. ID no. 13648805
  misc_feature (17)..(227): Pfam Name: DEAD/DEAH box helicase Pfam Description: DEAD/DEAH box helicase
  misc_feature (1)..(468): Homolog of NCBI NO: 31981163 NR Description: RIKEN cDNA 2310005B10 [Mus musculus]
  misc_feature (1)..(468): Homolog of NCBI NO: 12860207 NR Description: unnamed protein product [Mus musculus]
  misc_feature (1)..(475): Homolog of NCBI NO: 40745958 NR Description: hypothetical protein AN1949.2 [Aspergillus
  misc_feature (1)..(468): Homolog of NCBI NO: 12654791 NR Description: DEAD/H (Asp-Glu-Ala-Asp/His) box polypeptide 18
  misc_feature (1)..(468): Homolog of NCBI NO: 7446077 NR Description: DEAD box protein MrDb, Myc-regulated - human
  misc_feature (1)..(468): Homolog of NCBI NO: 32423207 NR Description: hypothetical protein [Neurospora crassa]
  misc_feature (1)..(476): Homolog of NCBI NO: 19115400 NR Description: probable ATP-dependent RNA helicase
  misc_feature (1)..(476): Homolog of NCBI NO: 29150366 NR Description: putative RNA helicase [Oryza sativa (japonica
  misc_feature (1)..(477): Homolog of NCBI NO: 15239187 NR Description: DEAD/DEAH box helicase, putative [Arabidopsis
  misc_feature (1)..(483): Homolog of NCBI NO: 15229677 NR Description: DEAD/DEAH box helicase, putative [Arabidopsis
MTNVTFDSLDLSEQTSIAIKEMGFQYMTQIQAGSIQPLLEGKDVLGAARTGSGKTLAFLIPAVELLFKERFSPRNGTGVIVICPTRELAIQTKNVAEELLKHHSQTVSMVIGGNNRRSEAQRIASGSNLVIATPGRLLDHLQNTKAFIYKHLKCLVIDEADRILEENFEEDMNKILKILPKTRQTALFSATQTSKVKDLARVSLTSPVHVDVDDGRRKVTNEGLEQGYCVVPSKQRLILLISFLKKNLNKKIMVFFSTCKSVQFHTEIMKISDVDVSDIHGGMDQNRRTKTFFDFMKAKKGILLCTDVAARGLDIPSVDWIIQYDPPDKPTEYIHRVGRTARGEGAKGKALLVLIPEELQFIRYLKAAKVPVKELEFNEKRLSNVQSALEKCVAKDYNLNKLAKDAYRAYLSAYNSHSLKDIFNVHRLDLLAVAESFCFSSPPKVNLNIESGAGKVRKARKQQGRNGFSPYSPYGKSTPTKEA

SEQ ID NO: 48244 - DNA, 997 bp, Arabidopsis thaliana
  misc_feature (1)..(997): Ceres Seq. ID no. 13648935
  misc_feature: MA Experiment ID: 20000184 Result: Down-regulated in Transcription
  misc_feature: MA Experiment 20000184 PARAMETER Experiment Name: At_Shoots__P Parameter: Age (day) Value: 7
  misc_feature: MA Experiment 20000184 PARAMETER Experiment Name: At_Shoots__P Parameter: Tissue Value: Shoots vs. Whole Plant
  misc_feature: MA Experiment ID: 20000438 Result: Down-regulated in Transcription
  misc_feature: MA Experiment 20000438 PARAMETER Experiment Name: At_Shoots__P Parameter: Age (day) Value: 14
  misc_feature: MA Experiment 20000438 PARAMETER Experiment Name: At_Shoots__P Parameter: Tissue Value: Shoots vs. Whole Plant
  misc_feature: MA Experiment ID: 20001450 Result: Up-regulated in Transcription
  misc_feature: MA Experiment 20001450 PARAMETER Experiment Name: At_Far-red-induction_P Parameter: Age (day) Value: 7
  misc_feature: MA Experiment 20001450 PARAMETER Experiment Name: At_Far-red-induction_P Parameter: Light Value: Far-red vs. White
  misc_feature: MA Experiment 20001450 PARAMETER Experiment Name: At_Far-red-induction_P Parameter: Organism Value: A. thaliana
  misc_feature: MA Experiment 20001450 PARAMETER Experiment Name: At_Far-red-induction_P Parameter: Plant Line Value: Columbia
  misc_feature: MA Experiment 20001450 PARAMETER Experiment Name: At_Far-red-induction_P Parameter: Timepoint (hr) Value: 8
  misc_feature: MA Experiment 20001450 PARAMETER Experiment Name: At_Far-red-induction_P Parameter: Tissue Value: Whole Plant
  misc_feature: MA Experiment ID: 20001451 Result: Up-regulated in Transcription
  misc_feature: MA Experiment 20001451 PARAMETER Experiment Name: At_Far-red-induction_P Parameter: Age (day) Value: 7
  misc_feature: MA Experiment 20001451 PARAMETER Experiment Name: At_Far-red-induction_P Parameter: Light Value: Far-red vs. White
  misc_feature: MA Experiment 20001451 PARAMETER Experiment Name: At_Far-red-induction_P Parameter: Organism Value: A. thaliana
  misc_feature: MA Experiment 20001451 PARAMETER Experiment Name: At_Far-red-induction_P Parameter: Plant Line Value: Columbia
  misc_feature: MA Experiment 20001451 PARAMETER Experiment Name: At_Far-red-induction_P Parameter: Timepoint (hr) Value: 24
  misc_feature: MA Experiment 20001451 PARAMETER Experiment Name: At_Far-red-induction_P Parameter: Tissue Value: Whole Plant
  misc_feature: MA Experiment ID: 20001911 Result: Up-regulated in Transcription
  misc_feature: MA Experiment 20001911 PARAMETER Experiment Name: At_Drought_Reproduction_P Parameter: Age (day) Value: 40
  misc_feature: MA Experiment 20001911 PARAMETER Experiment Name: At_Drought_Reproduction_P Parameter: Organism Value: A. thaliana
  misc_feature: MA Experiment 20001911 PARAMETER Experiment Name: At_Drought_Reproduction_P Parameter: Plant Line Value: WS
  misc_feature: MA Experiment 20001911 PARAMETER Experiment Name: At_Drought_Reproduction_P Parameter: Timepoint (day) Value: 10
  misc_feature: MA Experiment 20001911 PARAMETER Experiment Name: At_Drought_Reproduction_P Parameter: Tissue Value: Flowers
  misc_feature: MA Experiment 20001911 PARAMETER Experiment Name: At_Drought_Reproduction_P Parameter: Treatment Value: Drought vs. No Drought
ggttctctactcttgtcgtcgttggaagaagaggaagagagaggacaagagaatcataagaagaagacatagtcatgggagaggtgaaagtagacgacgatgcgattcttaaatccttcctcgccgaggtcggagaagttgagagagataacgaagtcggcaggattctctcatgcttcaagctgaatccgtttgagcatcttaacctctctttcgattcttccacggatgatgttaaaaggcagtacagaaagatttctttgatggttcatcctgataaatgcaaacatccacaagcacaggaggctttcggagcattggcaaaagcgcaacaactgctgctaaacgaccaagaaagagattatattcttacccaagtccatgctgcaaaagaagagcttaagatgaagagaaagaaacagttaaagaaagacaccgcctctaaaataaagtccttggttgatgagggaaagcatgagcacatatatgagcaatctgaggagtttcagaaggagctcaagttaaaggtccgagagatattaacagaccaagagtggcgtagaagaaaaatggcaatgagaatatcagaagaagaggggagactgaagaaggatgaagcagaacaaaaggagatatggaagaaaaagcgtgagcatgaagaacagtgggaaggaacaagagaaaaaagggtatcaagctggagagactttcagaaagcaggaaagaaggccaaaaaaggagagacgcgacctccaaaattgaagacagaggatccgaacaaatcatacgtccaaaggccggtcaagaaaggctgatctctgccttcatttgtttttgctgttgttgacattgatagatattggtcttctcgaggataatctcagactctctcttcttgtgtctgtgtttcttccctttgtacatcaccaacttcattcgtctttccaaatacatcagagacagggaagcgatatctcacttctcacattatgaccct

SEQ ID NO: 48245 - protein, 246 aa, Arabidopsis thaliana
  peptide (1)..(246): Ceres Seq. ID no. 13648936
  misc_feature (38)..(101): Pfam Name: DnaJ domain Pfam Description: DnaJ domain
  misc_feature (14)..(199): Homolog of NCBI NO: 34871854 NR Description: similar to DnaJ homolog subfamily C member 8
  misc_feature (7)..(220): Homolog of NCBI NO: 40747533 NR Description: conserved hypothetical protein [Aspergillus
  misc_feature (12)..(232): Homolog of NCBI NO: 17510535 NR Description: DNaJ domain (prokaryotic heat shock protein)
  misc_feature (27)..(221): Homolog of NCBI NO: 23619009 NR Description: DNAJ protein, putative [Plasmodium falciparum
  misc_feature (14)..(224): Homolog of NCBI NO: 27369493 NR Description: DnaJ (Hsp40) homolog, subfamily C, member 8 [Mus
  misc_feature (10)..(229): Homolog of NCBI NO: 19112214 NR Description: DNA J domain containing protein
  misc_feature (14)..(232): Homolog of NCBI NO: 21620116 NR Description: similar to DnaJ (Hsp40) homolog, subfamily C,
  misc_feature (14)..(232): Homolog of NCBI NO: 7657611 NR Description: DnaJ (Hsp40) homolog, subfamily C, member 8 [Homo
  misc_feature (14)..(232): Homolog of NCBI NO: 34784000 NR Description: Unknown (protein for IMAGE:5148567) [Mus musculus]
  misc_feature (1)..(246): Homolog of NCBI NO: 22326960 NR Description: DnaJ protein family [Arabidopsis thaliana]
MGEVKVDDDAILKSFLAEVGEVERDNEVGRILSCFKLNPFEHLNLSFDSSTDDVKRQYRKISLMVHPDKCKHPQAQEAFGALAKAQQLLLNDQERDYILTQVHAAKEELKMKRKKQLKKDTASKIKSLVDEGKHEHIYEQSEEFQKELKLKVREILTDQEWRRRKMAMRISEEEGRLKKDEAEQKEIWKKKREHEEQWEGTREKRVSSWRDFQKAGKKAKKGETRPPKLKTEDPNKSYVQRPVKKG

SEQ ID NO: 48246 - protein, 183 aa, Arabidopsis thaliana
  peptide (1)..(183): Ceres Seq. ID no. 13648937
  misc_feature (1)..(136): Homolog of NCBI NO: 34871854 NR Description: similar to DnaJ homolog subfamily C member 8
  misc_feature (1)..(157): Homolog of NCBI NO: 40747533 NR Description: conserved hypothetical protein [Aspergillus
  misc_feature (1)..(169): Homolog of NCBI NO: 17510535 NR Description: DNaJ domain (prokaryotic heat shock protein)
  misc_feature (1)..(158): Homolog of NCBI NO: 23619009 NR Description: DNAJ protein, putative [Plasmodium falciparum
  misc_feature (1)..(161): Homolog of NCBI NO: 27369493 NR Description: DnaJ (Hsp40) homolog, subfamily C, member 8 [Mus
  misc_feature (1)..(166): Homolog of NCBI NO: 19112214 NR Description: DNA J domain containing protein
  misc_feature (1)..(169): Homolog of NCBI NO: 21620116 NR Description: similar to DnaJ (Hsp40) homolog, subfamily C,
  misc_feature (1)..(169): Homolog of NCBI NO: 7657611 NR Description: DnaJ (Hsp40) homolog, subfamily C, member 8 [Homo
  misc_feature (1)..(169): Homolog of NCBI NO: 34784000 NR Description: Unknown (protein for IMAGE:5148567) [Mus musculus]
  misc_feature (1)..(183): Homolog of NCBI NO: 22326960 NR Description: DnaJ protein family [Arabidopsis thaliana]
MVHPDKCKHPQAQEAFGALAKAQQLLLNDQERDYILTQVHAAKEELKMKRKKQLKKDTASKIKSLVDEGKHEHIYEQSEEFQKELKLKVREILTDQEWRRRKMAMRISEEEGRLKKDEAEQKEIWKKKREHEEQWEGTREKRVSSWRDFQKAGKKAKKGETRPPKLKTEDPNKSYVQRPVKKG

SEQ ID NO: 48247 - protein, 136 aa, Arabidopsis thaliana
  peptide (1)..(136): Ceres Seq. ID no. 13648938
  misc_feature (1)..(89): Homolog of NCBI NO: 34871854 NR Description: similar to DnaJ homolog subfamily C member 8
  misc_feature (1)..(110): Homolog of NCBI NO: 40747533 NR Description: conserved hypothetical protein [Aspergillus
  misc_feature (1)..(122): Homolog of NCBI NO: 17510535 NR Description: DNaJ domain (prokaryotic heat shock protein)
  misc_feature (1)..(111): Homolog of NCBI NO: 23619009 NR Description: DNAJ protein, putative [Plasmodium falciparum
  misc_feature (1)..(114): Homolog of NCBI NO: 27369493 NR Description: DnaJ (Hsp40) homolog, subfamily C, member 8 [Mus
  misc_feature (1)..(119): Homolog of NCBI NO: 19112214 NR Description: DNA J domain containing protein
  misc_feature (1)..(122): Homolog of NCBI NO: 21620116 NR Description: similar to DnaJ (Hsp40) homolog, subfamily C,
  misc_feature (1)..(122): Homolog of NCBI NO: 7657611 NR Description: DnaJ (Hsp40) homolog, subfamily C, member 8 [Homo
  misc_feature (1)..(122): Homolog of NCBI NO: 34784000 NR Description: Unknown (protein for IMAGE:5148567) [Mus musculus]
  misc_feature (1)..(136): Homolog of NCBI NO: 22326960 NR Description: DnaJ protein family [Arabidopsis thaliana]
MKRKKQLKKDTASKIKSLVDEGKHEHIYEQSEEFQKELKLKVREILTDQEWRRRKMAMRISEEEGRLKKDEAEQKEIWKKKREHEEQWEGTREKRVSSWRDFQKAGKKAKKGETRPPKLKTEDPNKSYVQRPVKKG

SEQ ID NO: 48248 - DNA, 1620 bp, Arabidopsis thaliana
  misc_feature (1)..(1620): Ceres Seq. ID no. 12559488
  misc_feature: MA Experiment ID: 20000171 Result: Up-regulated in Transcription
  misc_feature: MA Experiment 20000171 PARAMETER Experiment Name: At_42deg_Heat_P Parameter: Age (day) Value: 14
  misc_feature: MA Experiment 20000171 PARAMETER Experiment Name: At_42deg_Heat_P Parameter: Organism Value: A. thaliana
  misc_feature: MA Experiment 20000171 PARAMETER Experiment Name: At_42deg_Heat_P Parameter: Plant Line Value: WS
  misc_feature: MA Experiment 20000171 PARAMETER Experiment Name: At_42deg_Heat_P Parameter: Temperature (deg C) Value: 42 vs. 22
  misc_feature: MA Experiment 20000171 PARAMETER Experiment Name: At_42deg_Heat_P Parameter: Timepoint (hr) Value: 1
  misc_feature: MA Experiment 20000171 PARAMETER Experiment Name: At_42deg_Heat_P Parameter: Tissue Value: Aerial
  misc_feature: MA Experiment ID: 20000173 Result: Up-regulated in Transcription
  misc_feature: MA Experiment 20000173 PARAMETER Experiment Name: At_42deg_Heat_P Parameter: Age (day) Value: 14
  misc_feature: MA Experiment 20000173 PARAMETER Experiment Name: At_42deg_Heat_P Parameter: Organism Value: A. thaliana
  misc_feature: MA Experiment 20000173 PARAMETER Experiment Name: At_42deg_Heat_P Parameter: Plant Line Value: WS
  misc_feature: MA Experiment 20000173 PARAMETER Experiment Name: At_42deg_Heat_P Parameter: Temperature (deg C) Value: 42 vs. 22
  misc_feature: MA Experiment 20000173 PARAMETER Experiment Name: At_42deg_Heat_P Parameter: Timepoint (hr) Value: 6
  misc_feature: MA Experiment 20000173 PARAMETER Experiment Name: At_42deg_Heat_P Parameter: Tissue Value: Aerial
  misc_feature: MA Experiment ID: 20000437 Result: Up-regulated in Transcription
  misc_feature: MA Experiment 20000437 PARAMETER Experiment Name: At_Drought_P Parameter: Age (day) Value: 8
  misc_feature: MA Experiment 20000437 PARAMETER Experiment Name: At_Drought_P Parameter: Organism Value: A. thaliana
  misc_feature: MA Experiment 20000437 PARAMETER Experiment Name: At_Drought_P Parameter: Plant Line Value: WS
  misc_feature: MA Experiment 20000437 PARAMETER Experiment Name: At_Drought_P Parameter: Timepoint (hr) Value: 24
  misc_feature: MA Experiment 20000437 PARAMETER Experiment Name: At_Drought_P Parameter: Tissue Value: Whole Plant
  misc_feature: MA Experiment 20000437 PARAMETER Experiment Name: At_Drought_P Parameter: Treatment Value: Drought vs. No Drought
  misc_feature: MA Experiment ID: 20001451 Result: Up-regulated in Transcription
  misc_feature: MA Experiment 20001451 PARAMETER Experiment Name: At_Far-red-induction_P Parameter: Age (day) Value: 7
  misc_feature: MA Experiment 20001451 PARAMETER Experiment Name: At_Far-red-induction_P Parameter: Light Value: Far-red vs. White
  misc_feature: MA Experiment 20001451 PARAMETER Experiment Name: At_Far-red-induction_P Parameter: Organism Value: A. thaliana
  misc_feature: MA Experiment 20001451 PARAMETER Experiment Name: At_Far-red-induction_P Parameter: Plant Line Value: Columbia
  misc_feature: MA Experiment 20001451 PARAMETER Experiment Name: At_Far-red-induction_P Parameter: Timepoint (hr) Value: 24
  misc_feature: MA Experiment 20001451 PARAMETER Experiment Name: At_Far-red-induction_P Parameter: Tissue Value: Whole Plant
  misc_feature: MA Experiment ID: 20001905 Result: Up-regulated in Transcription
  misc_feature: MA Experiment 20001905 PARAMETER Experiment Name: At_Drought_Reproduction_P Parameter: Age (day) Value: 40
  misc_feature: MA Experiment 20001905 PARAMETER Experiment Name: At_Drought_Reproduction_P Parameter: Organism Value: A. thaliana
  misc_feature: MA Experiment 20001905 PARAMETER Experiment Name: At_Drought_Reproduction_P Parameter: Plant Line Value: WS
  misc_feature: MA Experiment 20001905 PARAMETER Experiment Name: At_Drought_Reproduction_P Parameter: Timepoint (day) Value: 10
  misc_feature: MA Experiment 20001905 PARAMETER Experiment Name: At_Drought_Reproduction_P Parameter: Tissue Value: Rosettes
  misc_feature: MA Experiment 20001905 PARAMETER Experiment Name: At_Drought_Reproduction_P Parameter: Treatment Value: Drought vs. No Drought
  misc_feature: MA Experiment ID: 20001911 Result: Up-regulated in Transcription
  misc_feature: MA Experiment 20001911 PARAMETER Experiment Name: At_Drought_Reproduction_P Parameter: Age (day) Value: 40
  misc_feature: MA Experiment 20001911 PARAMETER Experiment Name: At_Drought_Reproduction_P Parameter: Organism Value: A. thaliana
  misc_feature: MA Experiment 20001911 PARAMETER Experiment Name: At_Drought_Reproduction_P Parameter: Plant Line Value: WS
  misc_feature: MA Experiment 20001911 PARAMETER Experiment Name: At_Drought_Reproduction_P Parameter: Timepoint (day) Value: 10
  misc_feature: MA Experiment 20001911 PARAMETER Experiment Name: At_Drought_Reproduction_P Parameter: Tissue Value: Flowers
  misc_feature: MA Experiment 20001911 PARAMETER Experiment Name: At_Drought_Reproduction_P Parameter: Treatment Value: Drought vs. No Drought
aaacccagaaggatctggaagaagaggaggatccttttcattttttctttcttggataaactctctcctatctttttttttttcttttcttcttctacttttctaatttcttacgacaattctcctcctttcgtacataaaacaaagaaaccctctctttttctcatcttcttcaattttcaaaactcaaaatccttcttcatcgtcgctacatttttctgtgcttctcggtttctgctatcgaacaacaagactcaaaaggtagaaagaatcggacatggaagaagcagttgtaacgaggtattggtgtcatatgtgttctcaaactgtgaatccagtcatggaagctgagatcaaatgtcccttttgtcaaagtgggtttgttgaagaaatggaagatgacgacgatcatgattcttctgatccggctgatgttagagcaaacaactctctttgggcgcctatcttgatggaacttatgaatgatcctgtgcgtcgtaggagaaaccagagtgttgagtctgttgaagataatcaaaacgaggtacagaccgagaacaatgaagacgatggagaaaatgatttggattggcagcttcaagagattctcaggagaaggagaagacattccgctgctgttttgcagttgcttcaggggatacgagcagggttgtctgtagaatctgagagtactggtaatggaggtaataatccgggacgggtgatcttgatcaatacctccaatcagactatcacggttcaaaactctgctgatatggattctgtacctgctggttctttaggtgactatttcattggtcctggatttgaaatgttgcttcaacgtctagctgagaatgatcccaacagatatggaacacctcctgctaaaaaagaagctgtcgaggctttggctactgtgaaaatcgaagagactctgcaatgttcggtttgtttagatgattttgagattggaactgaggcaaagctgatgccctgtacgcacaagtttcatagtgactgcttgttaccatggcttgagcttcacagttcatgcccggtttgcagatatcagttacctgcagatgaagccaagactgattcagtaacaacaacgagcgataacaatggaagcagtagtgcttctgctacaaccagccatggagctgagaacagcgatggaaaccggcgccaagaagaagaagaagaagaagaagaggaggaggaggaggagaacgagaacaatgacggaagcggattctcgatcccgtggccgtttagcaccttgttctcctcgtcgcaagatagcaatgcaccaacggattctagttaagacatgttccctgagcaacataagctttttggtgtgatcatgaaatctcggttctacctaaatctgatcttttgtctgtacataagtttctcagatttggttgaatgctacatctttggaaaacaaatatctttcagtttgtgtttttttaattgtttttgagcaaatcttttgccggattctgtaagtcgcttgtgtgttttttgttgtcaaccaaagccacttttgcaacttagtttgttaaattaatgccttaatggtaaaataacaagattggtggctgtagt

SEQ ID NO: 48249 - protein, 351 aa, Arabidopsis thaliana
  peptide (1)..(351): Ceres Seq. ID no. 12559489
  misc_feature (223)..(263): Pfam Name: Zinc finger, C3HC4 type (RING finger) Pfam Description: Zinc finger, C3HC4 type (RING finger)
  misc_feature (223)..(263): Pfam Name: Zinc finger, C3HC4 type (RING finger) Pfam Description: Zinc finger, C3HC4 type (RING finger)
  misc_feature (173)..(290): Homolog of NCBI NO: 11994207 NR Description: gene_id:MPN9.20~unknown protein [Arabidopsis
  misc_feature (2)..(302): Homolog of NCBI NO: 34903272 NR Description: unnamed protein product [Oryza sativa (japonica
  misc_feature (312)..(351): Homolog of NCBI NO: 22328949 NR Description: putative protein
  misc_feature (312)..(351): Homolog of NCBI NO: 7486783 NR Description: hypothetical protein M3E9.170 - Arabidopsis
  misc_feature (11)..(306): Homolog of NCBI NO: 22328949 NR Description: putative protein
  misc_feature (173)..(290): Homolog of NCBI NO: 11994207 NR Description: gene_id:MPN9.20~unknown protein [Arabidopsis
  misc_feature (312)..(351): Homolog of NCBI NO: 22328949 NR Description: putative protein
  misc_feature (11)..(306): Homolog of NCBI NO: 22328949 NR Description: putative protein
  misc_feature (1)..(351): Homolog of NCBI NO: 18405411 NR Description: expressed protein
  misc_feature (1)..(303): Homolog of NCBI NO: 15231238 NR Description: unknown protein; protein id: At3g13430.1
  misc_feature (1)..(303): Homolog of NCBI NO: 38454178 NR Description: At3g13430 [Arabidopsis thaliana]
  misc_feature (99)..(351): Homolog of NCBI NO: 15241188 NR Description: putative protein
  misc_feature (11)..(306): Homolog of NCBI NO: 7486783 NR Description: hypothetical protein M3E9.170 - Arabidopsis
  misc_feature (312)..(351): Homolog of NCBI NO: 7486783 NR Description: hypothetical protein M3E9.170 - Arabidopsis
  misc_feature (2)..(302): Homolog of NCBI NO: 34903272 NR Description: unnamed protein product [Oryza sativa (japonica
  misc_feature (11)..(306): Homolog of NCBI NO: 7486783 NR Description: hypothetical protein M3E9.170 - Arabidopsis
  misc_feature (99)..(351): Homolog of NCBI NO: 15241188 NR Description: putative protein
  misc_feature (1)..(303): Homolog of NCBI NO: 38454178 NR Description: At3g13430 [Arabidopsis thaliana]
  misc_feature (1)..(303): Homolog of NCBI NO: 15231238 NR Description: unknown protein; protein id: At3g13430.1
  misc_feature (1)..(351): Homolog of NCBI NO: 18405411 NR Description: expressed protein
MEEAVVTRYWCHMCSQTVNPVMEAEIKCPFCQSGFVEEMEDDDDHDSSDPADVRANNSLWAPILMELMNDPVRRRRNQSVESVEDNQNEVQTENNEDDGENDLDWQLQEILRRRRRHSAAVLQLLQGIRAGLSVESESTGNGGNNPGRVILINTSNQTITVQNSADMDSVPAGSLGDYFIGPGFEMLLQRLAENDPNRYGTPPAKKEAVEALATVKIEETLQCSVCLDDFEIGTEAKLMPCTHKFHSDCLLPWLELHSSCPVCRYQLPADEAKTDSVTTTSDNNGSSSASATTSHGAENSDGNRRQEEEEEEEEEEEEENENNDGSGFSIPWPFSTLFSSSQDSNAPTDSS

SEQ ID NO: 48250 - protein, 339 aa, Arabidopsis thaliana
  peptide (1)..(339): Ceres Seq. ID no. 12559490
  misc_feature (211)..(251): Pfam Name: Zinc finger, C3HC4 type (RING finger) Pfam Description: Zinc finger, C3HC4 type (RING finger)
  misc_feature (211)..(251): Pfam Name: Zinc finger, C3HC4 type (RING finger) Pfam Description: Zinc finger, C3HC4 type (RING finger)
  misc_feature (161)..(278): Homolog of NCBI NO: 11994207 NR Description: gene_id:MPN9.20~unknown protein [Arabidopsis
  misc_feature (1)..(290): Homolog of NCBI NO: 34903272 NR Description: unnamed protein product [Oryza sativa (japonica
  misc_feature (300)..(339): Homolog of NCBI NO: 22328949 NR Description: putative protein
  misc_feature (300)..(339): Homolog of NCBI NO: 7486783 NR Description: hypothetical protein M3E9.170 - Arabidopsis
  misc_feature (1)..(294): Homolog of NCBI NO: 22328949 NR Description: putative protein
  misc_feature (161)..(278): Homolog of NCBI NO: 11994207 NR Description: gene_id:MPN9.20~unknown protein [Arabidopsis
  misc_feature (300)..(339): Homolog of NCBI NO: 22328949 NR Description: putative protein
  misc_feature (1)..(294): Homolog of NCBI NO: 22328949 NR Description: putative protein
  misc_feature (1)..(339): Homolog of NCBI NO: 18405411 NR Description: expressed protein
  misc_feature (1)..(291): Homolog of NCBI NO: 15231238 NR Description: unknown protein; protein id: At3g13430.1
  misc_feature (1)..(291): Homolog of NCBI NO: 38454178 NR Description: At3g13430 [Arabidopsis thaliana]
  misc_feature (87)..(339): Homolog of NCBI NO: 15241188 NR Description: putative protein
  misc_feature (1)..(294): Homolog of NCBI NO: 7486783 NR Description: hypothetical protein M3E9.170 - Arabidopsis
  misc_feature (300)..(339): Homolog of NCBI NO: 7486783 NR Description: hypothetical protein M3E9.170 - Arabidopsis
  misc_feature (1)..(290): Homolog of NCBI NO: 34903272 NR Description: unnamed protein product [Oryza sativa (japonica
  misc_feature (1)..(294): Homolog of NCBI NO: 7486783 NR Description: hypothetical protein M3E9.170 - Arabidopsis
  misc_feature (87)..(339): Homolog of NCBI NO: 15241188 NR Description: putative protein
  misc_feature (1)..(291): Homolog of NCBI NO: 38454178 NR Description: At3g13430 [Arabidopsis thaliana]
  misc_feature (1)..(291): Homolog of NCBI NO: 15231238 NR Description: unknown protein; protein id: At3g13430.1
  misc_feature (1)..(339): Homolog of NCBI NO: 18405411 NR Description: expressed protein
MCSQTVNPVMEAEIKCPFCQSGFVEEMEDDDDHDSSDPADVRANNSLWAPILMELMNDPVRRRRNQSVESVEDNQNEVQTENNEDDGENDLDWQLQEILRRRRRHSAAVLQLLQGIRAGLSVESESTGNGGNNPGRVILINTSNQTITVQNSADMDSVPAGSLGDYFIGPGFEMLLQRLAENDPNRYGTPPAKKEAVEALATVKIEETLQCSVCLDDFEIGTEAKLMPCTHKFHSDCLLPWLELHSSCPVCRYQLPADEAKTDSVTTTSDNNGSSSASATTSHGAENSDGNRRQEEEEEEEEEEEEENENNDGSGFSIPWPFSTLFSSSQDSNAPTDSS

SEQ ID NO: 48251 - protein, 330 aa, Arabidopsis thaliana
  peptide (1)..(330): Ceres Seq. ID no. 12559491
  misc_feature (202)..(242): Pfam Name: Zinc finger, C3HC4 type (RING finger) Pfam Description: Zinc finger, C3HC4 type (RING finger)
  misc_feature (202)..(242): Pfam Name: Zinc finger, C3HC4 type (RING finger) Pfam Description: Zinc finger, C3HC4 type (RING finger)
  misc_feature (152)..(269): Homolog of NCBI NO: 11994207 NR Description: gene_id:MPN9.20~unknown protein [Arabidopsis
  misc_feature (1)..(281): Homolog of NCBI NO: 34903272 NR Description: unnamed protein product [Oryza sativa (japonica
  misc_feature (291)..(330): Homolog of NCBI NO: 22328949 NR Description: putative protein
  misc_feature (291)..(330): Homolog of NCBI NO: 7486783 NR Description: hypothetical protein M3E9.170 - Arabidopsis
  misc_feature (1)..(285): Homolog of NCBI NO: 22328949 NR Description: putative protein
  misc_feature (152)..(269): Homolog of NCBI NO: 11994207 NR Description: gene_id:MPN9.20~unknown protein [Arabidopsis
  misc_feature (291)..(330): Homolog of NCBI NO: 22328949 NR Description: putative protein
  misc_feature (1)..(285): Homolog of NCBI NO: 22328949 NR Description: putative protein
  misc_feature (1)..(330): Homolog of NCBI NO: 18405411 NR Description: expressed protein
  misc_feature (1)..(282): Homolog of NCBI NO: 15231238 NR Description: unknown protein; protein id: At3g13430.1
  misc_feature (1)..(282): Homolog of NCBI NO: 38454178 NR Description: At3g13430 [Arabidopsis thaliana]
  misc_feature (78)..(330): Homolog of NCBI NO: 15241188 NR Description: putative protein
  misc_feature (1)..(285): Homolog of NCBI NO: 7486783 NR Description: hypothetical protein M3E9.170 - Arabidopsis
  misc_feature (291)..(330): Homolog of NCBI NO: 7486783 NR Description: hypothetical protein M3E9.170 - Arabidopsis
  misc_feature (1)..(281): Homolog of NCBI NO: 34903272 NR Description: unnamed protein product [Oryza sativa (japonica
  misc_feature (1)..(285): Homolog of NCBI NO: 7486783 NR Description: hypothetical protein M3E9.170 - Arabidopsis
  misc_feature (78)..(330): Homolog of NCBI NO: 15241188 NR Description: putative protein
  misc_feature (1)..(282): Homolog of NCBI NO: 38454178 NR Description: At3g13430 [Arabidopsis thaliana]
  misc_feature (1)..(282): Homolog of NCBI NO: 15231238 NR Description: unknown protein; protein id: At3g13430.1
  misc_feature (1)..(330): Homolog of NCBI NO: 18405411 NR Description: expressed protein
MEAEIKCPFCQSGFVEEMEDDDDHDSSDPADVRANNSLWAPILMELMNDPVRRRRNQSVESVEDNQNEVQTENNEDDGENDLDWQLQEILRRRRRHSAAVLQLLQGIRAGLSVESESTGNGGNNPGRVILINTSNQTITVQNSADMDSVPAGSLGDYFIGPGFEMLLQRLAENDPNRYGTPPAKKEAVEALATVKIEETLQCSVCLDDFEIGTEAKLMPCTHKFHSDCLLPWLELHSSCPVCRYQLPADEAKTDSVTTTSDNNGSSSASATTSHGAENSDGNRRQEEEEEEEEEEEEENENNDGSGFSIPWPFSTLFSSSQDSNAPTDSS

SEQ ID NO: 48252 - DNA, 2152 bp, Arabidopsis thaliana; identical to SEQ ID NO: 45499
  misc_feature (1)..(2152): Ceres Seq. ID no. 13576317
  misc_feature: MA Experiment ID: 20000171 Result: Down-regulated in Transcription
  misc_feature: MA Experiment 20000171 PARAMETER Experiment Name: At_42deg_Heat_P Parameter: Age (day) Value: 14
  misc_feature: MA Experiment 20000171 PARAMETER Experiment Name: At_42deg_Heat_P Parameter: Organism Value: A. thaliana
  misc_feature: MA Experiment 20000171 PARAMETER Experiment Name: At_42deg_Heat_P Parameter: Plant Line Value: WS
  misc_feature: MA Experiment 20000171 PARAMETER Experiment Name: At_42deg_Heat_P Parameter: Temperature (deg C) Value: 42 vs. 22
  misc_feature: MA Experiment 20000171 PARAMETER Experiment Name: At_42deg_Heat_P Parameter: Timepoint (hr) Value: 1
  misc_feature: MA Experiment 20000171 PARAMETER Experiment Name: At_42deg_Heat_P Parameter: Tissue Value: Aerial
  misc_feature: MA Experiment ID: 20000173 Result: Down-regulated in Transcription
  misc_feature: MA Experiment 20000173 PARAMETER Experiment Name: At_42deg_Heat_P Parameter: Age (day) Value: 14
  misc_feature: MA Experiment 20000173 PARAMETER Experiment Name: At_42deg_Heat_P Parameter: Organism Value: A. thaliana
  misc_feature: MA Experiment 20000173 PARAMETER Experiment Name: At_42deg_Heat_P Parameter: Plant Line Value: WS
  misc_feature: MA Experiment 20000173 PARAMETER Experiment Name: At_42deg_Heat_P Parameter: Temperature (deg C) Value: 42 vs. 22
  misc_feature: MA Experiment 20000173 PARAMETER Experiment Name: At_42deg_Heat_P Parameter: Timepoint (hr) Value: 6
  misc_feature: MA Experiment 20000173 PARAMETER Experiment Name: At_42deg_Heat_P Parameter: Tissue Value: Aerial
  misc_feature: MA Experiment ID: 20000179 Result: Down-regulated in Transcription
  misc_feature: MA Experiment 20000179 PARAMETER Experiment Name: At_Germinating_Seeds_P Parameter: Age (hr) Value: 6 vs. 0
  misc_feature: MA Experiment 20000179 PARAMETER Experiment Name: At_Germinating_Seeds_P Parameter: Tissue Value: Germinating Seeds
  misc_feature: MA Experiment ID: 20000180 Result: Down-regulated in Transcription
  misc_feature: MA Experiment 20000180 PARAMETER Experiment Name: At_Germinating_Seeds_P Parameter: Age (hr) Value: 24 vs. 0
  misc_feature: MA Experiment 20000180 PARAMETER Experiment Name: At_Germinating_Seeds_P Parameter: Tissue Value: Germinating Seeds
  misc_feature: MA Experiment ID: 20000234 Result: Up-regulated in Transcription
  misc_feature: MA Experiment 20000234 PARAMETER Experiment Name: At_Siliques_P Parameter: Age (day) Value: 21
  misc_feature: MA Experiment 20000234 PARAMETER Experiment Name: At_Siliques_P Parameter: Organism Value: A. thaliana
  misc_feature: MA Experiment 20000234 PARAMETER Experiment Name: At_Siliques_P Parameter: Plant Line Value: WS
  misc_feature: MA Experiment 20000234 PARAMETER Experiment Name: At_Siliques_P Parameter: Tissue Value: Less Than 5mm Siliques vs. Whole Plant
  misc_feature: MA Experiment ID: 20000235 Result: Up-regulated in Transcription
  misc_feature: MA Experiment 20000235 PARAMETER Experiment Name: At_Siliques_P Parameter: Age (day) Value: 21
  misc_feature: MA Experiment 20000235 PARAMETER Experiment Name: At_Siliques_P Parameter: Organism Value: A. thaliana
  misc_feature: MA Experiment 20000235 PARAMETER Experiment Name: At_Siliques_P Parameter: Plant Line Value: WS
  misc_feature: MA Experiment 20000235 PARAMETER Experiment Name: At_Siliques_P Parameter: Tissue Value: 5-10mm Siliques vs. Whole Plant
  misc_feature: MA Experiment ID: 20000265 Result: Down-regulated in Transcription
  misc_feature: MA Experiment 20000265 PARAMETER Experiment Name: At_Open_Flower_P Parameter: Age (day) Value: 21
  misc_feature: MA Experiment 20000265 PARAMETER Experiment Name: At_Open_Flower_P Parameter: Plant Line Value: WS
  misc_feature: MA Experiment 20000265 PARAMETER Experiment Name: At_Open_Flower_P Parameter: Tissue Value: Closed Flower vs. Whole Plant
  misc_feature: MA Experiment ID: 20000439 Result: Down-regulated in Transcription
  misc_feature: MA Experiment 20000439 PARAMETER Experiment Name: At_Roots__P Parameter: Age (day) Value: 14 vs. 21
  misc_feature: MA Experiment 20000439 PARAMETER Experiment Name: At_Roots__P Parameter: Organism Value: A. thaliana
  misc_feature: MA Experiment 20000439 PARAMETER Experiment Name: At_Roots__P Parameter: Tissue Value: Roots vs. Whole Plant
  misc_feature: MA Experiment ID: 20000709 Result: Up-regulated in Transcription
  misc_feature: MA Experiment 20000709 PARAMETER Experiment Name: At_15mM_NH4NO3_L-to-H_P Parameter: Age (hr) Value: 14
  misc_feature: MA Experiment 20000709 PARAMETER Experiment Name: At_15mM_NH4NO3_L-to-H_P Parameter: Organism Value: A. thaliana
  misc_feature: MA Experiment 20000709 PARAMETER Experiment Name: At_15mM_NH4NO3_L-to-H_P Parameter: Plant Line Value: WS
  misc_feature: MA Experiment 20000709 PARAMETER Experiment Name: At_15mM_NH4NO3_L-to-H_P Parameter: Timepoint (hr) Value: 4
  misc_feature: MA Experiment 20000709 PARAMETER Experiment Name: At_15mM_NH4NO3_L-to-H_P Parameter: Tissue Value: Aerial
  misc_feature: MA Experiment 20000709 PARAMETER Experiment Name: At_15mM_NH4NO3_L-to-H_P Parameter: Treatment Value: 15mM NH4NO3 vs. 30mM Mannitol
  misc_feature: MA Experiment ID: 20001451 Result: Up-regulated in Transcription
  misc_feature: MA Experiment 20001451 PARAMETER Experiment Name: At_Far-red-induction_P Parameter: Age (day) Value: 7
  misc_feature: MA Experiment 20001451 PARAMETER Experiment Name: At_Far-red-induction_P Parameter: Light Value: Far-red vs. White
  misc_feature: MA Experiment 20001451 PARAMETER Experiment Name: At_Far-red-induction_P Parameter: Organism Value: A. thaliana
  misc_feature: MA Experiment 20001451 PARAMETER Experiment Name: At_Far-red-induction_P Parameter: Plant Line Value: Columbia
  misc_feature: MA Experiment 20001451 PARAMETER Experiment Name: At_Far-red-induction_P Parameter: Timepoint (hr) Value: 24
  misc_feature: MA Experiment 20001451 PARAMETER Experiment Name: At_Far-red-induction_P Parameter: Tissue Value: Whole Plant
  misc_feature: MA Experiment ID: 20001560 Result: Up-regulated in Transcription
  misc_feature: MA Experiment 20001560 PARAMETER Experiment Name: At_Drought_Soil_Dry_P Parameter: Age (day) Value: 28
  misc_feature: MA Experiment 20001560 PARAMETER Experiment Name: At_Drought_Soil_Dry_P Parameter: Organism Value: A. thaliana
  misc_feature: MA Experiment 20001560 PARAMETER Experiment Name: At_Drought_Soil_Dry_P Parameter: Plant Line Value: WS
  misc_feature: MA Experiment 20001560 PARAMETER Experiment Name: At_Drought_Soil_Dry_P Parameter: Post Timepoint (hr) Value: None
  misc_feature: MA Experiment 20001560 PARAMETER Experiment Name: At_Drought_Soil_Dry_P Parameter: Post-Treatment Value: None
  misc_feature: MA Experiment 20001560 PARAMETER Experiment Name: At_Drought_Soil_Dry_P Parameter: Timepoint (day) Value: 14
  misc_feature: MA Experiment 20001560 PARAMETER Experiment Name: At_Drought_Soil_Dry_P Parameter: Treatment Value: Drought vs. No Drought

SEQ ID NO: 48253 - protein, 633 aa, Arabidopsis thaliana; identical to SEQ ID NO: 45500
  peptide (1)..(633): Ceres Seq. ID no. 13576318
  misc_feature (105)..(619): Pfam Name: Putative methyltransferase Pfam Description: Putative methyltransferase
  misc_feature (105)..(619): Pfam Name: Putative methyltransferase Pfam Description: Putative methyltransferase
  misc_feature (105)..(619): Pfam Name: Putative methyltransferase Pfam Description: Putative methyltransferase
  misc_feature (10)..(622): Homolog of NCBI NO: 18071395 NR Description: hypothetical protein [Oryza sativa]
  misc_feature (71)..(626): Homolog of NCBI NO: 9665165 NR Description: Unknown Protein [Arabidopsis thaliana]
  misc_feature (17)..(632): Homolog of NCBI NO: 15235080 NR Description: dehydration-induced protein family [Arabidopsis
  misc_feature (31)..(629): Homolog of NCBI NO: 24413975 NR Description: hypothetical protein~similar to Oryza sativa
  misc_feature (71)..(626): Homolog of NCBI NO: 18398763 NR Description: dehydration-induced protein family [Arabidopsis
  misc_feature (10)..(622): Homolog of NCBI NO: 18071395 NR Description: hypothetical protein [Oryza sativa]
  misc_feature (17)..(632): Homolog of NCBI NO: 15235080 NR Description: dehydration-induced protein family [Arabidopsis
  misc_feature (71)..(626): Homolog of NCBI NO: 18398763 NR Description: dehydration-induced protein family [Arabidopsis
  misc_feature (31)..(629): Homolog of NCBI NO: 24413975 NR Description: hypothetical protein~similar to Oryza sativa
  misc_feature (17)..(632): Homolog of NCBI NO: 15235080 NR Description: dehydration-induced protein family [Arabidopsis
  misc_feature (71)..(626): Homolog of NCBI NO: 9665165 NR Description: Unknown Protein [Arabidopsis thaliana]
  misc_feature (10)..(622): Homolog of NCBI NO: 18071395 NR Description: hypothetical protein [Oryza sativa]
  misc_feature (11)..(633): Homolog of NCBI NO: 15225560 NR Description: dehydration-induced protein family [Arabidopsis
  misc_feature (73)..(623): Homolog of NCBI NO: 38567915 NR Description: OSJNBa0088I22.11 [Oryza sativa (japonica
  misc_feature (8)..(69): Homolog of NCBI NO: 38567915 NR Description: OSJNBa0088I22.11 [Oryza sativa (japonica
  misc_feature (15)..(624): Homolog of NCBI NO: 34898042 NR Description: OSJNBa0038F22.19 [Oryza sativa (japonica
  misc_feature (9)..(629): Homolog of NCBI NO: 37535962 NR Description: unknown protein [Oryza sativa (japonica
  misc_feature (11)..(633): Homolog of NCBI NO: 15225560 NR Description: dehydration-induced protein family [Arabidopsis
  misc_feature (73)..(623): Homolog of NCBI NO: 38567915 NR Description: OSJNBa0088I22.11 [Oryza sativa (japonica
  misc_feature (8)..(69): Homolog of NCBI NO: 38567915 NR Description: OSJNBa0088I22.11 [Oryza sativa (japonica
  misc_feature (15)..(624): Homolog of NCBI NO: 34898042 NR Description: OSJNBa0038F22.19 [Oryza sativa (japonica
  misc_feature (9)..(629): Homolog of NCBI NO: 37535962 NR Description: unknown protein [Oryza sativa (japonica
  misc_feature (71)..(626): Homolog of NCBI NO: 18398763 NR Description: dehydration-induced protein family [Arabidopsis
  misc_feature (31)..(629): Homolog of NCBI NO: 24413975 NR Description: hypothetical protein~similar to Oryza sativa
  misc_feature (71)..(626): Homolog of NCBI NO: 9665165 NR Description: Unknown Protein [Arabidopsis thaliana]
  misc_feature (9)..(629): Homolog of NCBI NO: 37535962 NR Description: unknown protein [Oryza sativa (japonica
  misc_feature (15)..(624): Homolog of NCBI NO: 34898042 NR Description: OSJNBa0038F22.19 [Oryza sativa (japonica
  misc_feature (8)..(69): Homolog of NCBI NO: 38567915 NR Description: OSJNBa0088I22.11 [Oryza sativa (japonica
  misc_feature (73)..(623): Homolog of NCBI NO: 38567915 NR Description: OSJNBa0088I22.11 [Oryza sativa (japonica
  misc_feature (11)..(633): Homolog of NCBI NO: 15225560 NR Description: dehydration-induced protein family [Arabidopsis

SEQ ID NO: 48254 - protein, 439 aa, Arabidopsis thaliana; identical to SEQ ID NO: 45501
  peptide (1)..(439): Ceres Seq. ID no. 13576319
  misc_feature (1)..(425): Pfam Name: Putative methyltransferase Pfam Description: Putative methyltransferase
  misc_feature (1)..(425): Pfam Name: Putative methyltransferase Pfam Description: Putative methyltransferase
  misc_feature (1)..(425): Pfam Name: Putative methyltransferase Pfam Description: Putative methyltransferase
  misc_feature (1)..(428): Homolog of NCBI NO: 18396075 NR Description: dehydration-induced protein family [Arabidopsis
  misc_feature (1)..(428): Homolog of NCBI NO: 18071395 NR Description: hypothetical protein [Oryza sativa]
  misc_feature (1)..(432): Homolog of NCBI NO: 9665165 NR Description: Unknown Protein [Arabidopsis thaliana]
  misc_feature (1)..(438): Homolog of NCBI NO: 15235080 NR Description: dehydration-induced protein family [Arabidopsis
  misc_feature (1)..(435): Homolog of NCBI NO: 24413975 NR Description: hypothetical protein~similar to Oryza sativa
  misc_feature (1)..(428): Homolog of NCBI NO: 18396075 NR Description: dehydration-induced protein family [Arabidopsis
  misc_feature (1)..(432): Homolog of NCBI NO: 9665165 NR Description: Unknown Protein [Arabidopsis thaliana]
  misc_feature (1)..(435): Homolog of NCBI NO: 24413975 NR Description: hypothetical protein~similar to Oryza sativa
  misc_feature (1)..(438): Homolog of NCBI NO: 15235080 NR Description: dehydration-induced protein family [Arabidopsis
  misc_feature (1)..(432): Homolog of NCBI NO: 9665165 NR Description: Unknown Protein [Arabidopsis thaliana]
  misc_feature (1)..(428): Homolog of NCBI NO: 18071395 NR Description: hypothetical protein [Oryza sativa]
  misc_feature (1)..(428): Homolog of NCBI NO: 18396075 NR Description: dehydration-induced protein family [Arabidopsis
  misc_feature (1)..(439): Homolog of NCBI NO: 15225560 NR Description: dehydration-induced protein family [Arabidopsis
  misc_feature (1)..(429): Homolog of NCBI NO: 38567915 NR Description: OSJNBa0088I22.11 [Oryza sativa (japonica
  misc_feature (1)..(430): Homolog of NCBI NO: 34898042 NR Description: OSJNBa0038F22.19 [Oryza sativa (japonica
  misc_feature (1)..(435): Homolog of NCBI NO: 37535962 NR Description: unknown protein [Oryza sativa (japonica
  misc_feature (1)..(432): Homolog of NCBI NO: 18398763 NR Description: dehydration-induced protein family [Arabidopsis
  misc_feature (1)..(439): Homolog of NCBI NO: 15225560 NR Description: dehydration-induced protein family [Arabidopsis
  misc_feature (1)..(429): Homolog of NCBI NO: 38567915 NR Description: OSJNBa0088I22.11 [Oryza sativa (japonica
  misc_feature (1)..(430): Homolog of NCBI NO: 34898042 NR Description: OSJNBa0038F22.19 [Oryza sativa (japonica
  misc_feature (1)..(435): Homolog of NCBI NO: 37535962 NR Description: unknown protein [Oryza sativa (japonica
  misc_feature (1)..(432): Homolog of NCBI NO: 18398763 NR Description: dehydration-induced protein family [Arabidopsis
  misc_feature (1)..(435): Homolog of NCBI NO: 24413975 NR Description: hypothetical protein~similar to Oryza sativa
  misc_feature (1)..(438): Homolog of NCBI NO: 15235080 NR Description: dehydration-induced protein family [Arabidopsis
  misc_feature (1)..(428): Homolog of NCBI NO: 18071395 NR Description: hypothetical protein [Oryza sativa]
  misc_feature (1)..(432): Homolog of NCBI NO: 18398763 NR Description: dehydration-induced protein family [Arabidopsis
  misc_feature (1)..(435): Homolog of NCBI NO: 37535962 NR Description: unknown protein [Oryza sativa (japonica
  misc_feature (1)..(430): Homolog of NCBI NO: 34898042 NR Description: OSJNBa0038F22.19 [Oryza sativa (japonica
  misc_feature (1)..(429): Homolog of NCBI NO: 38567915 NR Description: OSJNBa0088I22.11 [Oryza sativa (japonica
  misc_feature (1)..(439): Homolog of NCBI NO: 15225560 NR Description: dehydration-induced protein family [Arabidopsis

SEQ ID NO: 48255 - protein, 398 aa, Arabidopsis thaliana; identical to SEQ ID NO: 45502
  peptide (1)..(398): Ceres Seq. ID no. 13576320
  misc_feature (1)..(384): Pfam Name: Putative methyltransferase Pfam Description: Putative methyltransferase
  misc_feature (1)..(384): Pfam Name: Putative methyltransferase Pfam Description: Putative methyltransferase
  misc_feature (1)..(384): Pfam Name: Putative methyltransferase Pfam Description: Putative methyltransferase
  misc_feature (1)..(387): Homolog of NCBI NO: 18396075 NR Description: dehydration-induced protein family [Arabidopsis
  misc_feature (1)..(387): Homolog of NCBI NO: 18071395 NR Description: hypothetical protein [Oryza sativa]
  misc_feature (1)..(391): Homolog of NCBI NO: 9665165 NR Description: Unknown Protein [Arabidopsis thaliana]
  misc_feature (1)..(397): Homolog of NCBI NO: 15235080 NR Description: dehydration-induced protein family [Arabidopsis
  misc_feature (1)..(394): Homolog of NCBI NO: 24413975 NR Description: hypothetical protein~similar to Oryza sativa
  misc_feature (1)..(387): Homolog of NCBI NO: 18396075 NR Description: dehydration-induced protein family [Arabidopsis
  misc_feature (1)..(391): Homolog of NCBI NO: 9665165 NR Description: Unknown Protein [Arabidopsis thaliana]
  misc_feature (1)..(394): Homolog of NCBI NO: 24413975 NR Description: hypothetical protein~similar to Oryza sativa
  misc_feature (1)..(397): Homolog of NCBI NO: 15235080 NR Description: dehydration-induced protein family [Arabidopsis
  misc_feature (1)..(391): Homolog of NCBI NO: 9665165 NR Description: Unknown Protein [Arabidopsis thaliana]
  misc_feature (1)..(387): Homolog of NCBI NO: 18071395 NR Description: hypothetical protein [Oryza sativa]
  misc_feature (1)..(387): Homolog of NCBI NO: 18396075 NR Description: dehydration-induced protein family [Arabidopsis
  misc_feature (1)..(398): Homolog of NCBI NO: 15225560 NR Description: dehydration-induced protein family [Arabidopsis
  misc_feature (1)..(388): Homolog of NCBI NO: 38567915 NR Description: OSJNBa0088I22.11 [Oryza sativa (japonica
  misc_feature (1)..(389): Homolog of NCBI NO: 34898042 NR Description: OSJNBa0038F22.19 [Oryza sativa (japonica
  misc_feature (1)..(394): Homolog of NCBI NO: 37535962 NR Description: unknown protein [Oryza sativa (japonica
  misc_feature (1)..(391): Homolog of NCBI NO: 18398763 NR Description: dehydration-induced protein family [Arabidopsis
  misc_feature (1)..(398): Homolog of NCBI NO: 15225560 NR Description: dehydration-induced protein family [Arabidopsis
  misc_feature (1)..(388): Homolog of NCBI NO: 38567915 NR Description: OSJNBa0088I22.11 [Oryza sativa (japonica
  misc_feature (1)..(389): Homolog of NCBI NO: 34898042 NR Description: OSJNBa0038F22.19 [Oryza sativa (japonica
  misc_feature (1)..(394): Homolog of NCBI NO: 37535962 NR Description: unknown protein [Oryza sativa (japonica
  misc_feature (1)..(391): Homolog of NCBI NO: 18398763 NR Description: dehydration-induced protein family [Arabidopsis
  misc_feature (1)..(394): Homolog of NCBI NO: 24413975 NR Description: hypothetical protein~similar to Oryza sativa
  misc_feature (1)..(397): Homolog of NCBI NO: 15235080 NR Description: dehydration-induced protein family [Arabidopsis
  misc_feature (1)..(387): Homolog of NCBI NO: 18071395 NR Description: hypothetical protein [Oryza sativa]
  misc_feature (1)..(391): Homolog of NCBI NO: 18398763 NR Description: dehydration-induced protein family [Arabidopsis
  misc_feature (1)..(394): Homolog of NCBI NO: 37535962 NR Description: unknown protein [Oryza sativa (japonica
  misc_feature (1)..(389): Homolog of NCBI NO: 34898042 NR Description: OSJNBa0038F22.19 [Oryza sativa (japonica
  misc_feature (1)..(388): Homolog of NCBI NO: 38567915 NR Description: OSJNBa0088I22.11 [Oryza sativa (japonica
  misc_feature (1)..(398): Homolog of NCBI NO: 15225560 NR Description: dehydration-induced protein family [Arabidopsis

SEQ ID NO: 48256 - DNA, 2106 bp, Arabidopsis thaliana
  misc_feature (1)..(2106): Ceres Seq. ID no. 13649059
  misc_feature: MA Experiment ID: 20000180 Result: Down-regulated in Transcription
  misc_feature: MA Experiment 20000180 PARAMETER Experiment Name: At_Germinating_Seeds_P Parameter: Age (hr) Value: 24 vs. 0
  misc_feature: MA Experiment 20000180 PARAMETER Experiment Name: At_Germinating_Seeds_P Parameter: Tissue Value: Germinating Seeds
  misc_feature: MA Experiment ID: 20000227 Result: Up-regulated in Transcription
  misc_feature: MA Experiment 20000227 PARAMETER Experiment Name: At_Root-Tips-vs-Tops_P Parameter: Tissue Value: Root Tips vs. Root Tops
  misc_feature: MA Experiment ID: 20000234 Result: Up-regulated in Transcription
  misc_feature: MA Experiment 20000234 PARAMETER Experiment Name: At_Siliques_P Parameter: Age (day) Value: 21
  misc_feature: MA Experiment 20000234 PARAMETER Experiment Name: At_Siliques_P Parameter: Organism Value: A. thaliana
  misc_feature: MA Experiment 20000234 PARAMETER Experiment Name: At_Siliques_P Parameter: Plant Line Value: WS
  misc_feature: MA Experiment 20000234 PARAMETER Experiment Name: At_Siliques_P Parameter: Tissue Value: Less Than 5mm Siliques vs. Whole Plant
  misc_feature: MA Experiment ID: 20000264 Result: Up-regulated in Transcription
  misc_feature: MA Experiment 20000264 PARAMETER Experiment Name: At_Open_Flower_P Parameter: Age (day) Value: 21
  misc_feature: MA Experiment 20000264 PARAMETER Experiment Name: At_Open_Flower_P Parameter: Plant Line Value: WS
  misc_feature: MA Experiment 20000264 PARAMETER Experiment Name: At_Open_Flower_P Parameter: Tissue Value: Open Flower vs. Whole Plant
  misc_feature: MA Experiment ID: 20000265 Result: Up-regulated in Transcription
  misc_feature: MA Experiment 20000265 PARAMETER Experiment Name: At_Open_Flower_P Parameter: Age (day) Value: 21
  misc_feature: MA Experiment 20000265 PARAMETER Experiment Name: At_Open_Flower_P Parameter: Plant Line Value: WS
  misc_feature: MA Experiment 20000265 PARAMETER Experiment Name: At_Open_Flower_P Parameter: Tissue Value: Closed Flower vs. Whole Plant
  misc_feature: MA Experiment ID: 20000286 Result: Up-regulated in Transcription
  misc_feature: MA Experiment 20000286 PARAMETER Experiment Name: At_Open_Flower_P Parameter: Age (day) Value: 21
  misc_feature: MA Experiment 20000286 PARAMETER Experiment Name: At_Open_Flower_P Parameter: Plant Line Value: WS
  misc_feature: MA Experiment 20000286 PARAMETER Experiment Name: At_Open_Flower_P Parameter: Tissue Value: Half Open vs. Whole Plant
  misc_feature: MA Experiment ID: 20000437 Result: Down-regulated in Transcription
  misc_feature: MA Experiment 20000437 PARAMETER Experiment Name: At_Drought_P Parameter: Age (day) Value: 8
  misc_feature: MA Experiment 20000437 PARAMETER Experiment Name: At_Drought_P Parameter: Organism Value: A. thaliana
  misc_feature: MA Experiment 20000437 PARAMETER Experiment Name: At_Drought_P Parameter: Plant Line Value: WS
  misc_feature: MA Experiment 20000437 PARAMETER Experiment Name: At_Drought_P Parameter: Timepoint (hr) Value: 24
  misc_feature: MA Experiment 20000437 PARAMETER Experiment Name: At_Drought_P Parameter: Tissue Value: Whole Plant
  misc_feature: MA Experiment 20000437 PARAMETER Experiment Name: At_Drought_P Parameter: Treatment Value: Drought vs. No Drought
  misc_feature: MA Experiment ID: 20001451 Result: Down-regulated in Transcription
  misc_feature: MA Experiment 20001451 PARAMETER Experiment Name: At_Far-red-induction_P Parameter: Age (day) Value: 7
  misc_feature: MA Experiment 20001451 PARAMETER Experiment Name: At_Far-red-induction_P Parameter: Light Value: Far-red vs. White
  misc_feature: MA Experiment 20001451 PARAMETER Experiment Name: At_Far-red-induction_P Parameter: Organism Value: A. thaliana
  misc_feature: MA Experiment 20001451 PARAMETER Experiment Name: At_Far-red-induction_P Parameter: Plant Line Value: Columbia
  misc_feature: MA Experiment 20001451 PARAMETER Experiment Name: At_Far-red-induction_P Parameter: Timepoint (hr) Value: 24
  misc_feature: MA Experiment 20001451 PARAMETER Experiment Name: At_Far-red-induction_P Parameter: Tissue Value: Whole Plant
  misc_feature: MA Experiment ID: 20001557 Result: Up-regulated in Transcription
  misc_feature: MA Experiment 20001557 PARAMETER Experiment Name: At_Drought_Soil_Dry_P Parameter: Age (day) Value: 27
  misc_feature: MA Experiment 20001557 PARAMETER Experiment Name: At_Drought_Soil_Dry_P Parameter: Organism Value: A. thaliana
  misc_feature: MA Experiment 20001557 PARAMETER Experiment Name: At_Drought_Soil_Dry_P Parameter: Plant Line Value: WS
  misc_feature: MA Experiment 20001557 PARAMETER Experiment Name: At_Drought_Soil_Dry_P Parameter: Post Timepoint (hr) Value: 3
  misc_feature: MA Experiment 20001557 PARAMETER Experiment Name: At_Drought_Soil_Dry_P Parameter: Post-Treatment Value: Re-Water vs. No Drought
  misc_feature: MA Experiment 20001557 PARAMETER Experiment Name: At_Drought_Soil_Dry_P Parameter: Timepoint (day) Value: 13
  misc_feature: MA Experiment 20001557 PARAMETER Experiment Name: At_Drought_Soil_Dry_P Parameter: Treatment Value: Drought vs. No Drought
  misc_feature: MA Experiment ID: 20001558 Result: Up-regulated in Transcription
  misc_feature: MA Experiment 20001558 PARAMETER Experiment Name: At_Drought_Soil_Dry_P Parameter: Age (day) Value: 27
  misc_feature: MA Experiment 20001558 PARAMETER Experiment Name: At_Drought_Soil_Dry_P Parameter: Organism Value: A. thaliana
  misc_feature: MA Experiment 20001558 PARAMETER Experiment Name: At_Drought_Soil_Dry_P Parameter: Plant Line Value: WS
  misc_feature: MA Experiment 20001558 PARAMETER Experiment Name: At_Drought_Soil_Dry_P Parameter: Post Timepoint (hr) Value: 6
  misc_feature: MA Experiment 20001558 PARAMETER Experiment Name: At_Drought_Soil_Dry_P Parameter: Post-Treatment Value: Re-Water vs. No Drought
  misc_feature: MA Experiment 20001558 PARAMETER Experiment Name: At_Drought_Soil_Dry_P Parameter: Timepoint (day) Value: 13
  misc_feature: MA Experiment 20001558 PARAMETER Experiment Name: At_Drought_Soil_Dry_P Parameter: Treatment Value: Drought vs. No Drought
  misc_feature: MA Experiment ID: 20001757 Result: Up-regulated in Transcription
  misc_feature: MA Experiment 20001757 PARAMETER Experiment Name: At_50mM_NH4NO3_L-to-H_P Parameter: Timepoint (hr) Value: 6
  misc_feature: MA Experiment 20001757 PARAMETER Experiment Name: At_50mM_NH4NO3_L-to-H_P Parameter: Tissue Value: Leaf
  misc_feature: MA Experiment 20001757 PARAMETER Experiment Name: At_50mM_NH4NO3_L-to-H_P Parameter: Treatment Value: 50mM NH4NO3 vs 100mM Mannitol
gaacactcgacttgtctcataaaccctttgtgtttgtagtctctctactctctagatcccatcccatttcttgatcagcctcgcgcattgtgtgcttacacagcaggtaatttccagagagattttcaacagaggaagcatgttcgctctttccaaggttttacgaagaacgcagagactccgactgggagcttgttctgctgtgttttcaaaagatatacaattaggaggagaaaggagctttgattccaattcgattgcttctactaaacgtgaagctgtgccaagattttacgagatctcctctttgagtaatcgtgctctttcctccagtgctggcactaaaagtgatcaagaggaagacgacctcgaagacggtttctcagaactggaaggttcaaagtctggccaaggttcaactagtagtgatgaagatgagggaaagctctccgctgatgaagaagaagaagaagaactagacctcattgaaaccgacgttagtagaaaaacagttgaaaagaaacaatctgagctatttaagaccattgtctccgcacccggtctgtctataggtagtgctcttgataaatgggtggaagaaggaaatgagatcactcgagttgagattgctaaggcaatgctccagctgcgcaggcgtcgcatgtatggaagagcgttacagatgtcagaatggttggaagcaaataagaaaattgaaatgactgagagagattatgcttctcggttagatctgacagttaagattcgtggtttagaaaagggagaagcttgtatgcagaagatcccaaaatcttttaaaggggaagtgctttaccgtaccctcttggcgaattgtgttgctgctggcaatgtgaagaaatccgaactggtgtttaacaaaatgaaggacttgggattccctctctctggatttacttgtgatcagatgcttctgctccacaagaggatcgacaggaagaaaattgctgatgtactattgctcatggagaaagaaaatatcaagccaagtcttctcacttacaaaatcctgattgatgtcaaaggtgcaacaaatgacataagtggtatggagcaaattctggagacaatgaaagatgaaggtgttgaactggacttccagacgcaagctctcactgctagacactattcgggagctggccttaaagataaagccgagaaagtcttgaaagagatggaaggtgaaagcttagaggcaaatcgccgggcattcaaagatttgctctccatctatgcctctcttgggagagaagatgaagtgaaaagaatatggaagatctgtgaatcaaagccctactttgaggaatcccttgctgcaatccaagcttttggaaagctcaataaagtgcaagaagcagaggcgatttttgagaagattgtgaagatggacagaagagcttcttctagtacttactccgttctcttgagggtttacgtagatcacaagatgctctcaaagggtaaggatctggttaaacgaatggctgagagcggttgcaggatcgaggcaacgacatgggatgcactcatcaagctctatgtggaagctggagaagttgaaaaggctgattctttgctggacaaggcatcaaaacagagccatacaaaactgatgatgaactccttcatgtatatcatggacgagtactcaaaacggggagatgttcataacacagagaagatattcctaaaaatgagggaagctgggtatacatctcggcttaggcagttccaagccctcatgcaggcttacataaacgccaaatctcctgcatatggaatgcgagatagattgaaggcggataatatctttccaaacaaatccatggctgcacagttggctcaaggtgatccatttaagaagacagctatctctgatattctggattgagtagtctctctccctacacttttcttctatctgcttgcaagaagtatctcatttgtcgtcctaacgtttagtttgagagagtaacgttaagtttaagaacctgcttagttgctgtgtttttaatgtttctattcggttctttggtgatcacacttcagagaccttcaagtttcatg

SEQ ID NO: 48257 - protein, 596 aa, Arabidopsis thaliana; identical to SEQ ID NO: 45237
  peptide (1)..(596): Ceres Seq. ID no. 15219578
  misc_feature (507)..(541): Pfam Name: PPR repeat Pfam Description: PPR repeat
  misc_feature (140)..(539): Homolog of NCBI NO: 15225409 NR Description: pentatricopeptide (PPR) repeat-containing protein
  misc_feature (119)..(575): Homolog of NCBI NO: 15219808 NR Description: pentatricopeptide (PPR) repeat-containing protein
  misc_feature (143)..(555): Homolog of NCBI NO: 34905294 NR Description: putative DNA-binding protein
  misc_feature (227)..(580): Homolog of NCBI NO: 34394024 NR Description: putative DNA-binding protein
  misc_feature (51)..(580): Homolog of NCBI NO: 34900334 NR Description: P0592C06.16 [Oryza sativa (japonica
  misc_feature (1)..(596): Homolog of NCBI NO: 22331104 NR Description: DNA-binding protein, putative [Arabidopsis
  misc_feature (66)..(596): Homolog of NCBI NO: 34903362 NR Description: unnamed protein product [Oryza sativa (japonica
  misc_feature (24)..(596): Homolog of NCBI NO: 6958202 NR Description: DNA-binding protein [Triticum aestivum]
  misc_feature (12)..(596): Homolog of NCBI NO: 15218196 NR Description: DNA-binding protein, putative [Arabidopsis
  misc_feature (1)..(596): Homolog of NCBI NO: 15220095 NR Description: DNA binding protein, putative [Arabidopsis

SEQ ID NO: 48258 - protein, 430 aa, Arabidopsis thaliana; identical to SEQ ID NO: 45238
  peptide (1)..(430): Ceres Seq. ID no. 15219579
  misc_feature (341)..(375): Pfam Name: PPR repeat Pfam Description: PPR repeat
  misc_feature (1)..(373): Homolog of NCBI NO: 15225409 NR Description: pentatricopeptide (PPR) repeat-containing protein
  misc_feature (1)..(409): Homolog of NCBI NO: 15219808 NR Description: pentatricopeptide (PPR) repeat-containing protein
  misc_feature (1)..(389): Homolog of NCBI NO: 34905294 NR Description: putative DNA-binding protein
  misc_feature (61)..(414): Homolog of NCBI NO: 34394024 NR Description: putative DNA-binding protein
  misc_feature (1)..(414): Homolog of NCBI NO: 34900334 NR Description: P0592C06.16 [Oryza sativa (japonica
  misc_feature (1)..(430): Homolog of NCBI NO: 22331104 NR Description: DNA-binding protein, putative [Arabidopsis
  misc_feature (1)..(430): Homolog of NCBI NO: 34903362 NR Description: unnamed protein product [Oryza sativa (japonica
  misc_feature (1)..(430): Homolog of NCBI NO: 6958202 NR Description: DNA-binding protein [Triticum aestivum]
  misc_feature (1)..(430): Homolog of NCBI NO: 15218196 NR Description: DNA-binding protein, putative [Arabidopsis
  misc_feature (1)..(430): Homolog of NCBI NO: 15220095 NR Description: DNA binding protein, putative [Arabidopsis

SEQ ID NO: 48259 - protein, 422 aa, Arabidopsis thaliana; identical to SEQ ID NO: 45239
  peptide (1)..(422): Ceres Seq. ID no. 15219580
  misc_feature (333)..(367): Pfam Name: PPR repeat Pfam Description: PPR repeat
  misc_feature (1)..(365): Homolog of NCBI NO: 15225409 NR Description: pentatricopeptide (PPR) repeat-containing protein
  misc_feature (1)..(401): Homolog of NCBI NO: 15219808 NR Description: pentatricopeptide (PPR) repeat-containing protein
  misc_feature (1)..(381): Homolog of NCBI NO: 34905294 NR Description: putative DNA-binding protein
  misc_feature (53)..(406): Homolog of NCBI NO: 34394024 NR Description: putative DNA-binding protein
  misc_feature (1)..(406): Homolog of NCBI NO: 34900334 NR Description: P0592C06.16 [Oryza sativa (japonica
  misc_feature (1)..(422): Homolog of NCBI NO: 22331104 NR Description: DNA-binding protein, putative [Arabidopsis
  misc_feature (1)..(422): Homolog of NCBI NO: 34903362 NR Description: unnamed protein product [Oryza sativa (japonica
  misc_feature (1)..(422): Homolog of NCBI NO: 6958202 NR Description: DNA-binding protein [Triticum aestivum]
  misc_feature (1)..(422): Homolog of NCBI NO: 15218196 NR Description: DNA-binding protein, putative [Arabidopsis
  misc_feature (1)..(422): Homolog of NCBI NO: 15220095 NR Description: DNA binding protein, putative [Arabidopsis

SEQ ID NO: 48260 - DNA, 1393 bp, Arabidopsis thaliana
  misc_feature (1)..(1393): Ceres Seq. ID no. 13648959
  misc_feature: MA Experiment ID: 20000166 Result: Up-regulated in Transcription
  misc_feature: MA Experiment 20000166 PARAMETER Experiment Name: At_100uM_ABA_P Parameter: Age (day) Value: 14
  misc_feature: MA Experiment 20000166 PARAMETER Experiment Name: At_100uM_ABA_P Parameter: Organism Value: A. thaliana
  misc_feature: MA Experiment 20000166 PARAMETER Experiment Name: At_100uM_ABA_P Parameter: Plant Line Value: WS
  misc_feature: MA Experiment 20000166 PARAMETER Experiment Name: At_100uM_ABA_P Parameter: Timepoint (hr) Value: 1
  misc_feature: MA Experiment 20000166 PARAMETER Experiment Name: At_100uM_ABA_P Parameter: Tissue Value: Aerial
  misc_feature: MA Experiment 20000166 PARAMETER Experiment Name: At_100uM_ABA_P Parameter: Treatment Value: 100uM ABA vs. No Treatment
  misc_feature: MA Experiment ID: 20000179 Result: Down-regulated in Transcription
  misc_feature: MA Experiment 20000179 PARAMETER Experiment Name: At_Germinating_Seeds_P Parameter: Age (hr) Value: 6 vs. 0
  misc_feature: MA Experiment 20000179 PARAMETER Experiment Name: At_Germinating_Seeds_P Parameter: Tissue Value: Germinating Seeds
  misc_feature: MA Experiment ID: 20000180 Result: Down-regulated in Transcription
  misc_feature: MA Experiment 20000180 PARAMETER Experiment Name: At_Germinating_Seeds_P Parameter: Age (hr) Value: 24 vs. 0
  misc_feature: MA Experiment 20000180 PARAMETER Experiment Name: At_Germinating_Seeds_P Parameter: Tissue Value: Germinating Seeds
  misc_feature: MA Experiment ID: 20000182 Result: Up-regulated in Transcription
  misc_feature: MA Experiment 20000182 PARAMETER Experiment Name: At_2mM_SA_P Parameter: Age (day) Value: 14
  misc_feature: MA Experiment 20000182 PARAMETER Experiment Name: At_2mM_SA_P Parameter: Organism Value: A. thaliana
  misc_feature: MA Experiment 20000182 PARAMETER Experiment Name: At_2mM_SA_P Parameter: Plant Line Value: WS
  misc_feature: MA Experiment 20000182 PARAMETER Experiment Name: At_2mM_SA_P Parameter: Timepoint (hr) Value: 6
  misc_feature: MA Experiment 20000182 PARAMETER Experiment Name: At_2mM_SA_P Parameter: Tissue Value: Aerial
  misc_feature: MA Experiment 20000182 PARAMETER Experiment Name: At_2mM_SA_P Parameter: Treatment Value: 2mM SA vs. No Treatment
  misc_feature: MA Experiment ID: 20000184 Result: Down-regulated in Transcription
  misc_feature: MA Experiment 20000184 PARAMETER Experiment Name: At_Shoots__P Parameter: Age (day) Value: 7
  misc_feature: MA Experiment 20000184 PARAMETER Experiment Name: At_Shoots__P Parameter: Tissue Value: Shoots vs. Whole Plant
  misc_feature: MA Experiment ID: 20000234 Result: Down-regulated in Transcription
  misc_feature: MA Experiment 20000234 PARAMETER Experiment Name: At_Siliques_P Parameter: Age (day) Value: 21
  misc_feature: MA Experiment 20000234 PARAMETER Experiment Name: At_Siliques_P Parameter: Organism Value: A. thaliana
  misc_feature: MA Experiment 20000234 PARAMETER Experiment Name: At_Siliques_P Parameter: Plant Line Value: WS
  misc_feature: MA Experiment 20000234 PARAMETER Experiment Name: At_Siliques_P Parameter: Tissue Value: Less Than 5mm Siliques vs. Whole Plant
  misc_feature: MA Experiment ID: 20000235 Result: Down-regulated in Transcription
  misc_feature: MA Experiment 20000235 PARAMETER Experiment Name: At_Siliques_P Parameter: Age (day) Value: 21
  misc_feature: MA Experiment 20000235 PARAMETER Experiment Name: At_Siliques_P Parameter: Organism Value: A. thaliana
  misc_feature: MA Experiment 20000235 PARAMETER Experiment Name: At_Siliques_P Parameter: Plant Line Value: WS
  misc_feature: MA Experiment 20000235 PARAMETER Experiment Name: At_Siliques_P Parameter: Tissue Value: 5-10mm Siliques vs. Whole Plant
  misc_feature: MA Experiment ID: 20000264 Result: Down-regulated in Transcription
  misc_feature: MA Experiment 20000264 PARAMETER Experiment Name: At_Open_Flower_P Parameter: Age (day) Value: 21
  misc_feature: MA Experiment 20000264 PARAMETER Experiment Name: At_Open_Flower_P Parameter: Plant Line Value: WS
  misc_feature: MA Experiment 20000264 PARAMETER Experiment Name: At_Open_Flower_P Parameter: Tissue Value: Open Flower vs. Whole Plant
  misc_feature: MA Experiment ID: 20000265 Result: Down-regulated in Transcription
  misc_feature: MA Experiment 20000265 PARAMETER Experiment Name: At_Open_Flower_P Parameter: Age (day) Value: 21
  misc_feature: MA Experiment 20000265 PARAMETER Experiment Name: At_Open_Flower_P Parameter: Plant Line Value: WS
  misc_feature: MA Experiment 20000265 PARAMETER Experiment Name: At_Open_Flower_P Parameter: Tissue Value: Closed Flower vs. Whole Plant
  misc_feature: MA Experiment ID: 20000286 Result: Down-regulated in Transcription
  misc_feature: MA Experiment 20000286 PARAMETER Experiment Name: At_Open_Flower_P Parameter: Age (day) Value: 21
  misc_feature: MA Experiment 20000286 PARAMETER Experiment Name: At_Open_Flower_P Parameter: Plant Line Value: WS
  misc_feature: MA Experiment 20000286 PARAMETER Experiment Name: At_Open_Flower_P Parameter: Tissue Value: Half Open vs. Whole Plant
  misc_feature: MA Experiment ID: 20000437 Result: Up-regulated in Transcription
  misc_feature: MA Experiment 20000437 PARAMETER Experiment Name: At_Drought_P Parameter: Age (day) Value: 8
  misc_feature: MA Experiment 20000437 PARAMETER Experiment Name: At_Drought_P Parameter: Organism Value: A. thaliana
  misc_feature: MA Experiment 20000437 PARAMETER Experiment Name: At_Drought_P Parameter: Plant Line Value: WS
  misc_feature: MA Experiment 20000437 PARAMETER Experiment Name: At_Drought_P Parameter: Timepoint (hr) Value: 24
  misc_feature: MA Experiment 20000437 PARAMETER Experiment Name: At_Drought_P Parameter: Tissue Value: Whole Plant
  misc_feature: MA Experiment 20000437 PARAMETER Experiment Name: At_Drought_P Parameter: Treatment Value: Drought vs. No Drought
  misc_feature: MA Experiment ID: 20000438 Result: Down-regulated in Transcription
  misc_feature: MA Experiment 20000438 PARAMETER Experiment Name: At_Shoots__P Parameter: Age (day) Value: 14
  misc_feature: MA Experiment 20000438 PARAMETER Experiment Name: At_Shoots__P Parameter: Tissue Value: Shoots vs. Whole Plant
  misc_feature: MA Experiment ID: 20000453 Result: Up-regulated in Transcription
  misc_feature: MA Experiment 20000453 PARAMETER Experiment Name: At_100uM_ABA_P Parameter: Age (day) Value: 15
  misc_feature: MA Experiment 20000453 PARAMETER Experiment Name: At_100uM_ABA_P Parameter: Organism Value: A. thaliana
  misc_feature: MA Experiment 20000453 PARAMETER Experiment Name: At_100uM_ABA_P Parameter: Plant Line Value: WS
  misc_feature: MA Experiment 20000453 PARAMETER Experiment Name: At_100uM_ABA_P Parameter: Timepoint (hr) Value: 24
  misc_feature: MA Experiment 20000453 PARAMETER Experiment Name: At_100uM_ABA_P Parameter: Tissue Value: Aerial
  misc_feature: MA Experiment 20000453 PARAMETER Experiment Name: At_100uM_ABA_P Parameter: Treatment Value: 100uM ABA vs. No Treatment
  misc_feature: MA Experiment ID: 20000460 Result: Up-regulated in Transcription
  misc_feature: MA Experiment 20000460 PARAMETER Experiment Name: At_10percent_PEG_P Parameter: Age (day) Value: 12
  misc_feature: MA Experiment 20000460 PARAMETER Experiment Name: At_10percent_PEG_P Parameter: Organism Value: A. thaliana
  misc_feature: MA Experiment 20000460 PARAMETER Experiment Name: At_10percent_PEG_P Parameter: Plant Line Value: WS
  misc_feature: MA Experiment 20000460 PARAMETER Experiment Name: At_10percent_PEG_P Parameter: Timepoint (day) Value: 12
  misc_feature: MA Experiment 20000460 PARAMETER Experiment Name: At_10percent_PEG_P Parameter: Tissue Value: Whole Plant
  misc_feature: MA Experiment 20000460 PARAMETER Experiment Name: At_10percent_PEG_P Parameter: Treatment Value: 10percent PEG vs. No Treatment
  misc_feature: MA Experiment ID: 20000495 Result: Down-regulated in Transcription
  misc_feature: MA Experiment 20000495 PARAMETER Experiment Name: At_Guard_Cells_P Parameter: Harvest Date Value: 8/2/2002
  misc_feature: MA Experiment 20000495 PARAMETER Experiment Name: At_Guard_Cells_P Parameter: Organism Value: A. thaliana
  misc_feature: MA Experiment 20000495 PARAMETER Experiment Name: At_Guard_Cells_P Parameter: Tissue Value: Guard Cells vs. Leaves
  misc_feature: MA Experiment ID: 20000794 Result: Down-regulated in Transcription
  misc_feature: MA Experiment 20000794 PARAMETER Experiment Name: At_Petals_P Parameter: Age (day) Value: 23-25 days
  misc_feature: MA Experiment 20000794 PARAMETER Experiment Name: At_Petals_P Parameter: Plant Line Value: WS
  misc_feature: MA Experiment 20000794 PARAMETER Experiment Name: At_Petals_P Parameter: Tissue Value: Petals vs. Whole plant
  misc_feature: MA Experiment ID: 20001554 Result: Up-regulated in Transcription
  misc_feature: MA Experiment 20001554 PARAMETER Experiment Name: At_Drought_Soil_Dry_P Parameter: Age (day) Value: 21
  misc_feature: MA Experiment 20001554 PARAMETER Experiment Name: At_Drought_Soil_Dry_P Parameter: Organism Value: A. thaliana
  misc_feature: MA Experiment 20001554 PARAMETER Experiment Name: At_Drought_Soil_Dry_P Parameter: Plant Line Value: WS
  misc_feature: MA Experiment 20001554 PARAMETER Experiment Name: At_Drought_Soil_Dry_P Parameter: Post Timepoint (hr) Value: None
  misc_feature: MA Experiment 20001554 PARAMETER Experiment Name: At_Drought_Soil_Dry_P Parameter: Post-Treatment Value: None
  misc_feature: MA Experiment 20001554 PARAMETER Experiment Name: At_Drought_Soil_Dry_P Parameter: Timepoint (day) Value: 7
  misc_feature: MA Experiment 20001554 PARAMETER Experiment Name: At_Drought_Soil_Dry_P Parameter: Treatment Value: Drought vs. No Drought
  misc_feature: MA Experiment ID: 20001555 Result: Up-regulated in Transcription
  misc_feature: MA Experiment 20001555 PARAMETER Experiment Name: At_Drought_Soil_Dry_P Parameter: Age (day) Value: 24
  misc_feature: MA Experiment 20001555 PARAMETER Experiment Name: At_Drought_Soil_Dry_P Parameter: Organism Value: A. thaliana
  misc_feature: MA Experiment 20001555 PARAMETER Experiment Name: At_Drought_Soil_Dry_P Parameter: Plant Line Value: WS
  misc_feature: MA Experiment 20001555 PARAMETER Experiment Name: At_Drought_Soil_Dry_P Parameter: Post Timepoint (hr) Value: None
  misc_feature: MA Experiment 20001555 PARAMETER Experiment Name: At_Drought_Soil_Dry_P Parameter: Post-Treatment Value: None
  misc_feature: MA Experiment 20001555 PARAMETER Experiment Name: At_Drought_Soil_Dry_P Parameter: Timepoint (day) Value: 10
  misc_feature: MA Experiment 20001555 PARAMETER Experiment Name: At_Drought_Soil_Dry_P Parameter: Treatment Value: Drought vs. No Drought
  misc_feature: MA Experiment ID: 20001905 Result: Up-regulated in Transcription
  misc_feature: MA Experiment 20001905 PARAMETER Experiment Name: At_Drought_Reproduction_P Parameter: Age (day) Value: 40
  misc_feature: MA Experiment 20001905 PARAMETER Experiment Name: At_Drought_Reproduction_P Parameter: Organism Value: A. thaliana
  misc_feature: MA Experiment 20001905 PARAMETER Experiment Name: At_Drought_Reproduction_P Parameter: Plant Line Value: WS
  misc_feature: MA Experiment 20001905 PARAMETER Experiment Name: At_Drought_Reproduction_P Parameter: Timepoint (day) Value: 10
  misc_feature: MA Experiment 20001905 PARAMETER Experiment Name: At_Drought_Reproduction_P Parameter: Tissue Value: Rosettes
  misc_feature: MA Experiment 20001905 PARAMETER Experiment Name: At_Drought_Reproduction_P Parameter: Treatment Value: Drought vs. No Drought
  misc_feature: MA Experiment ID: 20001911 Result: Up-regulated in Transcription
  misc_feature: MA Experiment 20001911 PARAMETER Experiment Name: At_Drought_Reproduction_P Parameter: Age (day) Value: 40
  misc_feature: MA Experiment 20001911 PARAMETER Experiment Name: At_Drought_Reproduction_P Parameter: Organism Value: A. thaliana
  misc_feature: MA Experiment 20001911 PARAMETER Experiment Name: At_Drought_Reproduction_P Parameter: Plant Line Value: WS
  misc_feature: MA Experiment 20001911 PARAMETER Experiment Name: At_Drought_Reproduction_P Parameter: Timepoint (day) Value: 10
  misc_feature: MA Experiment 20001911 PARAMETER Experiment Name: At_Drought_Reproduction_P Parameter: Tissue Value: Flowers
  misc_feature: MA Experiment 20001911 PARAMETER Experiment Name: At_Drought_Reproduction_P Parameter: Treatment Value: Drought vs. No Drought
ggtgcacacgtttttggtgttgacctacgacaacgacaacgacagacaaaaatttatcatcatacaaaacctttctttggctttatctcattttgttttcttaatatcctctgtttcttcttctaattttctctgtttttattccttctgcttctgagatccataaagattcatctcttattacttcatcggaaaagaaacctcgatttcagttttcttgatctctctaatggggaattgcttggactcttctgcaagagtaggtaatagagaaagcacttttggagggtcatcaagaatttcccgcaaaccgaatcagtcatctcgactctcaagtctcaccataccttcttatagcaacaatagcttcactacttcatcatggtcaaatttgacacctagaagtgaaggagagctcttaccatctccaacactaaaggcctttacattcaacgagctaaaaaccgctactagaaacttcaagccgaatagtatgattggtgaaggcggttttggttgtgtctataagggttggatcggtgaacgctcgttgtcaccttcgaaaccagggtccggtatggttgttgcagtcaagaaacttaaatcagaagggtttcaaggacacaaagagtggttgactgaggttcattatcttgggagacttcatcatatgaatcttgtgaagctaattggatattgcttagagggagagaaaagacttttggtttacgagtacatgcctaaaggaagcctggagaaccatctatttcgaagaggcgcagagccaattccgtggaagactaggatgaaagtagcttttagcgcagcgagaggactatctttcctccacgaagctaaagtcatataccgagacttcaaggcctctaatattctacttgatgtggatttcaatgcaaagctatctgattttgggttggcaaaagctggaccaacaggagatagaacgcatgtgacaactcaagtgataggcacacaagggtacgcagctccggaatacatagcaaccggccggttaacctccaagagtgatgtctatagctttggagtggtgttgctcgaactactctcgggtcgtcccaccctagacaaatcgaaagtaggagtggaacgtaacctggtggattgggcaataccttatttggtggacagaagaaaagtgtttagaataatggacacaaagcttggaggacagtaccctcacaaaggggcttgtgcagctgccaacatcgcattgcggtgtctcaataccgaacctaagctcagaccggatatggctgatgtcttatccactttacaacagcttgagacttcttcaaaaaagatgggttctactcaaaatatagtcatgtctccttcatctcatatgtcgtag

SEQ ID NO: 48261 - protein, 387 aa, Arabidopsis thaliana
  peptide (1)..(387): Ceres Seq. ID no. 15219575
  misc_feature (56)..(377): Homolog of NCBI NO: 15222437 NR Description: protein kinase (APK1a) [Arabidopsis thaliana]
  misc_feature (117)..(387): Homolog of NCBI NO: 15223401 NR Description: protein kinase, putative [Arabidopsis thaliana]
  misc_feature (1)..(376): Homolog of NCBI NO: 37534182 NR Description: putative serine /threonine kinase similar to NAK
  misc_feature (1)..(376): Homolog of NCBI NO: 19071648 NR Description: putative protein tyrosine-serine-threonine kinase
  misc_feature (1)..(387): Homolog of NCBI NO: 15223723 NR Description: protein kinase (APK2a) [Arabidopsis thaliana]
  misc_feature (1)..(382): Homolog of NCBI NO: 26449871 NR Description: putative protein kinase [Arabidopsis thaliana]
  misc_feature (1)..(382): Homolog of NCBI NO: 15227042 NR Description: protein kinase (APK2b) [Arabidopsis thaliana]
  misc_feature (1)..(182): Homolog of NCBI NO: 25287598 NR Description: protein T7N9.2 [imported] - Arabidopsis thaliana
  misc_feature (159)..(387): Homolog of NCBI NO: 25287598 NR Description: protein T7N9.2 [imported] - Arabidopsis thaliana
  misc_feature (20)..(387): Homolog of NCBI NO: 15222454 NR Description: protein kinase -related [Arabidopsis thaliana]
MGNCLDSSARVGNRESTFGGSSRISRKPNQSSRLSSLTIPSYSNNSFTTSSWSNLTPRSEGELLPSPTLKAFTFNELKTATRNFKPNSMIGEGGFGCVYKGWIGERSLSPSKPGSGMVVAVKKLKSEGFQGHKEWLTEVHYLGRLHHMNLVKLIGYCLEGEKRLLVYEYMPKGSLENHLFRRGAEPIPWKTRMKVAFSAARGLSFLHEAKVIYRDFKASNILLDVDFNAKLSDFGLAKAGPTGDRTHVTTQVIGTQGYAAPEYIATGRLTSKSDVYSFGVVLLELLSGRPTLDKSKVGVERNLVDWAIPYLVDRRKVFRIMDTKLGGQYPHKGACAAANIALRCLNTEPKLRPDMADVLSTLQQLETSSKKMGSTQNIVMSPSSHMS

SEQ ID NO: 48262 - protein, 299 aa, Arabidopsis thaliana
  peptide (1)..(299): Ceres Seq. ID no. 15219576
  misc_feature (1)..(289): Homolog of NCBI NO: 15222437 NR Description: protein kinase (APK1a) [Arabidopsis thaliana]
  misc_feature (29)..(299): Homolog of NCBI NO: 15223401 NR Description: protein kinase, putative [Arabidopsis thaliana]
  misc_feature (1)..(288): Homolog of NCBI NO: 37534182 NR Description: putative serine /threonine kinase similar to NAK
  misc_feature (1)..(288): Homolog of NCBI NO: 19071648 NR Description: putative protein tyrosine-serine-threonine kinase
  misc_feature (1)..(299): Homolog of NCBI NO: 15223723 NR Description: protein kinase (APK2a) [Arabidopsis thaliana]
  misc_feature (1)..(294): Homolog of NCBI NO: 26449871 NR Description: putative protein kinase [Arabidopsis thaliana]
  misc_feature (1)..(294): Homolog of NCBI NO: 15227042 NR Description: protein kinase (APK2b) [Arabidopsis thaliana]
  misc_feature (1)..(94): Homolog of NCBI NO: 25287598 NR Description: protein T7N9.2 [imported] - Arabidopsis thaliana
  misc_feature (71)..(299): Homolog of NCBI NO: 25287598 NR Description: protein T7N9.2 [imported] - Arabidopsis thaliana
  misc_feature (1)..(299): Homolog of NCBI NO: 15222454 NR Description: protein kinase -related [Arabidopsis thaliana]
MIGEGGFGCVYKGWIGERSLSPSKPGSGMVVAVKKLKSEGFQGHKEWLTEVHYLGRLHHMNLVKLIGYCLEGEKRLLVYEYMPKGSLENHLFRRGAEPIPWKTRMKVAFSAARGLSFLHEAKVIYRDFKASNILLDVDFNAKLSDFGLAKAGPTGDRTHVTTQVIGTQGYAAPEYIATGRLTSKSDVYSFGVVLLELLSGRPTLDKSKVGVERNLVDWAIPYLVDRRKVFRIMDTKLGGQYPHKGACAAANIALRCLNTEPKLRPDMADVLSTLQQLETSSKKMGSTQNIVMSPSSHMS

SEQ ID NO: 48263 - protein, 271 aa, Arabidopsis thaliana
  peptide (1)..(271): Ceres Seq. ID no. 15219577
  misc_feature (1)..(261): Homolog of NCBI NO: 15222437 NR Description: protein kinase (APK1a) [Arabidopsis thaliana]
  misc_feature (1)..(271): Homolog of NCBI NO: 15223401 NR Description: protein kinase, putative [Arabidopsis thaliana]
  misc_feature (1)..(260): Homolog of NCBI NO: 37534182 NR Description: putative serine /threonine kinase similar to NAK
  misc_feature (1)..(260): Homolog of NCBI NO: 19071648 NR Description: putative protein tyrosine-serine-threonine kinase
  misc_feature (1)..(271): Homolog of NCBI NO: 15223723 NR Description: protein kinase (APK2a) [Arabidopsis thaliana]
  misc_feature (1)..(266): Homolog of NCBI NO: 26449871 NR Description: putative protein kinase [Arabidopsis thaliana]
  misc_feature (1)..(266): Homolog of NCBI NO: 15227042 NR Description: protein kinase (APK2b) [Arabidopsis thaliana]
  misc_feature (1)..(66): Homolog of NCBI NO: 25287598 NR Description: protein T7N9.2 [imported] - Arabidopsis thaliana
  misc_feature (43)..(271): Homolog of NCBI NO: 25287598 NR Description: protein T7N9.2 [imported] - Arabidopsis thaliana
  misc_feature (1)..(271): Homolog of NCBI NO: 15222454 NR Description: protein kinase -related [Arabidopsis thaliana]
MVVAVKKLKSEGFQGHKEWLTEVHYLGRLHHMNLVKLIGYCLEGEKRLLVYEYMPKGSLENHLFRRGAEPIPWKTRMKVAFSAARGLSFLHEAKVIYRDFKASNILLDVDFNAKLSDFGLAKAGPTGDRTHVTTQVIGTQGYAAPEYIATGRLTSKSDVYSFGVVLLELLSGRPTLDKSKVGVERNLVDWAIPYLVDRRKVFRIMDTKLGGQYPHKGACAAANIALRCLNTEPKLRPDMADVLSTLQQLETSSKKMGSTQNIVMSPSSHMS

SEQ ID NO: 48264 - DNA, 1212 bp, Arabidopsis thaliana
  misc_feature (1)..(1212): Ceres Seq. ID no. 12670076
  misc_feature: MA Experiment ID: 20000314 Result: Up-regulated in Transcription
  misc_feature: MA Experiment 20000314 PARAMETER Experiment Name: At_14day_Shoots-Roots_Sub_P Parameter: Age (day) Value: 14
  misc_feature: MA Experiment 20000314 PARAMETER Experiment Name: At_14day_Shoots-Roots_Sub_P Parameter: Organism Value: A. thaliana
  misc_feature: MA Experiment 20000314 PARAMETER Experiment Name: At_14day_Shoots-Roots_Sub_P Parameter: Plant Line Value: WS
  misc_feature: MA Experiment 20000314 PARAMETER Experiment Name: At_14day_Shoots-Roots_Sub_P Parameter: Tissue Value: Roots vs. Whole Plant
  misc_feature: MA Experiment ID: 20000315 Result: Down-regulated in Transcription
  misc_feature: MA Experiment 20000315 PARAMETER Experiment Name: At_14day_Shoots-Roots_Sub_P Parameter: Age (day) Value: 14
  misc_feature: MA Experiment 20000315 PARAMETER Experiment Name: At_14day_Shoots-Roots_Sub_P Parameter: Organism Value: A. thaliana
  misc_feature: MA Experiment 20000315 PARAMETER Experiment Name: At_14day_Shoots-Roots_Sub_P Parameter: Plant Line Value: WS
  misc_feature: MA Experiment 20000315 PARAMETER Experiment Name: At_14day_Shoots-Roots_Sub_P Parameter: Tissue Value: Shoots vs. Whole Plant
  misc_feature: MA Experiment ID: 20000355 Result: Down-regulated in Transcription
  misc_feature: MA Experiment 20000355 PARAMETER Experiment Name: At_Siliques_Sub_P Parameter: Age (day) Value: 21
  misc_feature: MA Experiment 20000355 PARAMETER Experiment Name: At_Siliques_Sub_P Parameter: Organism Value: A. thaliana
  misc_feature: MA Experiment 20000355 PARAMETER Experiment Name: At_Siliques_Sub_P Parameter: Plant Line Value: WS
  misc_feature: MA Experiment 20000355 PARAMETER Experiment Name: At_Siliques_Sub_P Parameter: Tissue Value: Less Than 5mm Siliques vs. Whole Plant
  misc_feature: MA Experiment ID: 20000440 Result: Down-regulated in Transcription
  misc_feature: MA Experiment 20000440 PARAMETER Experiment Name: At_Closed-Flower__Sub_P Parameter: Tissue Value: Closed Flower vs. Whole Plant
atcactcaccacaaagtcttctcatttcctcatcttcttgttgaaagtaatggcaagactcacgagctttctccttcttctttctctcatctgctttgtccctctctgtctctgcgacaagagctatggaggcaaacttttcccgggttattacgcccattcatgcccacaagtcaatgagatcgtgagatcagttgtagctaaagctgttgctagagagacacgtatggctgcttccttgttgagacttcatttccacgactgtttcgttcagggttgtgatggctctttgcttctagacagcagtggaagggtagcgactgagaaaaactcaaaccctaacagcaaatcagctcgtgggtttgacgtagttgaccaaatcaaagctgaactggagaaacaatgccctggaactgtttcttgcgctgatgttcttaccctagccgctagagactcctctgttcttaccggtggaccaagttgggttgttccattgggaagaagagattcaagaagtgcaagcttgagtcaatcgaacaacaacatccctgcaccaaacaacactttccagaccattctatctaagtttaaccgtcaaggacttgatatcactgaccttgtcgctctctccggtagtcacacaatcggattctcgagatgcacgagtttcagacagaggttgtacaaccagtccggaaacggcagtccagacatgacattggaacaatccttcgctgctaacttgcgccaacggtgtccaaaatccggtggggaccagattctctcggtgctagacatcatcagcgccgcgagcttcgacaacagctacttcaagaacttgatagagaacaaggggttgttgaactcggaccaagttctgttcagcagtaacgagaaatcgagagagcttgtgaagaagtatgcagaagatcaaggagagttttttgagcaatttgcggaatcgatgatcaagatgggaaatatctctcccttgacaggttctagtggcgaaatcaggaagaattgcaggaagattaactcttgattgaaacaagaaaactcttcttatatcttgtggaacaaatgtgagacatttacttttactttggagtgtgttttgtttgtttttttcaattctgtcatttggaagttttatttcgtgttatttgcgttgtgttaagacataagtttgaaatttataaaacttgtacg

SEQ ID NO: 48265 - protein, 347 aa, Arabidopsis thaliana
  peptide (1)..(347): Ceres Seq. ID no. 12670077
  misc_feature (62)..(310): Pfam Name: Peroxidase Pfam Description: Peroxidase
  misc_feature (19)..(347): Homolog of NCBI NO: 19569160 NR Description: bacterial-induced peroxidase [Gossypium hirsutum]
  misc_feature (23)..(346): Homolog of NCBI NO: 7658147 NR Description: peroxidase [Asparagus officinalis]
  misc_feature (17)..(347): Homolog of NCBI NO: 7453855 NR Description: peroxidase prx15 precursor [Spinacia oleracea]
  misc_feature (17)..(347): Homolog of NCBI NO: 7453853 NR Description: peroxidase prx14 precursor [Spinacia oleracea]
  misc_feature (17)..(346): Homolog of NCBI NO: 1402918 NR Description: peroxidase [Arabidopsis thaliana]
  misc_feature (17)..(346): Homolog of NCBI NO: 15239370 NR Description: peroxidase, putative; protein id: At5g66390.1
  misc_feature (17)..(347): Homolog of NCBI NO: 15224114 NR Description: peroxidase, putative; protein id: At2g18140.1
  misc_feature (17)..(347): Homolog of NCBI NO: 21537275 NR Description: putative peroxidase [Arabidopsis thaliana]
  misc_feature (17)..(347): Homolog of NCBI NO: 15224116 NR Description: peroxidase, putative
  misc_feature (17)..(347): Homolog of NCBI NO: 15234394 NR Description: peroxidase, putative
SLTTKSSHFLIFLLKVMARLTSFLLLLSLICFVPLCLCDKSYGGKLFPGYYAHSCPQVNEIVRSVVAKAVARETRMAASLLRLHFHDCFVQGCDGSLLLDSSGRVATEKNSNPNSKSARGFDVVDQIKAELEKQCPGTVSCADVLTLAARDSSVLTGGPSWVVPLGRRDSRSASLSQSNNNIPAPNNTFQTILSKFNRQGLDITDLVALSGSHTIGFSRCTSFRQRLYNQSGNGSPDMTLEQSFAANLRQRCPKSGGDQILSVLDIISAASFDNSYFKNLIENKGLLNSDQVLFSSNEKSRELVKKYAEDQGEFFEQFAESMIKMGNISPLTGSSGEIRKNCRKINS

SEQ ID NO: 48266 - protein, 331 aa, Arabidopsis thaliana
  peptide (1)..(331): Ceres Seq. ID no. 12670078
  misc_feature (46)..(294): Pfam Name: Peroxidase Pfam Description: Peroxidase
  misc_feature (3)..(331): Homolog of NCBI NO: 19569160 NR Description: bacterial-induced peroxidase [Gossypium hirsutum]
  misc_feature (7)..(330): Homolog of NCBI NO: 7658147 NR Description: peroxidase [Asparagus officinalis]
  misc_feature (1)..(331): Homolog of NCBI NO: 7453855 NR Description: peroxidase prx15 precursor [Spinacia oleracea]
  misc_feature (1)..(331): Homolog of NCBI NO: 7453853 NR Description: peroxidase prx14 precursor [Spinacia oleracea]
  misc_feature (1)..(330): Homolog of NCBI NO: 1402918 NR Description: peroxidase [Arabidopsis thaliana]
  misc_feature (1)..(330): Homolog of NCBI NO: 15239370 NR Description: peroxidase, putative; protein id: At5g66390.1
  misc_feature (1)..(331): Homolog of NCBI NO: 15224114 NR Description: peroxidase, putative; protein id: At2g18140.1
  misc_feature (1)..(331): Homolog of NCBI NO: 21537275 NR Description: putative peroxidase [Arabidopsis thaliana]
  misc_feature (1)..(331): Homolog of NCBI NO: 15224116 NR Description: peroxidase, putative
  misc_feature (1)..(331): Homolog of NCBI NO: 15234394 NR Description: peroxidase, putative
MARLTSFLLLLSLICFVPLCLCDKSYGGKLFPGYYAHSCPQVNEIVRSVVAKAVARETRMAASLLRLHFHDCFVQGCDGSLLLDSSGRVATEKNSNPNSKSARGFDVVDQIKAELEKQCPGTVSCADVLTLAARDSSVLTGGPSWVVPLGRRDSRSASLSQSNNNIPAPNNTFQTILSKFNRQGLDITDLVALSGSHTIGFSRCTSFRQRLYNQSGNGSPDMTLEQSFAANLRQRCPKSGGDQILSVLDIISAASFDNSYFKNLIENKGLLNSDQVLFSSNEKSRELVKKYAEDQGEFFEQFAESMIKMGNISPLTGSSGEIRKNCRKINS

SEQ ID NO: 48267 - protein, 272 aa, Arabidopsis thaliana
  peptide (1)..(272): Ceres Seq. ID no. 12670079
  misc_feature (1)..(235): Pfam Name: Peroxidase Pfam Description: Peroxidase
  misc_feature (1)..(272): Homolog of NCBI NO: 19569160 NR Description: bacterial-induced peroxidase [Gossypium hirsutum]
  misc_feature (1)..(271): Homolog of NCBI NO: 7658147 NR Description: peroxidase [Asparagus officinalis]
  misc_feature (1)..(272): Homolog of NCBI NO: 7453855 NR Description: peroxidase prx15 precursor [Spinacia oleracea]
  misc_feature (1)..(272): Homolog of NCBI NO: 7453853 NR Description: peroxidase prx14 precursor [Spinacia oleracea]
  misc_feature (1)..(271): Homolog of NCBI NO: 1402918 NR Description: peroxidase [Arabidopsis thaliana]
  misc_feature (1)..(271): Homolog of NCBI NO: 15239370 NR Description: peroxidase, putative; protein id: At5g66390.1
  misc_feature (1)..(272): Homolog of NCBI NO: 15224114 NR Description: peroxidase, putative; protein id: At2g18140.1
  misc_feature (1)..(272): Homolog of NCBI NO: 21537275 NR Description: putative peroxidase [Arabidopsis thaliana]
  misc_feature (1)..(272): Homolog of NCBI NO: 15224116 NR Description: peroxidase, putative
  misc_feature (1)..(272): Homolog of NCBI NO: 15234394 NR Description: peroxidase, putative
MAASLLRLHFHDCFVQGCDGSLLLDSSGRVATEKNSNPNSKSARGFDVVDQIKAELEKQCPGTVSCADVLTLAARDSSVLTGGPSWVVPLGRRDSRSASLSQSNNNIPAPNNTFQTILSKFNRQGLDITDLVALSGSHTIGFSRCTSFRQRLYNQSGNGSPDMTLEQSFAANLRQRCPKSGGDQILSVLDIISAASFDNSYFKNLIENKGLLNSDQVLFSSNEKSRELVKKYAEDQGEFFEQFAESMIKMGNISPLTGSSGEIRKNCRKINS

SEQ ID NO: 48268 - DNA, 1037 bp, Arabidopsis thaliana
  misc_feature (1)..(1037): Ceres Seq. ID no. 13649313
  misc_feature: MA Experiment ID: 20000166 Result: Up-regulated in Transcription
  misc_feature: MA Experiment 20000166 PARAMETER Experiment Name: At_100uM_ABA_P Parameter: Age (day) Value: 14
  misc_feature: MA Experiment 20000166 PARAMETER Experiment Name: At_100uM_ABA_P Parameter: Organism Value: A. thaliana
  misc_feature: MA Experiment 20000166 PARAMETER Experiment Name: At_100uM_ABA_P Parameter: Plant Line Value: WS
  misc_feature: MA Experiment 20000166 PARAMETER Experiment Name: At_100uM_ABA_P Parameter: Timepoint (hr) Value: 1
  misc_feature: MA Experiment 20000166 PARAMETER Experiment Name: At_100uM_ABA_P Parameter: Tissue Value: Aerial
  misc_feature: MA Experiment 20000166 PARAMETER Experiment Name: At_100uM_ABA_P Parameter: Treatment Value: 100uM ABA vs. No Treatment
  misc_feature: MA Experiment ID: 20000169 Result: Up-regulated in Transcription
  misc_feature: MA Experiment 20000169 PARAMETER Experiment Name: At_100uM_ABA_P Parameter: Age (day) Value: 14
  misc_feature: MA Experiment 20000169 PARAMETER Experiment Name: At_100uM_ABA_P Parameter: Organism Value: A. thaliana
  misc_feature: MA Experiment 20000169 PARAMETER Experiment Name: At_100uM_ABA_P Parameter: Plant Line Value: WS
  misc_feature: MA Experiment 20000169 PARAMETER Experiment Name: At_100uM_ABA_P Parameter: Timepoint (hr) Value: 6
  misc_feature: MA Experiment 20000169 PARAMETER Experiment Name: At_100uM_ABA_P Parameter: Tissue Value: Aerial
  misc_feature: MA Experiment 20000169 PARAMETER Experiment Name: At_100uM_ABA_P Parameter: Treatment Value: 100uM ABA vs. No Treatment
  misc_feature: MA Experiment ID: 20000171 Result: Down-regulated in Transcription
  misc_feature: MA Experiment 20000171 PARAMETER Experiment Name: At_42deg_Heat_P Parameter: Age (day) Value: 14
  misc_feature: MA Experiment 20000171 PARAMETER Experiment Name: At_42deg_Heat_P Parameter: Organism Value: A. thaliana
  misc_feature: MA Experiment 20000171 PARAMETER Experiment Name: At_42deg_Heat_P Parameter: Plant Line Value: WS
  misc_feature: MA Experiment 20000171 PARAMETER Experiment Name: At_42deg_Heat_P Parameter: Temperature (deg C) Value: 42 vs. 22
  misc_feature: MA Experiment 20000171 PARAMETER Experiment Name: At_42deg_Heat_P Parameter: Timepoint (hr) Value: 1
  misc_feature: MA Experiment 20000171 PARAMETER Experiment Name: At_42deg_Heat_P Parameter: Tissue Value: Aerial
  misc_feature: MA Experiment ID: 20000173 Result: Down-regulated in Transcription
  misc_feature: MA Experiment 20000173 PARAMETER Experiment Name: At_42deg_Heat_P Parameter: Age (day) Value: 14
  misc_feature: MA Experiment 20000173 PARAMETER Experiment Name: At_42deg_Heat_P Parameter: Organism Value: A. thaliana
  misc_feature: MA Experiment 20000173 PARAMETER Experiment Name: At_42deg_Heat_P Parameter: Plant Line Value: WS
  misc_feature: MA Experiment 20000173 PARAMETER Experiment Name: At_42deg_Heat_P Parameter: Temperature (deg C) Value: 42 vs. 22
  misc_feature: MA Experiment 20000173 PARAMETER Experiment Name: At_42deg_Heat_P Parameter: Timepoint (hr) Value: 6
  misc_feature: MA Experiment 20000173 PARAMETER Experiment Name: At_42deg_Heat_P Parameter: Tissue Value: Aerial
  misc_feature: MA Experiment ID: 20000213 Result: Down-regulated in Transcription
  misc_feature: MA Experiment 20000213 PARAMETER Experiment Name: At_4deg_Cold_P Parameter: Timepoint (hr) Value: 2
  misc_feature: MA Experiment ID: 20000268 Result: Up-regulated in Transcription
  misc_feature: MA Experiment 20000268 PARAMETER Experiment Name: At_100mM_NaCl__P Parameter: Age (day) Value: 14
  misc_feature: MA Experiment 20000268 PARAMETER Experiment Name: At_100mM_NaCl__P Parameter: Organism Value: A. thaliana
  misc_feature: MA Experiment 20000268 PARAMETER Experiment Name: At_100mM_NaCl__P Parameter: Plant Line Value: WS
  misc_feature: MA Experiment 20000268 PARAMETER Experiment Name: At_100mM_NaCl__P Parameter: Timepoint (hr) Value: 6
  misc_feature: MA Experiment 20000268 PARAMETER Experiment Name: At_100mM_NaCl__P Parameter: Tissue Value: Whole Plant
  misc_feature: MA Experiment 20000268 PARAMETER Experiment Name: At_100mM_NaCl__P Parameter: Treatment Value: 100mM NaCl vs. No Treatment
  misc_feature: MA Experiment ID: 20000286 Result: Up-regulated in Transcription
  misc_feature: MA Experiment 20000286 PARAMETER Experiment Name: At_Open_Flower_P Parameter: Age (day) Value: 21
  misc_feature: MA Experiment 20000286 PARAMETER Experiment Name: At_Open_Flower_P Parameter: Plant Line Value: WS
  misc_feature: MA Experiment 20000286 PARAMETER Experiment Name: At_Open_Flower_P Parameter: Tissue Value: Half Open vs. Whole Plant
  misc_feature: MA Experiment ID: 20000436 Result: Up-regulated in Transcription
  misc_feature: MA Experiment 20000436 PARAMETER Experiment Name: At_Drought_P Parameter: Age (day) Value: 7
  misc_feature: MA Experiment 20000436 PARAMETER Experiment Name: At_Drought_P Parameter: Organism Value: A. thaliana
  misc_feature: MA Experiment 20000436 PARAMETER Experiment Name: At_Drought_P Parameter: Plant Line Value: WS
  misc_feature: MA Experiment 20000436 PARAMETER Experiment Name: At_Drought_P Parameter: Timepoint (hr) Value: 12
  misc_feature: MA Experiment 20000436 PARAMETER Experiment Name: At_Drought_P Parameter: Tissue Value: Whole Plant
  misc_feature: MA Experiment 20000436 PARAMETER Experiment Name: At_Drought_P Parameter: Treatment Value: Drought vs. No Drought
  misc_feature: MA Experiment ID: 20000437 Result: Up-regulated in Transcription
  misc_feature: MA Experiment 20000437 PARAMETER Experiment Name: At_Drought_P Parameter: Age (day) Value: 8
  misc_feature: MA Experiment 20000437 PARAMETER Experiment Name: At_Drought_P Parameter: Organism Value: A. thaliana
  misc_feature: MA Experiment 20000437 PARAMETER Experiment Name: At_Drought_P Parameter: Plant Line Value: WS
  misc_feature: MA Experiment 20000437 PARAMETER Experiment Name: At_Drought_P Parameter: Timepoint (hr) Value: 24
  misc_feature: MA Experiment 20000437 PARAMETER Experiment Name: At_Drought_P Parameter: Tissue Value: Whole Plant
  misc_feature: MA Experiment 20000437 PARAMETER Experiment Name: At_Drought_P Parameter: Treatment Value: Drought vs. No Drought
  misc_feature: MA Experiment ID: 20000438 Result: Up-regulated in Transcription
  misc_feature: MA Experiment 20000438 PARAMETER Experiment Name: At_Shoots__P Parameter: Age (day) Value: 14
  misc_feature: MA Experiment 20000438 PARAMETER Experiment Name: At_Shoots__P Parameter: Tissue Value: Shoots vs. Whole Plant
  misc_feature: MA Experiment ID: 20000453 Result: Up-regulated in Transcription
  misc_feature: MA Experiment 20000453 PARAMETER Experiment Name: At_100uM_ABA_P Parameter: Age (day) Value: 15
  misc_feature: MA Experiment 20000453 PARAMETER Experiment Name: At_100uM_ABA_P Parameter: Organism Value: A. thaliana
  misc_feature: MA Experiment 20000453 PARAMETER Experiment Name: At_100uM_ABA_P Parameter: Plant Line Value: WS
  misc_feature: MA Experiment 20000453 PARAMETER Experiment Name: At_100uM_ABA_P Parameter: Timepoint (hr) Value: 24
  misc_feature: MA Experiment 20000453 PARAMETER Experiment Name: At_100uM_ABA_P Parameter: Tissue Value: Aerial
  misc_feature: MA Experiment 20000453 PARAMETER Experiment Name: At_100uM_ABA_P Parameter: Treatment Value: 100uM ABA vs. No Treatment
  misc_feature: MA Experiment ID: 20000496 Result: Up-regulated in Transcription
  misc_feature: MA Experiment 20000496 PARAMETER Experiment Name: At_Guard_Cells_P Parameter: Harvest Date Value: 7/19/2002
  misc_feature: MA Experiment 20000496 PARAMETER Experiment Name: At_Guard_Cells_P Parameter: Organism Value: Canola
  misc_feature: MA Experiment 20000496 PARAMETER Experiment Name: At_Guard_Cells_P Parameter: Tissue Value: Guard Cells vs. Leaves
  misc_feature: MA Experiment ID: 20000573 Result: Down-regulated in Transcription
  misc_feature: MA Experiment 20000573 PARAMETER Experiment Name: At_100uM_ABA_Mutants__P Parameter: Organism Value: A. thaliana
  misc_feature: MA Experiment 20000573 PARAMETER Experiment Name: At_100uM_ABA_Mutants__P Parameter: Plant Line Value: CS22 vs. Ler wt
  misc_feature: MA Experiment 20000573 PARAMETER Experiment Name: At_100uM_ABA_Mutants__P Parameter: Timepoint (hr) Value: N/A
  misc_feature: MA Experiment 20000573 PARAMETER Experiment Name: At_100uM_ABA_Mutants__P Parameter: Tissue Value: Whole Plant
  misc_feature: MA Experiment 20000573 PARAMETER Experiment Name: At_100uM_ABA_Mutants__P Parameter: Treatment Value: None
  misc_feature: MA Experiment ID: 20000574 Result: Down-regulated in Transcription
  misc_feature: MA Experiment 20000574 PARAMETER Experiment Name: At_100uM_ABA_Mutants__P Parameter: Organism Value: A. thaliana
  misc_feature: MA Experiment 20000574 PARAMETER Experiment Name: At_100uM_ABA_Mutants__P Parameter: Plant Line Value: CS23 vs. Ler wt
  misc_feature: MA Experiment 20000574 PARAMETER Experiment Name: At_100uM_ABA_Mutants__P Parameter: Timepoint (hr) Value: N/A
  misc_feature: MA Experiment 20000574 PARAMETER Experiment Name: At_100uM_ABA_Mutants__P Parameter: Tissue Value: Whole Plant
  misc_feature: MA Experiment 20000574 PARAMETER Experiment Name: At_100uM_ABA_Mutants__P Parameter: Treatment Value: None
  misc_feature: MA Experiment ID: 20000794 Result: Up-regulated in Transcription
  misc_feature: MA Experiment 20000794 PARAMETER Experiment Name: At_Petals_P Parameter: Age (day) Value: 23-25 days
  misc_feature: MA Experiment 20000794 PARAMETER Experiment Name: At_Petals_P Parameter: Plant Line Value: WS
  misc_feature: MA Experiment 20000794 PARAMETER Experiment Name: At_Petals_P Parameter: Tissue Value: Petals vs. Whole plant
  misc_feature: MA Experiment ID: 20001450 Result: Up-regulated in Transcription
  misc_feature: MA Experiment 20001450 PARAMETER Experiment Name: At_Far-red-induction_P Parameter: Age (day) Value: 7
  misc_feature: MA Experiment 20001450 PARAMETER Experiment Name: At_Far-red-induction_P Parameter: Light Value: Far-red vs. White
  misc_feature: MA Experiment 20001450 PARAMETER Experiment Name: At_Far-red-induction_P Parameter: Organism Value: A. thaliana
  misc_feature: MA Experiment 20001450 PARAMETER Experiment Name: At_Far-red-induction_P Parameter: Plant Line Value: Columbia
  misc_feature: MA Experiment 20001450 PARAMETER Experiment Name: At_Far-red-induction_P Parameter: Timepoint (hr) Value: 8
  misc_feature: MA Experiment 20001450 PARAMETER Experiment Name: At_Far-red-induction_P Parameter: Tissue Value: Whole Plant
  misc_feature: MA Experiment ID: 20001451 Result: Up-regulated in Transcription
  misc_feature: MA Experiment 20001451 PARAMETER Experiment Name: At_Far-red-induction_P Parameter: Age (day) Value: 7
  misc_feature: MA Experiment 20001451 PARAMETER Experiment Name: At_Far-red-induction_P Parameter: Light Value: Far-red vs. White
  misc_feature: MA Experiment 20001451 PARAMETER Experiment Name: At_Far-red-induction_P Parameter: Organism Value: A. thaliana
  misc_feature: MA Experiment 20001451 PARAMETER Experiment Name: At_Far-red-induction_P Parameter: Plant Line Value: Columbia
  misc_feature: MA Experiment 20001451 PARAMETER Experiment Name: At_Far-red-induction_P Parameter: Timepoint (hr) Value: 24
  misc_feature: MA Experiment 20001451 PARAMETER Experiment Name: At_Far-red-induction_P Parameter: Tissue Value: Whole Plant
  misc_feature: MA Experiment ID: 20001554 Result: Up-regulated in Transcription
  misc_feature: MA Experiment 20001554 PARAMETER Experiment Name: At_Drought_Soil_Dry_P Parameter: Age (day) Value: 21
  misc_feature: MA Experiment 20001554 PARAMETER Experiment Name: At_Drought_Soil_Dry_P Parameter: Organism Value: A. thaliana
  misc_feature: MA Experiment 20001554 PARAMETER Experiment Name: At_Drought_Soil_Dry_P Parameter: Plant Line Value: WS
  misc_feature: MA Experiment 20001554 PARAMETER Experiment Name: At_Drought_Soil_Dry_P Parameter: Post Timepoint (hr) Value: None
  misc_feature: MA Experiment 20001554 PARAMETER Experiment Name: At_Drought_Soil_Dry_P Parameter: Post-Treatment Value: None
  misc_feature: MA Experiment 20001554 PARAMETER Experiment Name: At_Drought_Soil_Dry_P Parameter: Timepoint (day) Value: 7
  misc_feature: MA Experiment 20001554 PARAMETER Experiment Name: At_Drought_Soil_Dry_P Parameter: Treatment Value: Drought vs. No Drought
  misc_feature: MA Experiment ID: 20001557 Result: Down-regulated in Transcription
  misc_feature: MA Experiment 20001557 PARAMETER Experiment Name: At_Drought_Soil_Dry_P Parameter: Age (day) Value: 27
  misc_feature: MA Experiment 20001557 PARAMETER Experiment Name: At_Drought_Soil_Dry_P Parameter: Organism Value: A. thaliana
  misc_feature: MA Experiment 20001557 PARAMETER Experiment Name: At_Drought_Soil_Dry_P Parameter: Plant Line Value: WS
  misc_feature: MA Experiment 20001557 PARAMETER Experiment Name: At_Drought_Soil_Dry_P Parameter: Post Timepoint (hr) Value: 3
  misc_feature: MA Experiment 20001557 PARAMETER Experiment Name: At_Drought_Soil_Dry_P Parameter: Post-Treatment Value: Re-Water vs. No Drought
  misc_feature: MA Experiment 20001557 PARAMETER Experiment Name: At_Drought_Soil_Dry_P Parameter: Timepoint (day) Value: 13
  misc_feature: MA Experiment 20001557 PARAMETER Experiment Name: At_Drought_Soil_Dry_P Parameter: Treatment Value: Drought vs. No Drought
gacaggaactctcttccttgcaaaaaaaataaaacactatttcctccaaatacacgtagagagatacatatatacatatagagatcaacaaagatgggaagatcaccatgctgcgagaaagctcacatgaacaaaggagcttggactaaagaagaagatcagcttcttgttgattacatccgtaaacacggtgaaggttgctggcgatctctccctcgcgccgctggattacaaagatgtggtaagagttgtagattgagatggatgaattatctaagaccagatctcaaaagaggcaattttactgaagaagaagatgaactcatcatcaagctccatagcttgctcggtaacaaatggtctttaatagctgggagattaccaggaagaacagataacgagatcaagaactattggaacactcatatcaagaggaagcttctcagccgtgggattgatccaaactctcaccgtctgatcaacgaatccgtcgtgtctccgtcgtctcttcaaaacgatgtcgttgagactatacatcttgatttctctggaccggttaaaccggaaccggtgcgtgaagagattggtatggttaataattgtgagagtagtggaacgacgtcggagaaggattatgggaacgaggaagattgggtgttgaatttggaactctctgttggaccgagttatcggtacgagtcgactcggaaagtgagtgttgttgactcggctgagtcgactcgacggtggggttccgagttgtttggagctcatgagagtgatgcggtgtgtttgtgttgtcggattgggttgtttcgtaatgagtcgtgtcggaattgtcgggtttctgatgttagaactcattagagagtcaatcgagaattctttaggaatctttttatatatttagatcgtcaattgtgttttttttttgttcacatttgttatgtaacatcaagtaagaaactagcataattatttgatggcaaagccaaaagattgtgctcaaagaaatttataaaaacaacaattagggc

SEQ ID NO: 48269 - protein, 257 aa, Arabidopsis thaliana
  peptide (1)..(257): Ceres Seq. ID no. 15219587
  misc_feature (14)..(61): Pfam Name: Myb-like DNA-binding domain Pfam Description: Myb-like DNA-binding domain
  misc_feature (14)..(61): Pfam Name: Myb-like DNA-binding domain Pfam Description: Myb-like DNA-binding domain
  misc_feature (1)..(208): Homolog of NCBI NO: 15227288 NR Description: myb DNA-binding protein [Arabidopsis thaliana]
  misc_feature (1)..(217): Homolog of NCBI NO: 7438345 NR Description: myb-related protein A - upland cotton
  misc_feature (1)..(197): Homolog of NCBI NO: 39725415 NR Description: MYB transcription factor [Eucalyptus gunnii]
  misc_feature (1)..(250): Homolog of NCBI NO: 82310 NR Description: myb-related protein 330 - garden snapdragon
  misc_feature (1)..(208): Homolog of NCBI NO: 13346194 NR Description: GHMYB9 [Gossypium hirsutum]
  misc_feature (1)..(208): Homolog of NCBI NO: 15227288 NR Description: myb DNA-binding protein [Arabidopsis thaliana]
  misc_feature (1)..(197): Homolog of NCBI NO: 39725415 NR Description: MYB transcription factor [Eucalyptus gunnii]
  misc_feature (1)..(208): Homolog of NCBI NO: 13346194 NR Description: GHMYB9 [Gossypium hirsutum]
  misc_feature (1)..(257): Homolog of NCBI NO: 30687964 NR Description: myb family transcription factor [Arabidopsis
  misc_feature (12)..(257): Homolog of NCBI NO: 11273984 NR Description: probable transcription factor MYB3
  misc_feature (1)..(219): Homolog of NCBI NO: 15233894 NR Description: myb family transcription factor [Arabidopsis
  misc_feature (1)..(195): Homolog of NCBI NO: 15233968 NR Description: transcription factor (MYB4) -related [Arabidopsis
  misc_feature (1)..(195): Homolog of NCBI NO: 11273985 NR Description: myb-related transcription factor MYB4
  misc_feature (1)..(250): Homolog of NCBI NO: 82310 NR Description: myb-related protein 330 - garden snapdragon
  misc_feature (1)..(217): Homolog of NCBI NO: 7438345 NR Description: myb-related protein A - upland cotton
  misc_feature (1)..(195): Homolog of NCBI NO: 11273985 NR Description: myb-related transcription factor MYB4
  misc_feature (1)..(195): Homolog of NCBI NO: 15233968 NR Description: transcription factor (MYB4) -related [Arabidopsis
  misc_feature (1)..(219): Homolog of NCBI NO: 15233894 NR Description: myb family transcription factor [Arabidopsis
  misc_feature (12)..(257): Homolog of NCBI NO: 11273984 NR Description: probable transcription factor MYB3
  misc_feature (1)..(257): Homolog of NCBI NO: 30687964 NR Description: myb family transcription factor [Arabidopsis
MGRSPCCEKAHMNKGAWTKEEDQLLVDYIRKHGEGCWRSLPRAAGLQRCGKSCRLRWMNYLRPDLKRGNFTEEEDELIIKLHSLLGNKWSLIAGRLPGRTDNEIKNYWNTHIKRKLLSRGIDPNSHRLINESVVSPSSLQNDVVETIHLDFSGPVKPEPVREEIGMVNNCESSGTTSEKDYGNEEDWVLNLELSVGPSYRYESTRKVSVVDSAESTRRWGSELFGAHESDAVCLCCRIGLFRNESCRNCRVSDVRTH

SEQ ID NO: 48270 - protein, 246 aa, Arabidopsis thaliana
  peptide (1)..(246): Ceres Seq. ID no. 15219588
  misc_feature (3)..(50): Pfam Name: Myb-like DNA-binding domain Pfam Description: Myb-like DNA-binding domain
  misc_feature (3)..(50): Pfam Name: Myb-like DNA-binding domain Pfam Description: Myb-like DNA-binding domain
  misc_feature (1)..(197): Homolog of NCBI NO: 15227288 NR Description: myb DNA-binding protein [Arabidopsis thaliana]
  misc_feature (1)..(206): Homolog of NCBI NO: 7438345 NR Description: myb-related protein A - upland cotton
  misc_feature (1)..(186): Homolog of NCBI NO: 39725415 NR Description: MYB transcription factor [Eucalyptus gunnii]
  misc_feature (1)..(239): Homolog of NCBI NO: 82310 NR Description: myb-related protein 330 - garden snapdragon
  misc_feature (1)..(197): Homolog of NCBI NO: 13346194 NR Description: GHMYB9 [Gossypium hirsutum]
  misc_feature (1)..(197): Homolog of NCBI NO: 15227288 NR Description: myb DNA-binding protein [Arabidopsis thaliana]
  misc_feature (1)..(186): Homolog of NCBI NO: 39725415 NR Description: MYB transcription factor [Eucalyptus gunnii]
  misc_feature (1)..(197): Homolog of NCBI NO: 13346194 NR Description: GHMYB9 [Gossypium hirsutum]
  misc_feature (1)..(246): Homolog of NCBI NO: 30687964 NR Description: myb family transcription factor [Arabidopsis
  misc_feature (1)..(246): Homolog of NCBI NO: 11273984 NR Description: probable transcription factor MYB3
  misc_feature (1)..(208): Homolog of NCBI NO: 15233894 NR Description: myb family transcription factor [Arabidopsis
  misc_feature (1)..(184): Homolog of NCBI NO: 15233968 NR Description: transcription factor (MYB4) -related [Arabidopsis
  misc_feature (1)..(184): Homolog of NCBI NO: 11273985 NR Description: myb-related transcription factor MYB4
  misc_feature (1)..(239): Homolog of NCBI NO: 82310 NR Description: myb-related protein 330 - garden snapdragon
  misc_feature (1)..(206): Homolog of NCBI NO: 7438345 NR Description: myb-related protein A - upland cotton
  misc_feature (1)..(184): Homolog of NCBI NO: 11273985 NR Description: myb-related transcription factor MYB4
  misc_feature (1)..(184): Homolog of NCBI NO: 15233968 NR Description: transcription factor (MYB4) -related [Arabidopsis
  misc_feature (1)..(208): Homolog of NCBI NO: 15233894 NR Description: myb family transcription factor [Arabidopsis
  misc_feature (1)..(246): Homolog of NCBI NO: 11273984 NR Description: probable transcription factor MYB3
  misc_feature (1)..(246): Homolog of NCBI NO: 30687964 NR Description: myb family transcription factor [Arabidopsis
MNKGAWTKEEDQLLVDYIRKHGEGCWRSLPRAAGLQRCGKSCRLRWMNYLRPDLKRGNFTEEEDELIIKLHSLLGNKWSLIAGRLPGRTDNEIKNYWNTHIKRKLLSRGIDPNSHRLINESVVSPSSLQNDVVETIHLDFSGPVKPEPVREEIGMVNNCESSGTTSEKDYGNEEDWVLNLELSVGPSYRYESTRKVSVVDSAESTRRWGSELFGAHESDAVCLCCRIGLFRNESCRNCRVSDVRTH

SEQ ID NO: 48271 - protein, 200 aa, Arabidopsis thaliana
  peptide (1)..(200): Ceres Seq. ID no. 15219589
  misc_feature (1)..(151): Homolog of NCBI NO: 15227288 NR Description: myb DNA-binding protein [Arabidopsis thaliana]
  misc_feature (1)..(160): Homolog of NCBI NO: 7438345 NR Description: myb-related protein A - upland cotton
  misc_feature (1)..(140): Homolog of NCBI NO: 39725415 NR Description: MYB transcription factor [Eucalyptus gunnii]
  misc_feature (1)..(193): Homolog of NCBI NO: 82310 NR Description: myb-related protein 330 - garden snapdragon
  misc_feature (1)..(151): Homolog of NCBI NO: 13346194 NR Description: GHMYB9 [Gossypium hirsutum]
  misc_feature (1)..(138): Homolog of NCBI NO: 11273985 NR Description: myb-related transcription factor MYB4
  misc_feature (1)..(138): Homolog of NCBI NO: 15233968 NR Description: transcription factor (MYB4) -related [Arabidopsis
  misc_feature (1)..(162): Homolog of NCBI NO: 15233894 NR Description: myb family transcription factor [Arabidopsis
  misc_feature (1)..(200): Homolog of NCBI NO: 11273984 NR Description: probable transcription factor MYB3
  misc_feature (1)..(200): Homolog of NCBI NO: 30687964 NR Description: myb family transcription factor [Arabidopsis
  misc_feature (1)..(151): Homolog of NCBI NO: 15227288 NR Description: myb DNA-binding protein [Arabidopsis thaliana]
  misc_feature (1)..(160): Homolog of NCBI NO: 7438345 NR Description: myb-related protein A - upland cotton
  misc_feature (1)..(140): Homolog of NCBI NO: 39725415 NR Description: MYB transcription factor [Eucalyptus gunnii]
  misc_feature (1)..(193): Homolog of NCBI NO: 82310 NR Description: myb-related protein 330 - garden snapdragon
  misc_feature (1)..(151): Homolog of NCBI NO: 13346194 NR Description: GHMYB9 [Gossypium hirsutum]
  misc_feature (1)..(138): Homolog of NCBI NO: 11273985 NR Description: myb-related transcription factor MYB4
  misc_feature (1)..(138): Homolog of NCBI NO: 15233968 NR Description: transcription factor (MYB4) -related [Arabidopsis
  misc_feature (1)..(162): Homolog of NCBI NO: 15233894 NR Description: myb family transcription factor [Arabidopsis
  misc_feature (1)..(200): Homolog of NCBI NO: 11273984 NR Description: probable transcription factor MYB3
  misc_feature (1)..(200): Homolog of NCBI NO: 30687964 NR Description: myb family transcription factor [Arabidopsis
MNYLRPDLKRGNFTEEEDELIIKLHSLLGNKWSLIAGRLPGRTDNEIKNYWNTHIKRKLLSRGIDPNSHRLINESVVSPSSLQNDVVETIHLDFSGPVKPEPVREEIGMVNNCESSGTTSEKDYGNEEDWVLNLELSVGPSYRYESTRKVSVVDSAESTRRWGSELFGAHESDAVCLCCRIGLFRNESCRNCRVSDVRTH

SEQ ID NO: 48272 - DNA, 1871 bp, Arabidopsis thaliana
  misc_feature (1)..(1871): Ceres Seq. ID no. 13578936
  misc_feature: MA Experiment ID: 20001451 Result: Down-regulated in Transcription
  misc_feature: MA Experiment 20001451 PARAMETER Experiment Name: At_Far-red-induction_P Parameter: Age (day) Value: 7
  misc_feature: MA Experiment 20001451 PARAMETER Experiment Name: At_Far-red-induction_P Parameter: Light Value: Far-red vs. White
  misc_feature: MA Experiment 20001451 PARAMETER Experiment Name: At_Far-red-induction_P Parameter: Organism Value: A. thaliana
  misc_feature: MA Experiment 20001451 PARAMETER Experiment Name: At_Far-red-induction_P Parameter: Plant Line Value: Columbia
  misc_feature: MA Experiment 20001451 PARAMETER Experiment Name: At_Far-red-induction_P Parameter: Timepoint (hr) Value: 24
  misc_feature: MA Experiment 20001451 PARAMETER Experiment Name: At_Far-red-induction_P Parameter: Tissue Value: Whole Plant
gatccaataaaagttgtgaaaaaaagccgcaaagggtcgttgttgtttgtcgcctctcaatggcagcttcttcaactaatgctcgtctcaccaaccctcctcgtctactctccaaaccccgactttcacctacctccgtcgccaatctccgttttccagccgccgatttctccactcgcttctttgccgattcttcgtccccgcggctaaggagtgtaccgtttccggtggtattttccgatcaaaggcgccggcgaagcatggaacctagcaatgtctatgtggcttcaaattccacggaaatggagatcggaagtcatgatatcgtgaagaatccgagcttgatctgtgctccagtgatggcggattcaatagacaagatggtgattgaaacgagtaaagcccatgaattgggtgcagacttggttgaaattcgattagattggctaaaggacttcaatcctcttgaggatctaaaaaccattattaagaaatctcctctacccactttattcacctacagaccaaaatgggaaggtggtcagtatgaaggtgatgaaaatgagagacgggatgtgcttcgtctggccatggagttgggagctgattatattgatgttgaacttcaggtggcaagtgagttcatcaaatctattgacggaaagaagcctggaaagttcaaagtaattgtttcatcgcacaactatcagaataccccttctgttgaggaccttgatggccttgttgcaagaatacaacagactggagccgacattgttaagattgctactactgctgtggacattgcagatgttgctcgcatgttccatataacctcaaaagctcaagttcccacaattggacttgttatgggtgaaagaggtttgatgtctcggattctttgttcgaaatttggtggttatttgacctttggcaccttagattctagtaaagtttctgcgccaggtcaaccaacgatcaaggatctgttggatctttacaactttagaagaattggtcctgacacaaaggtatatggaattattggcaagcctgtcagccacagcaaatcacctattgttcacaatcaagctttcaaatcagttgattttaatggagtatatgtccacctgttagttgataatcttgtaagctttcttcaagcatactcatcctctgatttcgctggattcagctgtacaattccgcacaaagaagctgcattgcaatgttgtgatgaagttgatccattggcaaagtctataggagctgtgaacactatactaaggagaaaaagtgacggaaagttgttgggttacaacacagattgtattggttccatttctgctattgaggatggcctacgaagttcaggtgatccaagcagtgtaccttcttcttcttcgccattggccagtaaaacagtggtggttattggtgctggtggagcaggcaaggctcttgcttatggtgcaaaagaaaagggggccaaagttgtaattgctaatcgaacttacgaacgagcactagaactcgcagaagcaataggaggcaaagcgttatctctgacagatttagataactatcacccagaagatggcatggttttggcaaacacaacatctatgggtatgcaaccaaatgttgaggagactccaatttctaaggatgcattgaagcactatgcactggtctttgatgcggtatacactccgagaatcaccagactgttgagggaagcagaagaaagtggagccataactgtctcagggtcagagatgtttgtcaggcaggcttacgagcagtttgagatcttcaccggtttacccgctccaaaggaactctactggcaaataatgtcaaagtactga

SEQ ID NO: 48273 - protein, 622 aa, Arabidopsis thaliana
  peptide (1)..(622): Ceres Seq. ID no. 13578937
  misc_feature (360)..(608): Pfam Name: Shikimate / quinate 5-dehydrogenase Pfam Description: Shikimate / quinate 5-dehydrogenase
  misc_feature (360)..(608): Pfam Name: Shikimate / quinate 5-dehydrogenase Pfam Description: Shikimate / quinate 5-dehydrogenase
  misc_feature (338)..(614): Homolog of NCBI NO: 20093557 NR Description: Shikimate 5-dehydrogenase [Methanopyrus kandleri
  misc_feature (343)..(607): Homolog of NCBI NO: 30022412 NR Description: Shikimate 5-dehydrogenase [Bacillus cereus ATCC
  misc_feature (343)..(607): Homolog of NCBI NO: 21402380 NR Description: Shikimate_DH, Shikimate / quinate 5-dehydrogenase
  misc_feature (109)..(429): Homolog of NCBI NO: 7488788 NR Description: 3-dehydroquinate dehydratase (EC 4.2.1.10) /
  misc_feature (113)..(606): Homolog of NCBI NO: 34914828 NR Description: putative 3-dehydroquinate dehydratase / shikimate
  misc_feature (338)..(614): Homolog of NCBI NO: 20093557 NR Description: Shikimate 5-dehydrogenase [Methanopyrus kandleri
  misc_feature (343)..(607): Homolog of NCBI NO: 21402380 NR Description: Shikimate_DH, Shikimate / quinate 5-dehydrogenase
  misc_feature (113)..(606): Homolog of NCBI NO: 34914828 NR Description: putative 3-dehydroquinate dehydratase / shikimate
  misc_feature (175)..(622): Homolog of NCBI NO: 7436862 NR Description: 3-dehydroquinate dehydratase (EC 4.2.1.10) /
  misc_feature (110)..(173): Homolog of NCBI NO: 7436862 NR Description: 3-dehydroquinate dehydratase (EC 4.2.1.10) /
  misc_feature (94)..(612): Homolog of NCBI NO: 629688 NR Description: 3-dehydroquinate dehydratase (EC 4.2.1.10) /
  misc_feature (173)..(622): Homolog of NCBI NO: 34914824 NR Description: putative 3-dehydroquinate dehydratase
  misc_feature (113)..(174): Homolog of NCBI NO: 34914824 NR Description: putative 3-dehydroquinate dehydratase
  misc_feature (109)..(429): Homolog of NCBI NO: 7488788 NR Description: 3-dehydroquinate dehydratase (EC 4.2.1.10) /
  misc_feature (343)..(607): Homolog of NCBI NO: 30022412 NR Description: Shikimate 5-dehydrogenase [Bacillus cereus ATCC
  misc_feature (113)..(174): Homolog of NCBI NO: 34914824 NR Description: putative 3-dehydroquinate dehydratase
  misc_feature (173)..(622): Homolog of NCBI NO: 34914824 NR Description: putative 3-dehydroquinate dehydratase
  misc_feature (94)..(612): Homolog of NCBI NO: 629688 NR Description: 3-dehydroquinate dehydratase (EC 4.2.1.10) /
  misc_feature (110)..(173): Homolog of NCBI NO: 7436862 NR Description: 3-dehydroquinate dehydratase (EC 4.2.1.10) /
  misc_feature (175)..(622): Homolog of NCBI NO: 7436862 NR Description: 3-dehydroquinate dehydratase (EC 4.2.1.10) /
SNKSCEKKPQRVVVVCRLSMAASSTNARLTNPPRLLSKPRLSPTSVANLRFPAADFSTRFFADSSSPRLRSVPFPVVFSDQRRRRSMEPSNVYVASNSTEMEIGSHDIVKNPSLICAPVMADSIDKMVIETSKAHELGADLVEIRLDWLKDFNPLEDLKTIIKKSPLPTLFTYRPKWEGGQYEGDENERRDVLRLAMELGADYIDVELQVASEFIKSIDGKKPGKFKVIVSSHNYQNTPSVEDLDGLVARIQQTGADIVKIATTAVDIADVARMFHITSKAQVPTIGLVMGERGLMSRILCSKFGGYLTFGTLDSSKVSAPGQPTIKDLLDLYNFRRIGPDTKVYGIIGKPVSHSKSPIVHNQAFKSVDFNGVYVHLLVDNLVSFLQAYSSSDFAGFSCTIPHKEAALQCCDEVDPLAKSIGAVNTILRRKSDGKLLGYNTDCIGSISAIEDGLRSSGDPSSVPSSSSPLASKTVVVIGAGGAGKALAYGAKEKGAKVVIANRTYERALELAEAIGGKALSLTDLDNYHPEDGMVLANTTSMGMQPNVEETPISKDALKHYALVFDAVYTPRITRLLREAEESGAITVSGSEMFVRQAYEQFEIFTGLPAPKELYWQIMSKY

SEQ ID NO: 48274 - protein, 603 aa, Arabidopsis thaliana
  peptide (1)..(603): Ceres Seq. ID no. 13578938
  misc_feature (341)..(589): Pfam Name: Shikimate / quinate 5-dehydrogenase Pfam Description: Shikimate / quinate 5-dehydrogenase
  misc_feature (341)..(589): Pfam Name: Shikimate / quinate 5-dehydrogenase Pfam Description: Shikimate / quinate 5-dehydrogenase
  misc_feature (319)..(595): Homolog of NCBI NO: 20093557 NR Description: Shikimate 5-dehydrogenase [Methanopyrus kandleri
  misc_feature (324)..(588): Homolog of NCBI NO: 30022412 NR Description: Shikimate 5-dehydrogenase [Bacillus cereus ATCC
  misc_feature (324)..(588): Homolog of NCBI NO: 21402380 NR Description: Shikimate_DH, Shikimate / quinate 5-dehydrogenase
  misc_feature (90)..(410): Homolog of NCBI NO: 7488788 NR Description: 3-dehydroquinate dehydratase (EC 4.2.1.10) /
  misc_feature (94)..(587): Homolog of NCBI NO: 34914828 NR Description: putative 3-dehydroquinate dehydratase / shikimate
  misc_feature (319)..(595): Homolog of NCBI NO: 20093557 NR Description: Shikimate 5-dehydrogenase [Methanopyrus kandleri
  misc_feature (324)..(588): Homolog of NCBI NO: 21402380 NR Description: Shikimate_DH, Shikimate / quinate 5-dehydrogenase
  misc_feature (94)..(587): Homolog of NCBI NO: 34914828 NR Description: putative 3-dehydroquinate dehydratase / shikimate
  misc_feature (156)..(603): Homolog of NCBI NO: 7436862 NR Description: 3-dehydroquinate dehydratase (EC 4.2.1.10) /
  misc_feature (91)..(154): Homolog of NCBI NO: 7436862 NR Description: 3-dehydroquinate dehydratase (EC 4.2.1.10) /
  misc_feature (75)..(593): Homolog of NCBI NO: 629688 NR Description: 3-dehydroquinate dehydratase (EC 4.2.1.10) /
  misc_feature (154)..(603): Homolog of NCBI NO: 34914824 NR Description: putative 3-dehydroquinate dehydratase
  misc_feature (94)..(155): Homolog of NCBI NO: 34914824 NR Description: putative 3-dehydroquinate dehydratase
  misc_feature (90)..(410): Homolog of NCBI NO: 7488788 NR Description: 3-dehydroquinate dehydratase (EC 4.2.1.10) /
  misc_feature (324)..(588): Homolog of NCBI NO: 30022412 NR Description: Shikimate 5-dehydrogenase [Bacillus cereus ATCC
  misc_feature (94)..(155): Homolog of NCBI NO: 34914824 NR Description: putative 3-dehydroquinate dehydratase
  misc_feature (154)..(603): Homolog of NCBI NO: 34914824 NR Description: putative 3-dehydroquinate dehydratase
  misc_feature (75)..(593): Homolog of NCBI NO: 629688 NR Description: 3-dehydroquinate dehydratase (EC 4.2.1.10) /
  misc_feature (91)..(154): Homolog of NCBI NO: 7436862 NR Description: 3-dehydroquinate dehydratase (EC 4.2.1.10) /
  misc_feature (156)..(603): Homolog of NCBI NO: 7436862 NR Description: 3-dehydroquinate dehydratase (EC 4.2.1.10) /
MAASSTNARLTNPPRLLSKPRLSPTSVANLRFPAADFSTRFFADSSSPRLRSVPFPVVFSDQRRRRSMEPSNVYVASNSTEMEIGSHDIVKNPSLICAPVMADSIDKMVIETSKAHELGADLVEIRLDWLKDFNPLEDLKTIIKKSPLPTLFTYRPKWEGGQYEGDENERRDVLRLAMELGADYIDVELQVASEFIKSIDGKKPGKFKVIVSSHNYQNTPSVEDLDGLVARIQQTGADIVKIATTAVDIADVARMFHITSKAQVPTIGLVMGERGLMSRILCSKFGGYLTFGTLDSSKVSAPGQPTIKDLLDLYNFRRIGPDTKVYGIIGKPVSHSKSPIVHNQAFKSVDFNGVYVHLLVDNLVSFLQAYSSSDFAGFSCTIPHKEAALQCCDEVDPLAKSIGAVNTILRRKSDGKLLGYNTDCIGSISAIEDGLRSSGDPSSVPSSSSPLASKTVVVIGAGGAGKALAYGAKEKGAKVVIANRTYERALELAEAIGGKALSLTDLDNYHPEDGMVLANTTSMGMQPNVEETPISKDALKHYALVFDAVYTPRITRLLREAEESGAITVSGSEMFVRQAYEQFEIFTGLPAPKELYWQIMSKY

SEQ ID NO: 48275 - protein, 536 aa, Arabidopsis thaliana
  peptide (1)..(536): Ceres Seq. ID no. 13578939
  misc_feature (274)..(522): Pfam Name: Shikimate / quinate 5-dehydrogenase Pfam Description: Shikimate / quinate 5-dehydrogenase
  misc_feature (274)..(522): Pfam Name: Shikimate / quinate 5-dehydrogenase Pfam Description: Shikimate / quinate 5-dehydrogenase
  misc_feature (252)..(528): Homolog of NCBI NO: 20093557 NR Description: Shikimate 5-dehydrogenase [Methanopyrus kandleri
  misc_feature (257)..(521): Homolog of NCBI NO: 30022412 NR Description: Shikimate 5-dehydrogenase [Bacillus cereus ATCC
  misc_feature (257)..(521): Homolog of NCBI NO: 21402380 NR Description: Shikimate_DH, Shikimate / quinate 5-dehydrogenase
  misc_feature (23)..(343): Homolog of NCBI NO: 7488788 NR Description: 3-dehydroquinate dehydratase (EC 4.2.1.10) /
  misc_feature (27)..(520): Homolog of NCBI NO: 34914828 NR Description: putative 3-dehydroquinate dehydratase / shikimate
  misc_feature (252)..(528): Homolog of NCBI NO: 20093557 NR Description: Shikimate 5-dehydrogenase [Methanopyrus kandleri
  misc_feature (257)..(521): Homolog of NCBI NO: 21402380 NR Description: Shikimate_DH, Shikimate / quinate 5-dehydrogenase
  misc_feature (27)..(520): Homolog of NCBI NO: 34914828 NR Description: putative 3-dehydroquinate dehydratase / shikimate
  misc_feature (89)..(536): Homolog of NCBI NO: 7436862 NR Description: 3-dehydroquinate dehydratase (EC 4.2.1.10) /
  misc_feature (24)..(87): Homolog of NCBI NO: 7436862 NR Description: 3-dehydroquinate dehydratase (EC 4.2.1.10) /
  misc_feature (8)..(526): Homolog of NCBI NO: 629688 NR Description: 3-dehydroquinate dehydratase (EC 4.2.1.10) /
  misc_feature (87)..(536): Homolog of NCBI NO: 34914824 NR Description: putative 3-dehydroquinate dehydratase
  misc_feature (27)..(88): Homolog of NCBI NO: 34914824 NR Description: putative 3-dehydroquinate dehydratase
  misc_feature (23)..(343): Homolog of NCBI NO: 7488788 NR Description: 3-dehydroquinate dehydratase (EC 4.2.1.10) /
  misc_feature (257)..(521): Homolog of NCBI NO: 30022412 NR Description: Shikimate 5-dehydrogenase [Bacillus cereus ATCC
  misc_feature (27)..(88): Homolog of NCBI NO: 34914824 NR Description: putative 3-dehydroquinate dehydratase
  misc_feature (87)..(536): Homolog of NCBI NO: 34914824 NR Description: putative 3-dehydroquinate dehydratase
  misc_feature (8)..(526): Homolog of NCBI NO: 629688 NR Description: 3-dehydroquinate dehydratase (EC 4.2.1.10) /
  misc_feature (24)..(87): Homolog of NCBI NO: 7436862 NR Description: 3-dehydroquinate dehydratase (EC 4.2.1.10) /
  misc_feature (89)..(536): Homolog of NCBI NO: 7436862 NR Description: 3-dehydroquinate dehydratase (EC 4.2.1.10) /
MEPSNVYVASNSTEMEIGSHDIVKNPSLICAPVMADSIDKMVIETSKAHELGADLVEIRLDWLKDFNPLEDLKTIIKKSPLPTLFTYRPKWEGGQYEGDENERRDVLRLAMELGADYIDVELQVASEFIKSIDGKKPGKFKVIVSSHNYQNTPSVEDLDGLVARIQQTGADIVKIATTAVDIADVARMFHITSKAQVPTIGLVMGERGLMSRILCSKFGGYLTFGTLDSSKVSAPGQPTIKDLLDLYNFRRIGPDTKVYGIIGKPVSHSKSPIVHNQAFKSVDFNGVYVHLLVDNLVSFLQAYSSSDFAGFSCTIPHKEAALQCCDEVDPLAKSIGAVNTILRRKSDGKLLGYNTDCIGSISAIEDGLRSSGDPSSVPSSSSPLASKTVVVIGAGGAGKALAYGAKEKGAKVVIANRTYERALELAEAIGGKALSLTDLDNYHPEDGMVLANTTSMGMQPNVEETPISKDALKHYALVFDAVYTPRITRLLREAEESGAITVSGSEMFVRQAYEQFEIFTGLPAPKELYWQIMSKY

SEQ ID NO: 48276 - DNA, 1523 bp, Arabidopsis thaliana
  misc_feature (1)..(1523): Ceres Seq. ID no. 13649922
  misc_feature: MA Experiment ID: 20000214 Result: Down-regulated in Transcription
  misc_feature: MA Experiment 20000214 PARAMETER Experiment Name: At_4deg_Cold_P Parameter: Timepoint (hr) Value: 6
  misc_feature: MA Experiment ID: 20000234 Result: Down-regulated in Transcription
  misc_feature: MA Experiment 20000234 PARAMETER Experiment Name: At_Siliques_P Parameter: Age (day) Value: 21
  misc_feature: MA Experiment 20000234 PARAMETER Experiment Name: At_Siliques_P Parameter: Organism Value: A. thaliana
  misc_feature: MA Experiment 20000234 PARAMETER Experiment Name: At_Siliques_P Parameter: Plant Line Value: WS
  misc_feature: MA Experiment 20000234 PARAMETER Experiment Name: At_Siliques_P Parameter: Tissue Value: Less Than 5mm Siliques vs. Whole Plant
  misc_feature: MA Experiment ID: 20001450 Result: Up-regulated in Transcription
  misc_feature: MA Experiment 20001450 PARAMETER Experiment Name: At_Far-red-induction_P Parameter: Age (day) Value: 7
  misc_feature: MA Experiment 20001450 PARAMETER Experiment Name: At_Far-red-induction_P Parameter: Light Value: Far-red vs. White
  misc_feature: MA Experiment 20001450 PARAMETER Experiment Name: At_Far-red-induction_P Parameter: Organism Value: A. thaliana
  misc_feature: MA Experiment 20001450 PARAMETER Experiment Name: At_Far-red-induction_P Parameter: Plant Line Value: Columbia
  misc_feature: MA Experiment 20001450 PARAMETER Experiment Name: At_Far-red-induction_P Parameter: Timepoint (hr) Value: 8
  misc_feature: MA Experiment 20001450 PARAMETER Experiment Name: At_Far-red-induction_P Parameter: Tissue Value: Whole Plant
  misc_feature: MA Experiment ID: 20001451 Result: Up-regulated in Transcription
  misc_feature: MA Experiment 20001451 PARAMETER Experiment Name: At_Far-red-induction_P Parameter: Age (day) Value: 7
  misc_feature: MA Experiment 20001451 PARAMETER Experiment Name: At_Far-red-induction_P Parameter: Light Value: Far-red vs. White
  misc_feature: MA Experiment 20001451 PARAMETER Experiment Name: At_Far-red-induction_P Parameter: Organism Value: A. thaliana
  misc_feature: MA Experiment 20001451 PARAMETER Experiment Name: At_Far-red-induction_P Parameter: Plant Line Value: Columbia
  misc_feature: MA Experiment 20001451 PARAMETER Experiment Name: At_Far-red-induction_P Parameter: Timepoint (hr) Value: 24
  misc_feature: MA Experiment 20001451 PARAMETER Experiment Name: At_Far-red-induction_P Parameter: Tissue Value: Whole Plant
gacgagccgcacgtgtgctttccttttttctccttccccgttctctagccgattctctctgtctagggctcctccgtcttcttcttctcataccttcacataccacaaaacctctcttctctctctattgattctctacgaagaggaaagtgattttgaaccatcttgatcggaaacggcgtttcgaaactggaggtcgaagacgaaaaaaactcttatctcatcgctccggtgtaccgaattcgagaggtttttgttaggtttcgtagtgattgattgattttgatggaagatagtgtggtggatgatgttataaagaggttactaggagcgaaaaacgggaagacgacgaagcaggttcagttgacggaggctgagattaaacatctttgttctaccgctaagcagatctttctcactcaacctaatcttcttgaactcgaggctcctattaagatttgtggagatactcatggtcagttctcagatcttttgagattgttcgagtatggtggctacccaccagctgcaaactatttgtttcttggggattatgtagatcgtggaaagcagagtgtagagaccatatgccttcttcttgcctacaagatcaaatacaaagagaatttctttcttctacgtgggaaccatgagtgtgcttctataaaccgtatatacggattctatgacgagtgcaagaagagatatagcgttcgagtgtggaagatatttactgactgctttaattgtctacctgttgctgctcttattgatgaaaagatcctctgtatgcatggtgggctatcgcctgagttgaagcacttggatgagatcaggaacattcctcgtcctgctgacattcctgatcatggactactgtgtgatctgttgtggtctgatcctgacaaagacattgaaggatggggagagaatgacaggggtgtctcgtacacttttggggctgataaagtcgaggagtttcttcaaacgcatgaccttgacttaatttgtagagctcatcaggttgtggaagacgggtatgaattctttgcaaatagacagctagtaacgatattctcggccccaaactactgcggagagtttgataacgcaggagcaatgatgagtgtggatgattccttgacgtgctcatttcagatccttaaagcatctgagaagaaaggaaacttcgggtttggcaaaaatgcaggaaggcgaggaaccccgcctcgcaagggtggtggaaaaggctgaagacaaatcccataaactctgttttgtgtattccatgtttcttggttcaagacacttgcttgatcagctgaacttatcaaactgtcttcttcttcttcttcctctgctctggatcactttggcaaggggtacttctgtcttttcccttgactactctggatcacttggtgtctttgacctctgtgaatctgagatattattctctgtgagatacactttatgtcgttttttgttaaaacatttaaatgaaaatcataatgttcctcgtc

SEQ ID NO: 48277 - protein, 322 aa, Arabidopsis thaliana
  peptide (1)..(322): Ceres Seq. ID no. 13649923
  misc_feature (54)..(249): Pfam Name: Calcineurin-like phosphoesterase Pfam Description: Calcineurin-like phosphoesterase
  misc_feature (1)..(317): Homolog of NCBI NO: 7435136 NR Description: phosphoprotein phosphatase (EC 3.1.3.16) 1a
  misc_feature (1)..(315): Homolog of NCBI NO: 7435129 NR Description: phosphoprotein phosphatase (EC 3.1.3.16),
  misc_feature (1)..(316): Homolog of NCBI NO: 1346753 NR Description: SERINE/THREONINE PROTEIN PHOSPHATASE PP1 ISOZYME
  misc_feature (1)..(316): Homolog of NCBI NO: 1346750 NR Description: SERINE/THREONINE PROTEIN PHOSPHATASE PP1 ISOZYME
  misc_feature (1)..(317): Homolog of NCBI NO: 7435131 NR Description: phosphoprotein phosphatase (EC 3.1.3.16) PP1BG -
  misc_feature (1)..(322): Homolog of NCBI NO: 1346760 NR Description: Serine/threonine protein phosphatase PP1 isozyme
  misc_feature (1)..(322): Homolog of NCBI NO: 18413493 NR Description: protein phosphatase type 1 (AtPP1bg) [Arabidopsis
  misc_feature (1)..(319): Homolog of NCBI NO: 1346763 NR Description: SERINE/THREONINE PROTEIN PHOSPHATASE PP1
  misc_feature (1)..(317): Homolog of NCBI NO: 25752372 NR Description: phosphoprotein phosphatase (EC 3.1.3.16) 1
  misc_feature (1)..(322): Homolog of NCBI NO: 15222607 NR Description: phosphoprotein phosphatase-type 1 catalytic
MEDSVVDDVIKRLLGAKNGKTTKQVQLTEAEIKHLCSTAKQIFLTQPNLLELEAPIKICGDTHGQFSDLLRLFEYGGYPPAANYLFLGDYVDRGKQSVETICLLLAYKIKYKENFFLLRGNHECASINRIYGFYDECKKRYSVRVWKIFTDCFNCLPVAALIDEKILCMHGGLSPELKHLDEIRNIPRPADIPDHGLLCDLLWSDPDKDIEGWGENDRGVSYTFGADKVEEFLQTHDLDLICRAHQVVEDGYEFFANRQLVTIFSAPNYCGEFDNAGAMMSVDDSLTCSFQILKASEKKGNFGFGKNAGRRGTPPRKGGGKG

SEQ ID NO: 48278 - DNA, 1020 bp, Arabidopsis thaliana
  misc_feature (1)..(1020): Ceres Seq. ID no. 13649924
  misc_feature: MA Experiment ID: 20000179 Result: Up-regulated in Transcription
  misc_feature: MA Experiment 20000179 PARAMETER Experiment Name: At_Germinating_Seeds_P Parameter: Age (hr) Value: 6 vs. 0
  misc_feature: MA Experiment 20000179 PARAMETER Experiment Name: At_Germinating_Seeds_P Parameter: Tissue Value: Germinating Seeds
accacgtcgtgaaaatccgatctacgtctctgtctctctccaatctctctgcgccacagaattgtgcgatttacgaaaatctctgaaacctccgatcgttaacggcgaccgccgattttcccggtaaaaatgaacgacggagatgtatcgaggcagatccagcagatggtgagatttatccgccaagaagcggaagagaaagcaaacgagatctcggtttctgctgaagaagaattcaacattgagaaactccagcttgttgaggcggagaagaagaagatcaggcaagattatgagaagaaggagaagcaagctgatgttcgcaagaagattgattactctatgcagctaaatgcatcaaggatcaaagttcttcaagcgcaagacgatattgtcaatgccatgaaagaccaagcagctaaggatcttctgaacgttagtcgcgatgagtatgcctacaaacagctcctcaaggatctaattgttcagtgtttgcttcggttgaaagaaccttctgtgttgttgcgttgtcgtgaagaggacttgggtttagtggaagctgtacttgatgacgcaaaggaggaatatgctggtaaagcaaaggttcatgccccagaggttgctgttgacacaaaaatattccttccccctcctcctaaatctaatgatcctcatggtctccactgctctggaggtgttgtgttagcttctcgtgatgggaaaatcgtgtgcgagaacacacttgatgcgcgtcttgatgtggcattccgtatgaaactcccagtgatccgtaagtcgttgttcggccaagttactgcctgatgaaagaaaggaaaagagaaaagagattattcaaaccggtttgcgtttggttatttacctattttgggagagatttctctttgttgtgattctttgtattttgcaaaatcttactttggtgccaaacccatcgaacgcttctttttttcgaattcctttttttcattcctcctcgaatgtgtgttatcatggctatac

SEQ ID NO: 48279 - protein, 230 aa, Arabidopsis thaliana; identical to SEQ ID NO: 47290
  peptide (1)..(230): Ceres Seq. ID no. 13649925
  misc_feature (16)..(225): Pfam Name: ATP synthase (E/31 kDa) subunit Pfam Description: ATP synthase (E/31 kDa) subunit
  misc_feature (7)..(230): Homolog of NCBI NO: 29290712 NR Description: vacuolar ATPase subunit E [Phaseolus acutifolius]
  misc_feature (1)..(230): Homolog of NCBI NO: 12585474 NR Description: Vacuolar ATP synthase subunit E (V-ATPase E
  misc_feature (1)..(230): Homolog of NCBI NO: 3334405 NR Description: Vacuolar ATP synthase subunit E (V-ATPase E
  misc_feature (1)..(230): Homolog of NCBI NO: 34912000 NR Description: putative YLP [Oryza sativa (japonica
  misc_feature (1)..(230): Homolog of NCBI NO: 12585492 NR Description: Vacuolar ATP synthase subunit E (V-ATPase E
  misc_feature (1)..(218): Homolog of NCBI NO: 25528534 NR Description: protein F22C12.4 [imported] - Arabidopsis
  misc_feature (1)..(230): Homolog of NCBI NO: 15222641 NR Description: H+-transporting ATPase protein -related
  misc_feature (1)..(230): Homolog of NCBI NO: 20340245 NR Description: vacuolar ATPase subunit E-like protein
  misc_feature (1)..(230): Homolog of NCBI NO: 1143394 NR Description: V-type proton-ATPase [Arabidopsis thaliana]
  misc_feature (1)..(230): Homolog of NCBI NO: 15237054 NR Description: H+-transporting ATPase chain E, vacuolar

SEQ ID NO: 48280 - protein, 218 aa, Arabidopsis thaliana; identical to SEQ ID NO: 47291
  peptide (1)..(218): Ceres Seq. ID no. 13649926
  misc_feature (4)..(213): Pfam Name: ATP synthase (E/31 kDa) subunit Pfam Description: ATP synthase (E/31 kDa) subunit
  misc_feature (1)..(218): Homolog of NCBI NO: 29290712 NR Description: vacuolar ATPase subunit E [Phaseolus acutifolius]
  misc_feature (1)..(218): Homolog of NCBI NO: 12585474 NR Description: Vacuolar ATP synthase subunit E (V-ATPase E
  misc_feature (1)..(218): Homolog of NCBI NO: 3334405 NR Description: Vacuolar ATP synthase subunit E (V-ATPase E
  misc_feature (1)..(218): Homolog of NCBI NO: 34912000 NR Description: putative YLP [Oryza sativa (japonica
  misc_feature (1)..(218): Homolog of NCBI NO: 12585492 NR Description: Vacuolar ATP synthase subunit E (V-ATPase E
  misc_feature (1)..(206): Homolog of NCBI NO: 25528534 NR Description: protein F22C12.4 [imported] - Arabidopsis
  misc_feature (1)..(218): Homolog of NCBI NO: 15222641 NR Description: H+-transporting ATPase protein -related
  misc_feature (1)..(218): Homolog of NCBI NO: 20340245 NR Description: vacuolar ATPase subunit E-like protein
  misc_feature (1)..(218): Homolog of NCBI NO: 1143394 NR Description: V-type proton-ATPase [Arabidopsis thaliana]
  misc_feature (1)..(218): Homolog of NCBI NO: 15237054 NR Description: H+-transporting ATPase chain E, vacuolar

SEQ ID NO: 48281 - protein, 159 aa, Arabidopsis thaliana; identical to SEQ ID NO: 47292
  peptide (1)..(159): Ceres Seq. ID no. 13649927
  misc_feature (1)..(154): Pfam Name: ATP synthase (E/31 kDa) subunit Pfam Description: ATP synthase (E/31 kDa) subunit
  misc_feature (1)..(159): Homolog of NCBI NO: 29290712 NR Description: vacuolar ATPase subunit E [Phaseolus acutifolius]
  misc_feature (1)..(159): Homolog of NCBI NO: 12585474 NR Description: Vacuolar ATP synthase subunit E (V-ATPase E
  misc_feature (1)..(159): Homolog of NCBI NO: 3334405 NR Description: Vacuolar ATP synthase subunit E (V-ATPase E
  misc_feature (1)..(159): Homolog of NCBI NO: 34912000 NR Description: putative YLP [Oryza sativa (japonica
  misc_feature (1)..(159): Homolog of NCBI NO: 12585492 NR Description: Vacuolar ATP synthase subunit E (V-ATPase E
  misc_feature (1)..(147): Homolog of NCBI NO: 25528534 NR Description: protein F22C12.4 [imported] - Arabidopsis
  misc_feature (1)..(159): Homolog of NCBI NO: 15222641 NR Description: H+-transporting ATPase protein -related
  misc_feature (1)..(159): Homolog of NCBI NO: 20340245 NR Description: vacuolar ATPase subunit E-like protein
  misc_feature (1)..(159): Homolog of NCBI NO: 1143394 NR Description: V-type proton-ATPase [Arabidopsis thaliana]
  misc_feature (1)..(159): Homolog of NCBI NO: 15237054 NR Description: H+-transporting ATPase chain E, vacuolar

SEQ ID NO: 48282 - DNA, 1108 bp, Arabidopsis thaliana
  misc_feature (1)..(1108): Ceres Seq. ID no. 13649928
  misc_feature: MA Experiment ID: 20000180 Result: Up-regulated in Transcription
  misc_feature: MA Experiment 20000180 PARAMETER Experiment Name: At_Germinating_Seeds_P Parameter: Age (hr) Value: 24 vs. 0
  misc_feature: MA Experiment 20000180 PARAMETER Experiment Name: At_Germinating_Seeds_P Parameter: Tissue Value: Germinating Seeds
  misc_feature: MA Experiment ID: 20000185 Result: Down-regulated in Transcription
  misc_feature: MA Experiment 20000185 PARAMETER Experiment Name: At_Roots__P Parameter: Age (day) Value: 7 vs. 21
  misc_feature: MA Experiment 20000185 PARAMETER Experiment Name: At_Roots__P Parameter: Organism Value: A. thaliana
  misc_feature: MA Experiment 20000185 PARAMETER Experiment Name: At_Roots__P Parameter: Tissue Value: Roots vs. Whole Plant
  misc_feature: MA Experiment ID: 20001248 Result: Down-regulated in Transcription
  misc_feature: MA Experiment 20001248 PARAMETER Experiment Name: At_Far-red-induction_P Parameter: Age (day) Value: 7
  misc_feature: MA Experiment 20001248 PARAMETER Experiment Name: At_Far-red-induction_P Parameter: Light Value: Far-red vs. White
  misc_feature: MA Experiment 20001248 PARAMETER Experiment Name: At_Far-red-induction_P Parameter: Organism Value: A. thaliana
  misc_feature: MA Experiment 20001248 PARAMETER Experiment Name: At_Far-red-induction_P Parameter: Plant Line Value: Columbia
  misc_feature: MA Experiment 20001248 PARAMETER Experiment Name: At_Far-red-induction_P Parameter: Timepoint (hr) Value: 4
  misc_feature: MA Experiment 20001248 PARAMETER Experiment Name: At_Far-red-induction_P Parameter: Tissue Value: Whole Plant
  misc_feature: MA Experiment ID: 20001450 Result: Down-regulated in Transcription
  misc_feature: MA Experiment 20001450 PARAMETER Experiment Name: At_Far-red-induction_P Parameter: Age (day) Value: 7
  misc_feature: MA Experiment 20001450 PARAMETER Experiment Name: At_Far-red-induction_P Parameter: Light Value: Far-red vs. White
  misc_feature: MA Experiment 20001450 PARAMETER Experiment Name: At_Far-red-induction_P Parameter: Organism Value: A. thaliana
  misc_feature: MA Experiment 20001450 PARAMETER Experiment Name: At_Far-red-induction_P Parameter: Plant Line Value: Columbia
  misc_feature: MA Experiment 20001450 PARAMETER Experiment Name: At_Far-red-induction_P Parameter: Timepoint (hr) Value: 8
  misc_feature: MA Experiment 20001450 PARAMETER Experiment Name: At_Far-red-induction_P Parameter: Tissue Value: Whole Plant
  misc_feature: MA Experiment ID: 20001451 Result: Down-regulated in Transcription
  misc_feature: MA Experiment 20001451 PARAMETER Experiment Name: At_Far-red-induction_P Parameter: Age (day) Value: 7
  misc_feature: MA Experiment 20001451 PARAMETER Experiment Name: At_Far-red-induction_P Parameter: Light Value: Far-red vs. White
  misc_feature: MA Experiment 20001451 PARAMETER Experiment Name: At_Far-red-induction_P Parameter: Organism Value: A. thaliana
  misc_feature: MA Experiment 20001451 PARAMETER Experiment Name: At_Far-red-induction_P Parameter: Plant Line Value: Columbia
  misc_feature: MA Experiment 20001451 PARAMETER Experiment Name: At_Far-red-induction_P Parameter: Timepoint (hr) Value: 24
  misc_feature: MA Experiment 20001451 PARAMETER Experiment Name: At_Far-red-induction_P Parameter: Tissue Value: Whole Plant
  misc_feature: MA Experiment ID: 20001560 Result: Up-regulated in Transcription
  misc_feature: MA Experiment 20001560 PARAMETER Experiment Name: At_Drought_Soil_Dry_P Parameter: Age (day) Value: 28
  misc_feature: MA Experiment 20001560 PARAMETER Experiment Name: At_Drought_Soil_Dry_P Parameter: Organism Value: A. thaliana
  misc_feature: MA Experiment 20001560 PARAMETER Experiment Name: At_Drought_Soil_Dry_P Parameter: Plant Line Value: WS
  misc_feature: MA Experiment 20001560 PARAMETER Experiment Name: At_Drought_Soil_Dry_P Parameter: Post Timepoint (hr) Value: None
  misc_feature: MA Experiment 20001560 PARAMETER Experiment Name: At_Drought_Soil_Dry_P Parameter: Post-Treatment Value: None
  misc_feature: MA Experiment 20001560 PARAMETER Experiment Name: At_Drought_Soil_Dry_P Parameter: Timepoint (day) Value: 14
  misc_feature: MA Experiment 20001560 PARAMETER Experiment Name: At_Drought_Soil_Dry_P Parameter: Treatment Value: Drought vs. No Drought
  misc_feature: MA Experiment ID: 20001905 Result: Down-regulated in Transcription
  misc_feature: MA Experiment 20001905 PARAMETER Experiment Name: At_Drought_Reproduction_P Parameter: Age (day) Value: 40
  misc_feature: MA Experiment 20001905 PARAMETER Experiment Name: At_Drought_Reproduction_P Parameter: Organism Value: A. thaliana
  misc_feature: MA Experiment 20001905 PARAMETER Experiment Name: At_Drought_Reproduction_P Parameter: Plant Line Value: WS
  misc_feature: MA Experiment 20001905 PARAMETER Experiment Name: At_Drought_Reproduction_P Parameter: Timepoint (day) Value: 10
  misc_feature: MA Experiment 20001905 PARAMETER Experiment Name: At_Drought_Reproduction_P Parameter: Tissue Value: Rosettes
  misc_feature: MA Experiment 20001905 PARAMETER Experiment Name: At_Drought_Reproduction_P Parameter: Treatment Value: Drought vs. No Drought
  misc_feature: MA Experiment ID: 20001906 Result: Down-regulated in Transcription
  misc_feature: MA Experiment 20001906 PARAMETER Experiment Name: At_Drought_Reproduction_P Parameter: Age (day) Value: 35
  misc_feature: MA Experiment 20001906 PARAMETER Experiment Name: At_Drought_Reproduction_P Parameter: Organism Value: A. thaliana
  misc_feature: MA Experiment 20001906 PARAMETER Experiment Name: At_Drought_Reproduction_P Parameter: Plant Line Value: WS
  misc_feature: MA Experiment 20001906 PARAMETER Experiment Name: At_Drought_Reproduction_P Parameter: Timepoint (day) Value: 5
  misc_feature: MA Experiment 20001906 PARAMETER Experiment Name: At_Drought_Reproduction_P Parameter: Tissue Value: Siliques
  misc_feature: MA Experiment 20001906 PARAMETER Experiment Name: At_Drought_Reproduction_P Parameter: Treatment Value: Drought vs. No Drought
  misc_feature: MA Experiment ID: 20001911 Result: Down-regulated in Transcription
  misc_feature: MA Experiment 20001911 PARAMETER Experiment Name: At_Drought_Reproduction_P Parameter: Age (day) Value: 40
  misc_feature: MA Experiment 20001911 PARAMETER Experiment Name: At_Drought_Reproduction_P Parameter: Organism Value: A. thaliana
  misc_feature: MA Experiment 20001911 PARAMETER Experiment Name: At_Drought_Reproduction_P Parameter: Plant Line Value: WS
  misc_feature: MA Experiment 20001911 PARAMETER Experiment Name: At_Drought_Reproduction_P Parameter: Timepoint (day) Value: 10
  misc_feature: MA Experiment 20001911 PARAMETER Experiment Name: At_Drought_Reproduction_P Parameter: Tissue Value: Flowers
  misc_feature: MA Experiment 20001911 PARAMETER Experiment Name: At_Drought_Reproduction_P Parameter: Treatment Value: Drought vs. No Drought
gataatgcagtgaagggacgacgatgattctgataacctcaccgacgttgacatatctccgtcaccgtctccacagttcccaaatcaaatcgccacaaattcgccgccattttcttcggagtagagaaatctccacagtcgatcgctgctacaatccatggcagtctacgaatcgtttcaaattacgaacacgagacagttccttcttatgctgtgctcgccggaaaccggagacggcgacggtagaggttgaagatgattctataaggagaattgttcggtatcttctatggactagtgaagctgtgtatatactatggctctttcttctcccttacgctcctggagatccagtttgggcaattagttcagagacagtgaattctcttttgggactttctctgaatttcttctttgtcttgcctcttacaaacgccgctggtattcacttcttacaagctcctgttcttcacccgatggctgaagggttattcaactttgtaatagcttggacactcatgtttgctccattgctatacacagaccgaaagagaaatcgatacaaaagctctcttgacgtcttatggagtctcatgatgttccttacaaacacgtttctaatcccatacatggctttacggctcaatgacgctgacccagatgataaaccaagcaaaaggtctcaacttggtgaagtgatgaccaaaggtgcaccaatagttggtctgaccggagctacggtgtgtctgatatcagcattgtggtctctctacggtcgagcagatggtgatttcggtggaatcatggacagatggcagtatctgattggttatttgggatcggagagactagcttacgcgtttatatgggatatatgtctgtacacaatctttcagccatggttgattggagagaacctgcaaaatgtgaagaagaacaagattgaattggtgaagtatctaaggtttgttcctgtttttggtttacttgcatatcatttgtttctcaatctcgaagatgaatcaatttaatttgttagtatacacacatattgtcgttgtacttataacaaatgtaattatattatggaaattttgttatgtcattt

SEQ ID NO: 48283 - protein, 335 aa, Arabidopsis thaliana
  peptide (1)..(335): Ceres Seq. ID no. 13649929
  misc_feature (144)..(324): Homolog of NCBI NO: 23043330 NR Description: hypothetical protein [Trichodesmium erythraeum
  misc_feature (1)..(107): Homolog of NCBI NO: 7939568 NR Description: gene_id:K13N2.16~unknown protein [Arabidopsis
  misc_feature (82)..(139): Homolog of NCBI NO: 38567712 NR Description: B1358B12.10 [Oryza sativa (japonica
  misc_feature (190)..(332): Homolog of NCBI NO: 38567712 NR Description: B1358B12.10 [Oryza sativa (japonica
  misc_feature (194)..(335): Homolog of NCBI NO: 7939567 NR Description: gene_id:K13N2.15~unknown protein [Arabidopsis
  misc_feature (82)..(332): Homolog of NCBI NO: 38344973 NR Description: OSJNBa0072F16.18 [Oryza sativa (japonica
  misc_feature (1)..(335): Homolog of NCBI NO: 18404669 NR Description: expressed protein [Arabidopsis thaliana]
MILITSPTLTYLRHRLHSSQIKSPQIRRHFLRSREISTVDRCYNPWQSTNRFKLRTRDSSFLCCARRKPETATVEVEDDSIRRIVRYLLWTSEAVYILWLFLLPYAPGDPVWAISSETVNSLLGLSLNFFFVLPLTNAAGIHFLQAPVLHPMAEGLFNFVIAWTLMFAPLLYTDRKRNRYKSSLDVLWSLMMFLTNTFLIPYMALRLNDADPDDKPSKRSQLGEVMTKGAPIVGLTGATVCLISALWSLYGRADGDFGGIMDRWQYLIGYLGSERLAYAFIWDICLYTIFQPWLIGENLQNVKKNKIELVKYLRFVPVFGLLAYHLFLNLEDESI

SEQ ID NO: 48284 - protein, 184 aa, Arabidopsis thaliana
  peptide (1)..(184): Ceres Seq. ID no. 13649930
  misc_feature (1)..(173): Homolog of NCBI NO: 23043330 NR Description: hypothetical protein [Trichodesmium erythraeum
  misc_feature (39)..(181): Homolog of NCBI NO: 38567712 NR Description: B1358B12.10 [Oryza sativa (japonica
  misc_feature (43)..(184): Homolog of NCBI NO: 7939567 NR Description: gene_id:K13N2.15~unknown protein [Arabidopsis
  misc_feature (1)..(181): Homolog of NCBI NO: 38344973 NR Description: OSJNBa0072F16.18 [Oryza sativa (japonica
  misc_feature (1)..(184): Homolog of NCBI NO: 18404669 NR Description: expressed protein [Arabidopsis thaliana]
MAEGLFNFVIAWTLMFAPLLYTDRKRNRYKSSLDVLWSLMMFLTNTFLIPYMALRLNDADPDDKPSKRSQLGEVMTKGAPIVGLTGATVCLISALWSLYGRADGDFGGIMDRWQYLIGYLGSERLAYAFIWDICLYTIFQPWLIGENLQNVKKNKIELVKYLRFVPVFGLLAYHLFLNLEDESI

SEQ ID NO: 48285 - protein, 170 aa, Arabidopsis thaliana
  peptide (1)..(170): Ceres Seq. ID no. 13649931
  misc_feature (1)..(159): Homolog of NCBI NO: 23043330 NR Description: hypothetical protein [Trichodesmium erythraeum
  misc_feature (25)..(167): Homolog of NCBI NO: 38567712 NR Description: B1358B12.10 [Oryza sativa (japonica
  misc_feature (29)..(170): Homolog of NCBI NO: 7939567 NR Description: gene_id:K13N2.15~unknown protein [Arabidopsis
  misc_feature (1)..(167): Homolog of NCBI NO: 38344973 NR Description: OSJNBa0072F16.18 [Oryza sativa (japonica
  misc_feature (1)..(170): Homolog of NCBI NO: 18404669 NR Description: expressed protein [Arabidopsis thaliana]
MFAPLLYTDRKRNRYKSSLDVLWSLMMFLTNTFLIPYMALRLNDADPDDKPSKRSQLGEVMTKGAPIVGLTGATVCLISALWSLYGRADGDFGGIMDRWQYLIGYLGSERLAYAFIWDICLYTIFQPWLIGENLQNVKKNKIELVKYLRFVPVFGLLAYHLFLNLEDESI

SEQ ID NO: 48286 - DNA, 1829 bp, Arabidopsis thaliana; identical to SEQ ID NO: 45969
  misc_feature (1)..(1829): Ceres Seq. ID no. 13576075
  misc_feature: MA Experiment ID: 20000182 Result: Up-regulated in Transcription
  misc_feature: MA Experiment 20000182 PARAMETER Experiment Name: At_2mM_SA_P Parameter: Age (day) Value: 14
  misc_feature: MA Experiment 20000182 PARAMETER Experiment Name: At_2mM_SA_P Parameter: Organism Value: A. thaliana
  misc_feature: MA Experiment 20000182 PARAMETER Experiment Name: At_2mM_SA_P Parameter: Plant Line Value: WS
  misc_feature: MA Experiment 20000182 PARAMETER Experiment Name: At_2mM_SA_P Parameter: Timepoint (hr) Value: 6
  misc_feature: MA Experiment 20000182 PARAMETER Experiment Name: At_2mM_SA_P Parameter: Tissue Value: Aerial
  misc_feature: MA Experiment 20000182 PARAMETER Experiment Name: At_2mM_SA_P Parameter: Treatment Value: 2mM SA vs. No Treatment

SEQ ID NO: 48287 - protein, 537 aa, Arabidopsis thaliana; identical to SEQ ID NO: 45970
  peptide (1)..(537): Ceres Seq. ID no. 13576076
  misc_feature (16)..(257): Homolog of NCBI NO: 22330689 NR Description: glycogenin glucosyltransferase (glycogenin) -
  misc_feature (28)..(191): Homolog of NCBI NO: 15223990 NR Description: glycogenin glucosyltransferase (glycogenin) -
  misc_feature (114)..(309): Homolog of NCBI NO: 39596633 NR Description: Hypothetical protein CBG07620 [Caenorhabditis
  misc_feature (114)..(280): Homolog of NCBI NO: 17569749 NR Description: Predicted CDS, glycogenin like [Caenorhabditis
  misc_feature (183)..(313): Homolog of NCBI NO: 38568059 NR Description: OSJNBa0073E02.8 [Oryza sativa (japonica
  misc_feature (105)..(280): Homolog of NCBI NO: 7507569 NR Description: hypothetical protein T10B10.8 - Caenorhabditis
  misc_feature (361)..(431): Homolog of NCBI NO: 38568059 NR Description: OSJNBa0073E02.8 [Oryza sativa (japonica
  misc_feature (1)..(236): Homolog of NCBI NO: 38568059 NR Description: OSJNBa0073E02.8 [Oryza sativa (japonica
  misc_feature (1)..(537): Homolog of NCBI NO: 18087513 NR Description: AT5g18480/F20L16_200 [Arabidopsis thaliana]
  misc_feature (1)..(537): Homolog of NCBI NO: 22326882 NR Description: glycogenin glucosyltransferase (glycogenin) -
  misc_feature (16)..(257): Homolog of NCBI NO: 22330689 NR Description: glycogenin glucosyltransferase (glycogenin) -
  misc_feature (28)..(191): Homolog of NCBI NO: 15223990 NR Description: glycogenin glucosyltransferase (glycogenin) -
  misc_feature (114)..(309): Homolog of NCBI NO: 39596633 NR Description: Hypothetical protein CBG07620 [Caenorhabditis
  misc_feature (114)..(280): Homolog of NCBI NO: 17569749 NR Description: Predicted CDS, glycogenin like [Caenorhabditis
  misc_feature (183)..(313): Homolog of NCBI NO: 38568059 NR Description: OSJNBa0073E02.8 [Oryza sativa (japonica
  misc_feature (105)..(280): Homolog of NCBI NO: 7507569 NR Description: hypothetical protein T10B10.8 - Caenorhabditis
  misc_feature (361)..(431): Homolog of NCBI NO: 38568059 NR Description: OSJNBa0073E02.8 [Oryza sativa (japonica
  misc_feature (1)..(236): Homolog of NCBI NO: 38568059 NR Description: OSJNBa0073E02.8 [Oryza sativa (japonica
  misc_feature (1)..(537): Homolog of NCBI NO: 18087513 NR Description: AT5g18480/F20L16_200 [Arabidopsis thaliana]
  misc_feature (1)..(537): Homolog of NCBI NO: 22326882 NR Description: glycogenin glucosyltransferase (glycogenin) -

SEQ ID NO: 48288 - protein, 476 aa, Arabidopsis thaliana; identical to SEQ ID NO: 45971
  peptide (1)..(476): Ceres Seq. ID no. 13576077
  misc_feature (1)..(196): Homolog of NCBI NO: 22330689 NR Description: glycogenin glucosyltransferase (glycogenin) -
  misc_feature (1)..(130): Homolog of NCBI NO: 15223990 NR Description: glycogenin glucosyltransferase (glycogenin) -
  misc_feature (53)..(248): Homolog of NCBI NO: 39596633 NR Description: Hypothetical protein CBG07620 [Caenorhabditis
  misc_feature (53)..(219): Homolog of NCBI NO: 17569749 NR Description: Predicted CDS, glycogenin like [Caenorhabditis
  misc_feature (122)..(252): Homolog of NCBI NO: 38568059 NR Description: OSJNBa0073E02.8 [Oryza sativa (japonica
  misc_feature (44)..(219): Homolog of NCBI NO: 7507569 NR Description: hypothetical protein T10B10.8 - Caenorhabditis
  misc_feature (300)..(370): Homolog of NCBI NO: 38568059 NR Description: OSJNBa0073E02.8 [Oryza sativa (japonica
  misc_feature (1)..(175): Homolog of NCBI NO: 38568059 NR Description: OSJNBa0073E02.8 [Oryza sativa (japonica
  misc_feature (1)..(476): Homolog of NCBI NO: 18087513 NR Description: AT5g18480/F20L16_200 [Arabidopsis thaliana]
  misc_feature (1)..(476): Homolog of NCBI NO: 22326882 NR Description: glycogenin glucosyltransferase (glycogenin) -
  misc_feature (1)..(196): Homolog of NCBI NO: 22330689 NR Description: glycogenin glucosyltransferase (glycogenin) -
  misc_feature (1)..(130): Homolog of NCBI NO: 15223990 NR Description: glycogenin glucosyltransferase (glycogenin) -
  misc_feature (53)..(248): Homolog of NCBI NO: 39596633 NR Description: Hypothetical protein CBG07620 [Caenorhabditis
  misc_feature (53)..(219): Homolog of NCBI NO: 17569749 NR Description: Predicted CDS, glycogenin like [Caenorhabditis
  misc_feature (122)..(252): Homolog of NCBI NO: 38568059 NR Description: OSJNBa0073E02.8 [Oryza sativa (japonica
  misc_feature (44)..(219): Homolog of NCBI NO: 7507569 NR Description: hypothetical protein T10B10.8 - Caenorhabditis
  misc_feature (300)..(370): Homolog of NCBI NO: 38568059 NR Description: OSJNBa0073E02.8 [Oryza sativa (japonica
  misc_feature (1)..(175): Homolog of NCBI NO: 38568059 NR Description: OSJNBa0073E02.8 [Oryza sativa (japonica
  misc_feature (1)..(476): Homolog of NCBI NO: 18087513 NR Description: AT5g18480/F20L16_200 [Arabidopsis thaliana]
  misc_feature (1)..(476): Homolog of NCBI NO: 22326882 NR Description: glycogenin glucosyltransferase (glycogenin) -

SEQ ID NO: 48289 - protein, 424 aa, Arabidopsis thaliana; identical to SEQ ID NO: 45972
  peptide (1)..(424): Ceres Seq. ID no. 13576078
  misc_feature (1)..(144): Homolog of NCBI NO: 22330689 NR Description: glycogenin glucosyltransferase (glycogenin) -
  misc_feature (1)..(78): Homolog of NCBI NO: 15223990 NR Description: glycogenin glucosyltransferase (glycogenin) -
  misc_feature (1)..(196): Homolog of NCBI NO: 39596633 NR Description: Hypothetical protein CBG07620 [Caenorhabditis
  misc_feature (1)..(167): Homolog of NCBI NO: 17569749 NR Description: Predicted CDS, glycogenin like [Caenorhabditis
  misc_feature (70)..(200): Homolog of NCBI NO: 38568059 NR Description: OSJNBa0073E02.8 [Oryza sativa (japonica
  misc_feature (1)..(167): Homolog of NCBI NO: 7507569 NR Description: hypothetical protein T10B10.8 - Caenorhabditis
  misc_feature (248)..(318): Homolog of NCBI NO: 38568059 NR Description: OSJNBa0073E02.8 [Oryza sativa (japonica
  misc_feature (1)..(123): Homolog of NCBI NO: 38568059 NR Description: OSJNBa0073E02.8 [Oryza sativa (japonica
  misc_feature (1)..(424): Homolog of NCBI NO: 18087513 NR Description: AT5g18480/F20L16_200 [Arabidopsis thaliana]
  misc_feature (1)..(424): Homolog of NCBI NO: 22326882 NR Description: glycogenin glucosyltransferase (glycogenin) -
  misc_feature (1)..(144): Homolog of NCBI NO: 22330689 NR Description: glycogenin glucosyltransferase (glycogenin) -
  misc_feature (1)..(78): Homolog of NCBI NO: 15223990 NR Description: glycogenin glucosyltransferase (glycogenin) -
  misc_feature (1)..(196): Homolog of NCBI NO: 39596633 NR Description: Hypothetical protein CBG07620 [Caenorhabditis
  misc_feature (1)..(167): Homolog of NCBI NO: 17569749 NR Description: Predicted CDS, glycogenin like [Caenorhabditis
  misc_feature (70)..(200): Homolog of NCBI NO: 38568059 NR Description: OSJNBa0073E02.8 [Oryza sativa (japonica
  misc_feature (1)..(167): Homolog of NCBI NO: 7507569 NR Description: hypothetical protein T10B10.8 - Caenorhabditis
  misc_feature (248)..(318): Homolog of NCBI NO: 38568059 NR Description: OSJNBa0073E02.8 [Oryza sativa (japonica
  misc_feature (1)..(123): Homolog of NCBI NO: 38568059 NR Description: OSJNBa0073E02.8 [Oryza sativa (japonica
  misc_feature (1)..(424): Homolog of NCBI NO: 18087513 NR Description: AT5g18480/F20L16_200 [Arabidopsis thaliana]
  misc_feature (1)..(424): Homolog of NCBI NO: 22326882 NR Description: glycogenin glucosyltransferase (glycogenin) -

SEQ ID NO: 48290 - DNA, 2828 bp, Arabidopsis thaliana; identical to SEQ ID NO: 44938
  misc_feature (1)..(2828): Ceres Seq. ID no. 13646314
  misc_feature: MA Experiment ID: 20000234 Result: Up-regulated in Transcription
  misc_feature: MA Experiment 20000234 PARAMETER Experiment Name: At_Siliques_P Parameter: Age (day) Value: 21
  misc_feature: MA Experiment 20000234 PARAMETER Experiment Name: At_Siliques_P Parameter: Organism Value: A. thaliana
  misc_feature: MA Experiment 20000234 PARAMETER Experiment Name: At_Siliques_P Parameter: Plant Line Value: WS
  misc_feature: MA Experiment 20000234 PARAMETER Experiment Name: At_Siliques_P Parameter: Tissue Value: Less Than 5mm Siliques vs. Whole Plant

SEQ ID NO: 48291 - protein, 814 aa, Arabidopsis thaliana; identical to SEQ ID NO: 44939
  peptide (1)..(814): Ceres Seq. ID no. 13646315
  misc_feature (256)..(373): Pfam Name: ABC1 family Pfam Description: ABC1 family
  misc_feature (256)..(373): Pfam Name: ABC1 family Pfam Description: ABC1 family
  misc_feature (256)..(373): Pfam Name: ABC1 family Pfam Description: ABC1 family
  misc_feature (119)..(395): Homolog of NCBI NO: 38344898 NR Description: OSJNBb0079B02.1 [Oryza sativa (japonica
  misc_feature (146)..(603): Homolog of NCBI NO: 23042448 NR Description: hypothetical protein [Trichodesmium erythraeum
  misc_feature (146)..(629): Homolog of NCBI NO: 16329739 NR Description: ABC1-like [Synechocystis sp. PCC 6803]
  misc_feature (145)..(682): Homolog of NCBI NO: 18412437 NR Description: expressed protein [Arabidopsis thaliana]
  misc_feature (146)..(603): Homolog of NCBI NO: 16331408 NR Description: ABC1-like [Synechocystis sp. PCC 6803]
  misc_feature (119)..(395): Homolog of NCBI NO: 38344898 NR Description: OSJNBb0079B02.1 [Oryza sativa (japonica
  misc_feature (146)..(629): Homolog of NCBI NO: 16329739 NR Description: ABC1-like [Synechocystis sp. PCC 6803]
  misc_feature (146)..(603): Homolog of NCBI NO: 16331408 NR Description: ABC1-like [Synechocystis sp. PCC 6803]
  misc_feature (145)..(682): Homolog of NCBI NO: 18412437 NR Description: expressed protein [Arabidopsis thaliana]
  misc_feature (146)..(629): Homolog of NCBI NO: 16329739 NR Description: ABC1-like [Synechocystis sp. PCC 6803]
  misc_feature (146)..(603): Homolog of NCBI NO: 23042448 NR Description: hypothetical protein [Trichodesmium erythraeum
  misc_feature (119)..(395): Homolog of NCBI NO: 38344898 NR Description: OSJNBb0079B02.1 [Oryza sativa (japonica
  misc_feature (1)..(361): Homolog of NCBI NO: 18404977 NR Description: ABC transporter -related [Arabidopsis thaliana]
  misc_feature (75)..(704): Homolog of NCBI NO: 15451577 NR Description: Putative ABC transporter [Oryza sativa]
  misc_feature (144)..(619): Homolog of NCBI NO: 23129126 NR Description: hypothetical protein [Nostoc punctiforme]
  misc_feature (143)..(669): Homolog of NCBI NO: 17232452 NR Description: hypothetical protein [Nostoc sp. PCC 7120]
  misc_feature (146)..(608): Homolog of NCBI NO: 22298493 NR Description: ORF_ID:tll0950~hypothetical protein
  misc_feature (1)..(361): Homolog of NCBI NO: 18404977 NR Description: ABC transporter -related [Arabidopsis thaliana]
  misc_feature (75)..(704): Homolog of NCBI NO: 15451577 NR Description: Putative ABC transporter [Oryza sativa]
  misc_feature (144)..(619): Homolog of NCBI NO: 23129126 NR Description: hypothetical protein [Nostoc punctiforme]
  misc_feature (143)..(669): Homolog of NCBI NO: 17232452 NR Description: hypothetical protein [Nostoc sp. PCC 7120]
  misc_feature (146)..(608): Homolog of NCBI NO: 22298493 NR Description: ORF_ID:tll0950~hypothetical protein
  misc_feature (146)..(603): Homolog of NCBI NO: 16331408 NR Description: ABC1-like [Synechocystis sp. PCC 6803]
  misc_feature (145)..(682): Homolog of NCBI NO: 18412437 NR Description: expressed protein [Arabidopsis thaliana]
  misc_feature (146)..(603): Homolog of NCBI NO: 23042448 NR Description: hypothetical protein [Trichodesmium erythraeum
  misc_feature (146)..(608): Homolog of NCBI NO: 22298493 NR Description: ORF_ID:tll0950~hypothetical protein
  misc_feature (143)..(669): Homolog of NCBI NO: 17232452 NR Description: hypothetical protein [Nostoc sp. PCC 7120]
  misc_feature (144)..(619): Homolog of NCBI NO: 23129126 NR Description: hypothetical protein [Nostoc punctiforme]
  misc_feature (75)..(704): Homolog of NCBI NO: 15451577 NR Description: Putative ABC transporter [Oryza sativa]
  misc_feature (1)..(361): Homolog of NCBI NO: 18404977 NR Description: ABC transporter -related [Arabidopsis thaliana]

SEQ ID NO: 48292 - protein, 697 aa, Arabidopsis thaliana; identical to SEQ ID NO: 44940
  peptide (1)..(697): Ceres Seq. ID no. 13646316
  misc_feature (139)..(256): Pfam Name: ABC1 family Pfam Description: ABC1 family
  misc_feature (139)..(256): Pfam Name: ABC1 family Pfam Description: ABC1 family
  misc_feature (139)..(256): Pfam Name: ABC1 family Pfam Description: ABC1 family
  misc_feature (2)..(278): Homolog of NCBI NO: 38344898 NR Description: OSJNBb0079B02.1 [Oryza sativa (japonica
  misc_feature (29)..(486): Homolog of NCBI NO: 23042448 NR Description: hypothetical protein [Trichodesmium erythraeum
  misc_feature (29)..(512): Homolog of NCBI NO: 16329739 NR Description: ABC1-like [Synechocystis sp. PCC 6803]
  misc_feature (28)..(565): Homolog of NCBI NO: 18412437 NR Description: expressed protein [Arabidopsis thaliana]
  misc_feature (29)..(486): Homolog of NCBI NO: 16331408 NR Description: ABC1-like [Synechocystis sp. PCC 6803]
  misc_feature (2)..(278): Homolog of NCBI NO: 38344898 NR Description: OSJNBb0079B02.1 [Oryza sativa (japonica
  misc_feature (29)..(512): Homolog of NCBI NO: 16329739 NR Description: ABC1-like [Synechocystis sp. PCC 6803]
  misc_feature (29)..(486): Homolog of NCBI NO: 16331408 NR Description: ABC1-like [Synechocystis sp. PCC 6803]
  misc_feature (28)..(565): Homolog of NCBI NO: 18412437 NR Description: expressed protein [Arabidopsis thaliana]
  misc_feature (29)..(512): Homolog of NCBI NO: 16329739 NR Description: ABC1-like [Synechocystis sp. PCC 6803]
  misc_feature (29)..(486): Homolog of NCBI NO: 23042448 NR Description: hypothetical protein [Trichodesmium erythraeum
  misc_feature (2)..(278): Homolog of NCBI NO: 38344898 NR Description: OSJNBb0079B02.1 [Oryza sativa (japonica
  misc_feature (1)..(244): Homolog of NCBI NO: 18404977 NR Description: ABC transporter -related [Arabidopsis thaliana]
  misc_feature (1)..(587): Homolog of NCBI NO: 15451577 NR Description: Putative ABC transporter [Oryza sativa]
  misc_feature (27)..(502): Homolog of NCBI NO: 23129126 NR Description: hypothetical protein [Nostoc punctiforme]
  misc_feature (26)..(552): Homolog of NCBI NO: 17232452 NR Description: hypothetical protein [Nostoc sp. PCC 7120]
  misc_feature (29)..(491): Homolog of NCBI NO: 22298493 NR Description: ORF_ID:tll0950~hypothetical protein
  misc_feature (1)..(244): Homolog of NCBI NO: 18404977 NR Description: ABC transporter -related [Arabidopsis thaliana]
  misc_feature (1)..(587): Homolog of NCBI NO: 15451577 NR Description: Putative ABC transporter [Oryza sativa]
  misc_feature (27)..(502): Homolog of NCBI NO: 23129126 NR Description: hypothetical protein [Nostoc punctiforme]
  misc_feature (26)..(552): Homolog of NCBI NO: 17232452 NR Description: hypothetical protein [Nostoc sp. PCC 7120]
  misc_feature (29)..(491): Homolog of NCBI NO: 22298493 NR Description: ORF_ID:tll0950~hypothetical protein
  misc_feature (29)..(486): Homolog of NCBI NO: 16331408 NR Description: ABC1-like [Synechocystis sp. PCC 6803]
  misc_feature (28)..(565): Homolog of NCBI NO: 18412437 NR Description: expressed protein [Arabidopsis thaliana]
  misc_feature (29)..(486): Homolog of NCBI NO: 23042448 NR Description: hypothetical protein [Trichodesmium erythraeum
  misc_feature (29)..(491): Homolog of NCBI NO: 22298493 NR Description: ORF_ID:tll0950~hypothetical protein
  misc_feature (26)..(552): Homolog of NCBI NO: 17232452 NR Description: hypothetical protein [Nostoc sp. PCC 7120]
  misc_feature (27)..(502): Homolog of NCBI NO: 23129126 NR Description: hypothetical protein [Nostoc punctiforme]
  misc_feature (1)..(587): Homolog of NCBI NO: 15451577 NR Description: Putative ABC transporter [Oryza sativa]
  misc_feature (1)..(244): Homolog of NCBI NO: 18404977 NR Description: ABC transporter -related [Arabidopsis thaliana]

SEQ ID NO: 48293 - protein, 678 aa, Arabidopsis thaliana; identical to SEQ ID NO: 44941
  peptide (1)..(678): Ceres Seq. ID no. 13646317
  misc_feature (120)..(237): Pfam Name: ABC1 family Pfam Description: ABC1 family
  misc_feature (120)..(237): Pfam Name: ABC1 family Pfam Description: ABC1 family
  misc_feature (120)..(237): Pfam Name: ABC1 family Pfam Description: ABC1 family
  misc_feature (1)..(259): Homolog of NCBI NO: 38344898 NR Description: OSJNBb0079B02.1 [Oryza sativa (japonica
  misc_feature (10)..(467): Homolog of NCBI NO: 23042448 NR Description: hypothetical protein [Trichodesmium erythraeum
  misc_feature (10)..(493): Homolog of NCBI NO: 16329739 NR Description: ABC1-like [Synechocystis sp. PCC 6803]
  misc_feature (9)..(546): Homolog of NCBI NO: 18412437 NR Description: expressed protein [Arabidopsis thaliana]
  misc_feature (10)..(467): Homolog of NCBI NO: 16331408 NR Description: ABC1-like [Synechocystis sp. PCC 6803]
  misc_feature (1)..(259): Homolog of NCBI NO: 38344898 NR Description: OSJNBb0079B02.1 [Oryza sativa (japonica
  misc_feature (10)..(493): Homolog of NCBI NO: 16329739 NR Description: ABC1-like [Synechocystis sp. PCC 6803]
  misc_feature (10)..(467): Homolog of NCBI NO: 16331408 NR Description: ABC1-like [Synechocystis sp. PCC 6803]
  misc_feature (9)..(546): Homolog of NCBI NO: 18412437 NR Description: expressed protein [Arabidopsis thaliana]
  misc_feature (10)..(493): Homolog of NCBI NO: 16329739 NR Description: ABC1-like [Synechocystis sp. PCC 6803]
  misc_feature (10)..(467): Homolog of NCBI NO: 23042448 NR Description: hypothetical protein [Trichodesmium erythraeum
  misc_feature (1)..(259): Homolog of NCBI NO: 38344898 NR Description: OSJNBb0079B02.1 [Oryza sativa (japonica
  misc_feature (1)..(225): Homolog of NCBI NO: 18404977 NR Description: ABC transporter -related [Arabidopsis thaliana]
  misc_feature (1)..(568): Homolog of NCBI NO: 15451577 NR Description: Putative ABC transporter [Oryza sativa]
  misc_feature (8)..(483): Homolog of NCBI NO: 23129126 NR Description: hypothetical protein [Nostoc punctiforme]
  misc_feature (7)..(533): Homolog of NCBI NO: 17232452 NR Description: hypothetical protein [Nostoc sp. PCC 7120]
  misc_feature (10)..(472): Homolog of NCBI NO: 22298493 NR Description: ORF_ID:tll0950~hypothetical protein
  misc_feature (1)..(225): Homolog of NCBI NO: 18404977 NR Description: ABC transporter -related [Arabidopsis thaliana]
  misc_feature (1)..(568): Homolog of NCBI NO: 15451577 NR Description: Putative ABC transporter [Oryza sativa]
  misc_feature (8)..(483): Homolog of NCBI NO: 23129126 NR Description: hypothetical protein [Nostoc punctiforme]
  misc_feature (7)..(533): Homolog of NCBI NO: 17232452 NR Description: hypothetical protein [Nostoc sp. PCC 7120]
  misc_feature (10)..(472): Homolog of NCBI NO: 22298493 NR Description: ORF_ID:tll0950~hypothetical protein
  misc_feature (10)..(467): Homolog of NCBI NO: 16331408 NR Description: ABC1-like [Synechocystis sp. PCC 6803]
  misc_feature (9)..(546): Homolog of NCBI NO: 18412437 NR Description: expressed protein [Arabidopsis thaliana]
  misc_feature (10)..(467): Homolog of NCBI NO: 23042448 NR Description: hypothetical protein [Trichodesmium erythraeum
  misc_feature (10)..(472): Homolog of NCBI NO: 22298493 NR Description: ORF_ID:tll0950~hypothetical protein
  misc_feature (7)..(533): Homolog of NCBI NO: 17232452 NR Description: hypothetical protein [Nostoc sp. PCC 7120]
  misc_feature (8)..(483): Homolog of NCBI NO: 23129126 NR Description: hypothetical protein [Nostoc punctiforme]
  misc_feature (1)..(568): Homolog of NCBI NO: 15451577 NR Description: Putative ABC transporter [Oryza sativa]
  misc_feature (1)..(225): Homolog of NCBI NO: 18404977 NR Description: ABC transporter -related [Arabidopsis thaliana]

SEQ ID NO: 48294 - DNA, 1093 bp, Arabidopsis thaliana
  misc_feature (1)..(1093): Ceres Seq. ID no. 13649073
ggtaatccatctgagcgcttcaagaatgtcgtcccatgctcgaggtaaggagctaattcctctcctgtctttctcccaccaaaaaaaacaaccaaatctctcgatctcatcgacgacgaagatgaacaagaagaacccagatcagaaatccgacatgtcgtcttcttcatcttctccgaagaaacaaaccctcttcatatcatccttaatcattctctggtacacctccaacatcggtgttcttctcctcaacaagttcctcctctccaattacggattcaaattccctattttcctcacaatgtgtcacatgtccgcttgcgctatcctcagctacgtctccatcgtcttcctcaagctcgtccctctccaatacctcaaatctcgttctcagtttctcaaggttgcgactctcagcattgtcttttgtgcctctgtcgtcggtggaaacatctcccttcgttatctccctgtctcctttaatcaagccgttggtgctacgacgccgtttttcactgcactcttcgcttatatcatgacctttaagagagaagcttgggtcacttatggcgctctcgtccccgttgttaccggtgtcgttatcgccagtgggggtgaaccaggttttcactggtttggattcattatgtgcattagtgctactgcagcaagagcttttaaatctgttcttcaaggcatcttactttcttccgagggagaaaggttgaattcgatgaatttgatgctgtacatgtctccaatagccgtcattgctcttctgcctgtcacaatttttatggagccggacgtgatgagtgtgacactaacactcggaagacaacataagtacatgtatatacttctgctggttaactctgtaatggcttattcagccaacttgttaaactttctggttaccaagcacacaagcgcacttaccctgcaggtccttggaaatgctaaaggagcggttgcagttgtgatatcgatcctgcttttccgaaacccggtaacggtgatgggaattggcgggtacagtataaccgttctcggggtggttgcttatggagagactaaacgcaggtttagatga

SEQ ID NO: 48295 - protein, 363 aa, Arabidopsis thaliana
  peptide (1)..(363): Ceres Seq. ID no. 13649074
  misc_feature (80)..(203): Pfam Name: Integral membrane protein DUF6 Pfam Description: Integral membrane protein DUF6
  misc_feature (60)..(356): Homolog of NCBI NO: 15219121 NR Description: glucose-6-phosphate/phosphate
  misc_feature (52)..(361): Homolog of NCBI NO: 15221371 NR Description: phosphate translocator-related [Arabidopsis
  misc_feature (65)..(207): Homolog of NCBI NO: 15229717 NR Description: phosphate translocator-related [Arabidopsis
  misc_feature (206)..(361): Homolog of NCBI NO: 15229717 NR Description: phosphate translocator-related [Arabidopsis
  misc_feature (65)..(361): Homolog of NCBI NO: 30681126 NR Description: phosphate translocator-related [Arabidopsis
  misc_feature (65)..(361): Homolog of NCBI NO: 9759107 NR Description: phosphate/phosphoenolpyruvate translocator
  misc_feature (65)..(361): Homolog of NCBI NO: 27476065 NR Description: Putative phosphate/phosphoenolpyruvate
  misc_feature (56)..(363): Homolog of NCBI NO: 17064798 NR Description: phosphate/phosphoenolpyruvate translocator-like
  misc_feature (56)..(363): Homolog of NCBI NO: 15237644 NR Description: phosphate translocator-related [Arabidopsis
  misc_feature (9)..(363): Homolog of NCBI NO: 15228248 NR Description: phosphate translocator-related [Arabidopsis
VIHLSASRMSSHARGKELIPLLSFSHQKKQPNLSISSTTKMNKKNPDQKSDMSSSSSSPKKQTLFISSLIILWYTSNIGVLLLNKFLLSNYGFKFPIFLTMCHMSACAILSYVSIVFLKLVPLQYLKSRSQFLKVATLSIVFCASVVGGNISLRYLPVSFNQAVGATTPFFTALFAYIMTFKREAWVTYGALVPVVTGVVIASGGEPGFHWFGFIMCISATAARAFKSVLQGILLSSEGERLNSMNLMLYMSPIAVIALLPVTIFMEPDVMSVTLTLGRQHKYMYILLLVNSVMAYSANLLNFLVTKHTSALTLQVLGNAKGAVAVVISILLFRNPVTVMGIGGYSITVLGVVAYGETKRRFR

SEQ ID NO: 48296 - protein, 355 aa, Arabidopsis thaliana
  peptide (1)..(355): Ceres Seq. ID no. 13649075
  misc_feature (72)..(195): Pfam Name: Integral membrane protein DUF6 Pfam Description: Integral membrane protein DUF6
  misc_feature (52)..(348): Homolog of NCBI NO: 15219121 NR Description: glucose-6-phosphate/phosphate
  misc_feature (44)..(353): Homolog of NCBI NO: 15221371 NR Description: phosphate translocator-related [Arabidopsis
  misc_feature (57)..(199): Homolog of NCBI NO: 15229717 NR Description: phosphate translocator-related [Arabidopsis
  misc_feature (198)..(353): Homolog of NCBI NO: 15229717 NR Description: phosphate translocator-related [Arabidopsis
  misc_feature (57)..(353): Homolog of NCBI NO: 30681126 NR Description: phosphate translocator-related [Arabidopsis
  misc_feature (57)..(353): Homolog of NCBI NO: 9759107 NR Description: phosphate/phosphoenolpyruvate translocator
  misc_feature (57)..(353): Homolog of NCBI NO: 27476065 NR Description: Putative phosphate/phosphoenolpyruvate
  misc_feature (48)..(355): Homolog of NCBI NO: 17064798 NR Description: phosphate/phosphoenolpyruvate translocator-like
  misc_feature (48)..(355): Homolog of NCBI NO: 15237644 NR Description: phosphate translocator-related [Arabidopsis
  misc_feature (1)..(355): Homolog of NCBI NO: 15228248 NR Description: phosphate translocator-related [Arabidopsis
MSSHARGKELIPLLSFSHQKKQPNLSISSTTKMNKKNPDQKSDMSSSSSSPKKQTLFISSLIILWYTSNIGVLLLNKFLLSNYGFKFPIFLTMCHMSACAILSYVSIVFLKLVPLQYLKSRSQFLKVATLSIVFCASVVGGNISLRYLPVSFNQAVGATTPFFTALFAYIMTFKREAWVTYGALVPVVTGVVIASGGEPGFHWFGFIMCISATAARAFKSVLQGILLSSEGERLNSMNLMLYMSPIAVIALLPVTIFMEPDVMSVTLTLGRQHKYMYILLLVNSVMAYSANLLNFLVTKHTSALTLQVLGNAKGAVAVVISILLFRNPVTVMGIGGYSITVLGVVAYGETKRRFR

SEQ ID NO: 48297 - protein, 323 aa, Arabidopsis thaliana
  peptide (1)..(323): Ceres Seq. ID no. 13649076
  misc_feature (40)..(163): Pfam Name: Integral membrane protein DUF6 Pfam Description: Integral membrane protein DUF6
  misc_feature (20)..(316): Homolog of NCBI NO: 15219121 NR Description: glucose-6-phosphate/phosphate
  misc_feature (12)..(321): Homolog of NCBI NO: 15221371 NR Description: phosphate translocator-related [Arabidopsis
  misc_feature (25)..(167): Homolog of NCBI NO: 15229717 NR Description: phosphate translocator-related [Arabidopsis
  misc_feature (166)..(321): Homolog of NCBI NO: 15229717 NR Description: phosphate translocator-related [Arabidopsis
  misc_feature (25)..(321): Homolog of NCBI NO: 30681126 NR Description: phosphate translocator-related [Arabidopsis
  misc_feature (25)..(321): Homolog of NCBI NO: 9759107 NR Description: phosphate/phosphoenolpyruvate translocator
  misc_feature (25)..(321): Homolog of NCBI NO: 27476065 NR Description: Putative phosphate/phosphoenolpyruvate
  misc_feature (16)..(323): Homolog of NCBI NO: 17064798 NR Description: phosphate/phosphoenolpyruvate translocator-like
  misc_feature (16)..(323): Homolog of NCBI NO: 15237644 NR Description: phosphate translocator-related [Arabidopsis
  misc_feature (1)..(323): Homolog of NCBI NO: 15228248 NR Description: phosphate translocator-related [Arabidopsis
MNKKNPDQKSDMSSSSSSPKKQTLFISSLIILWYTSNIGVLLLNKFLLSNYGFKFPIFLTMCHMSACAILSYVSIVFLKLVPLQYLKSRSQFLKVATLSIVFCASVVGGNISLRYLPVSFNQAVGATTPFFTALFAYIMTFKREAWVTYGALVPVVTGVVIASGGEPGFHWFGFIMCISATAARAFKSVLQGILLSSEGERLNSMNLMLYMSPIAVIALLPVTIFMEPDVMSVTLTLGRQHKYMYILLLVNSVMAYSANLLNFLVTKHTSALTLQVLGNAKGAVAVVISILLFRNPVTVMGIGGYSITVLGVVAYGETKRRFR

SEQ ID NO: 48298 - DNA, 1000 bp, Arabidopsis thaliana
  misc_feature (1)..(1000): Ceres Seq. ID no. 13649148
  misc_feature: MA Experiment ID: 20000214 Result: Down-regulated in Transcription
  misc_feature: MA Experiment 20000214 PARAMETER Experiment Name: At_4deg_Cold_P Parameter: Timepoint (hr) Value: 6
ggcaaagaccagagagacactatgaatcttccatcgtcaacgacggcgacgtcaacctccgcgacttccgatgcagcggcgaattccaccgaaagatgcgatgattgcggaagctcagacgcctgggtgatacacacagtacgtctccgtgcatctctccgcttcttctgcactcattgtctcctccgcaaccatccggcgtcgttttgtcccggttgcttcgccttgtacgattcatctccgccgtcttttcgccgcgtctcttgttccattaaagggtgccactccttgactcacattcactgtgccggcgatgaaagtcacctttcttatctctgtcctccttgccgagaccctaattccttctccttcttccgccctatcgtcgacgaaaacggctctcgcttcgtcgataaagcactctccgaagctttcttatgcgctgctaagatcgctgcttcttcaatgaacaaagctgttatgaccgctaagtgtgaaactgaccggagaggaaaagaagctgctttggcgaagaagagagctcgcgaggctcttgagcaggttgtcatgcttgatgccaaggagaaggcaagatcggttgttcctaagcttaaagaagctcccgttgatcagaaaccaaaactgagtcctgcatcaaatggtgctactgtgaaagaaacagagagctctgatactactactactcctacgacgactacgactaagaacaatggaggtacagagaaacagaatccggcaacacaattggctaaagttaagcaagaagctgatgcgtctaggtgaaatcaatgtttaaagtttcaggtaccacaacttcaagcatttcggcttctgatgaaagaaactgattctgattcgatctcaatgtagattgtaagttatccttttttggtttgttcatgtttttcgatcgtttactatgtgtaggaatctttggaactgtgaagtgtttttttaaaataaatcatatgtttctgtg

SEQ ID NO: 48299 - protein, 267 aa, Arabidopsis thaliana
  peptide (1)..(267): Ceres Seq. ID no. 13649149
  misc_feature (33)..(206): Homolog of NCBI NO: 15229050 NR Description: hypothetical protein [Arabidopsis thaliana]
  misc_feature (8)..(267): Homolog of NCBI NO: 18391032 NR Description: expressed protein [Arabidopsis thaliana]
GKDQRDTMNLPSSTTATSTSATSDAAANSTERCDDCGSSDAWVIHTVRLRASLRFFCTHCLLRNHPASFCPGCFALYDSSPPSFRRVSCSIKGCHSLTHIHCAGDESHLSYLCPPCRDPNSFSFFRPIVDENGSRFVDKALSEAFLCAAKIAASSMNKAVMTAKCETDRRGKEAALAKKRAREALEQVVMLDAKEKARSVVPKLKEAPVDQKPKLSPASNGATVKETESSDTTTTPTTTTTKNNGGTEKQNPATQLAKVKQEADASR

SEQ ID NO: 48300 - protein, 260 aa, Arabidopsis thaliana
  peptide (1)..(260): Ceres Seq. ID no. 13649150
  misc_feature (26)..(199): Homolog of NCBI NO: 15229050 NR Description: hypothetical protein [Arabidopsis thaliana]
  misc_feature (1)..(260): Homolog of NCBI NO: 18391032 NR Description: expressed protein [Arabidopsis thaliana]
MNLPSSTTATSTSATSDAAANSTERCDDCGSSDAWVIHTVRLRASLRFFCTHCLLRNHPASFCPGCFALYDSSPPSFRRVSCSIKGCHSLTHIHCAGDESHLSYLCPPCRDPNSFSFFRPIVDENGSRFVDKALSEAFLCAAKIAASSMNKAVMTAKCETDRRGKEAALAKKRAREALEQVVMLDAKEKARSVVPKLKEAPVDQKPKLSPASNGATVKETESSDTTTTPTTTTTKNNGGTEKQNPATQLAKVKQEADASR

SEQ ID NO: 48301 - DNA, 1606 bp, Arabidopsis thaliana; identical to SEQ ID NO: 47677
  misc_feature (1)..(1606): Ceres Seq. ID no. 12725994
  misc_feature: MA Experiment ID: 20000452 Result: Up-regulated in Transcription
  misc_feature: MA Experiment 20000452 PARAMETER Experiment Name: At_CS6879_Shoots-Roots_P Parameter: Age (day) Value: 14
  misc_feature: MA Experiment 20000452 PARAMETER Experiment Name: At_CS6879_Shoots-Roots_P Parameter: Organism Value: A. thaliana
  misc_feature: MA Experiment 20000452 PARAMETER Experiment Name: At_CS6879_Shoots-Roots_P Parameter: Plant Line Value: CS6879 vs. WS
  misc_feature: MA Experiment 20000452 PARAMETER Experiment Name: At_CS6879_Shoots-Roots_P Parameter: Tissue Value: Shoots
  misc_feature: MA Experiment ID: 20001451 Result: Down-regulated in Transcription
  misc_feature: MA Experiment 20001451 PARAMETER Experiment Name: At_Far-red-induction_P Parameter: Age (day) Value: 7
  misc_feature: MA Experiment 20001451 PARAMETER Experiment Name: At_Far-red-induction_P Parameter: Light Value: Far-red vs. White
  misc_feature: MA Experiment 20001451 PARAMETER Experiment Name: At_Far-red-induction_P Parameter: Organism Value: A. thaliana
  misc_feature: MA Experiment 20001451 PARAMETER Experiment Name: At_Far-red-induction_P Parameter: Plant Line Value: Columbia
  misc_feature: MA Experiment 20001451 PARAMETER Experiment Name: At_Far-red-induction_P Parameter: Timepoint (hr) Value: 24
  misc_feature: MA Experiment 20001451 PARAMETER Experiment Name: At_Far-red-induction_P Parameter: Tissue Value: Whole Plant
  misc_feature: MA Experiment ID: 20001905 Result: Down-regulated in Transcription
  misc_feature: MA Experiment 20001905 PARAMETER Experiment Name: At_Drought_Reproduction_P Parameter: Age (day) Value: 40
  misc_feature: MA Experiment 20001905 PARAMETER Experiment Name: At_Drought_Reproduction_P Parameter: Organism Value: A. thaliana
  misc_feature: MA Experiment 20001905 PARAMETER Experiment Name: At_Drought_Reproduction_P Parameter: Plant Line Value: WS
  misc_feature: MA Experiment 20001905 PARAMETER Experiment Name: At_Drought_Reproduction_P Parameter: Timepoint (day) Value: 10
  misc_feature: MA Experiment 20001905 PARAMETER Experiment Name: At_Drought_Reproduction_P Parameter: Tissue Value: Rosettes
  misc_feature: MA Experiment 20001905 PARAMETER Experiment Name: At_Drought_Reproduction_P Parameter: Treatment Value: Drought vs. No Drought
  misc_feature: MA Experiment ID: 20001911 Result: Down-regulated in Transcription
  misc_feature: MA Experiment 20001911 PARAMETER Experiment Name: At_Drought_Reproduction_P Parameter: Age (day) Value: 40
  misc_feature: MA Experiment 20001911 PARAMETER Experiment Name: At_Drought_Reproduction_P Parameter: Organism Value: A. thaliana
  misc_feature: MA Experiment 20001911 PARAMETER Experiment Name: At_Drought_Reproduction_P Parameter: Plant Line Value: WS
  misc_feature: MA Experiment 20001911 PARAMETER Experiment Name: At_Drought_Reproduction_P Parameter: Timepoint (day) Value: 10
  misc_feature: MA Experiment 20001911 PARAMETER Experiment Name: At_Drought_Reproduction_P Parameter: Tissue Value: Flowers
  misc_feature: MA Experiment 20001911 PARAMETER Experiment Name: At_Drought_Reproduction_P Parameter: Treatment Value: Drought vs. No Drought

SEQ ID NO: 48302 - protein, 438 aa, Arabidopsis thaliana; identical to SEQ ID NO: 47678
  peptide (1)..(438): Ceres Seq. ID no. 12725995
  misc_feature (47)..(421): Pfam Name: Peptidase family M20/M25/M40 Pfam Description: Peptidase family M20/M25/M40
  misc_feature (47)..(421): Pfam Name: Peptidase family M20/M25/M40 Pfam Description: Peptidase family M20/M25/M40
  misc_feature (35)..(438): Homolog of NCBI NO: 34910396 NR Description: putative IAA-Ala hydrolase
  misc_feature (27)..(438): Homolog of NCBI NO: 27948556 NR Description: IAA-amino acid hydrolase [Oryza sativa (indica
  misc_feature (27)..(438): Homolog of NCBI NO: 34914096 NR Description: putative IAA-Ala hydrolase
  misc_feature (1)..(427): Homolog of NCBI NO: 15218029 NR Description: auxin conjugate hydrolase (ILL5); protein id:
  misc_feature (1)..(438): Homolog of NCBI NO: 2181184 NR Description: JR3 protein [Arabidopsis thaliana]
  misc_feature (35)..(438): Homolog of NCBI NO: 34910396 NR Description: putative IAA-Ala hydrolase
  misc_feature (27)..(438): Homolog of NCBI NO: 34914096 NR Description: putative IAA-Ala hydrolase
  misc_feature (1)..(438): Homolog of NCBI NO: 2181184 NR Description: JR3 protein [Arabidopsis thaliana]
  misc_feature (1)..(438): Homolog of NCBI NO: 15241892 NR Description: IAA-amino acid hydrolase homolog 1 precursor
  misc_feature (1)..(438): Homolog of NCBI NO: 902791 NR Description: ILL2
  misc_feature (1)..(438): Homolog of NCBI NO: 15241894 NR Description: IAA-amino acid hydrolase (gb|AAC04866.1)
  misc_feature (1)..(438): Homolog of NCBI NO: 18175667 NR Description: IAA-amino acid hydrolase [Arabidopsis thaliana]
  misc_feature (1)..(438): Homolog of NCBI NO: 15218027 NR Description: IAA-Ala hydrolase (IAR3)
  misc_feature (1)..(427): Homolog of NCBI NO: 15218029 NR Description: auxin conjugate hydrolase (ILL5); protein id:
  misc_feature (27)..(438): Homolog of NCBI NO: 27948556 NR Description: IAA-amino acid hydrolase [Oryza sativa (indica
  misc_feature (1)..(438): Homolog of NCBI NO: 15218027 NR Description: IAA-Ala hydrolase (IAR3)
  misc_feature (1)..(438): Homolog of NCBI NO: 18175667 NR Description: IAA-amino acid hydrolase [Arabidopsis thaliana]
  misc_feature (1)..(438): Homolog of NCBI NO: 15241894 NR Description: IAA-amino acid hydrolase (gb|AAC04866.1)
  misc_feature (1)..(438): Homolog of NCBI NO: 902791 NR Description: ILL2
  misc_feature (1)..(438): Homolog of NCBI NO: 15241892 NR Description: IAA-amino acid hydrolase homolog 1 precursor

SEQ ID NO: 48303 - protein, 389 aa, Arabidopsis thaliana; identical to SEQ ID NO: 47679
  peptide (1)..(389): Ceres Seq. ID no. 12725996
  misc_feature (1)..(372): Pfam Name: Peptidase family M20/M25/M40 Pfam Description: Peptidase family M20/M25/M40
  misc_feature (1)..(372): Pfam Name: Peptidase family M20/M25/M40 Pfam Description: Peptidase family M20/M25/M40
  misc_feature (1)..(389): Homolog of NCBI NO: 34910396 NR Description: putative IAA-Ala hydrolase
  misc_feature (1)..(389): Homolog of NCBI NO: 27948556 NR Description: IAA-amino acid hydrolase [Oryza sativa (indica
  misc_feature (1)..(389): Homolog of NCBI NO: 34914096 NR Description: putative IAA-Ala hydrolase
  misc_feature (1)..(378): Homolog of NCBI NO: 15218029 NR Description: auxin conjugate hydrolase (ILL5); protein id:
  misc_feature (1)..(389): Homolog of NCBI NO: 2181184 NR Description: JR3 protein [Arabidopsis thaliana]
  misc_feature (1)..(389): Homolog of NCBI NO: 34910396 NR Description: putative IAA-Ala hydrolase
  misc_feature (1)..(389): Homolog of NCBI NO: 34914096 NR Description: putative IAA-Ala hydrolase
  misc_feature (1)..(389): Homolog of NCBI NO: 2181184 NR Description: JR3 protein [Arabidopsis thaliana]
  misc_feature (1)..(389): Homolog of NCBI NO: 15241892 NR Description: IAA-amino acid hydrolase homolog 1 precursor
  misc_feature (1)..(389): Homolog of NCBI NO: 902791 NR Description: ILL2
  misc_feature (1)..(389): Homolog of NCBI NO: 15241894 NR Description: IAA-amino acid hydrolase (gb|AAC04866.1)
  misc_feature (1)..(389): Homolog of NCBI NO: 18175667 NR Description: IAA-amino acid hydrolase [Arabidopsis thaliana]
  misc_feature (1)..(389): Homolog of NCBI NO: 15218027 NR Description: IAA-Ala hydrolase (IAR3)
  misc_feature (1)..(378): Homolog of NCBI NO: 15218029 NR Description: auxin conjugate hydrolase (ILL5); protein id:
  misc_feature (1)..(389): Homolog of NCBI NO: 27948556 NR Description: IAA-amino acid hydrolase [Oryza sativa (indica
  misc_feature (1)..(389): Homolog of NCBI NO: 15218027 NR Description: IAA-Ala hydrolase (IAR3)
  misc_feature (1)..(389): Homolog of NCBI NO: 18175667 NR Description: IAA-amino acid hydrolase [Arabidopsis thaliana]
  misc_feature (1)..(389): Homolog of NCBI NO: 15241894 NR Description: IAA-amino acid hydrolase (gb|AAC04866.1)
  misc_feature (1)..(389): Homolog of NCBI NO: 902791 NR Description: ILL2
  misc_feature (1)..(389): Homolog of NCBI NO: 15241892 NR Description: IAA-amino acid hydrolase homolog 1 precursor

SEQ ID NO: 48304 - protein, 327 aa, Arabidopsis thaliana; identical to SEQ ID NO: 47680
  peptide (1)..(327): Ceres Seq. ID no. 12725997
  misc_feature (1)..(310): Pfam Name: Peptidase family M20/M25/M40 Pfam Description: Peptidase family M20/M25/M40
  misc_feature (1)..(310): Pfam Name: Peptidase family M20/M25/M40 Pfam Description: Peptidase family M20/M25/M40
  misc_feature (1)..(327): Homolog of NCBI NO: 34910396 NR Description: putative IAA-Ala hydrolase
  misc_feature (1)..(327): Homolog of NCBI NO: 27948556 NR Description: IAA-amino acid hydrolase [Oryza sativa (indica
  misc_feature (1)..(327): Homolog of NCBI NO: 34914096 NR Description: putative IAA-Ala hydrolase
  misc_feature (1)..(316): Homolog of NCBI NO: 15218029 NR Description: auxin conjugate hydrolase (ILL5); protein id:
  misc_feature (1)..(327): Homolog of NCBI NO: 2181184 NR Description: JR3 protein [Arabidopsis thaliana]
  misc_feature (1)..(327): Homolog of NCBI NO: 34910396 NR Description: putative IAA-Ala hydrolase
  misc_feature (1)..(327): Homolog of NCBI NO: 34914096 NR Description: putative IAA-Ala hydrolase
  misc_feature (1)..(327): Homolog of NCBI NO: 2181184 NR Description: JR3 protein [Arabidopsis thaliana]
  misc_feature (1)..(327): Homolog of NCBI NO: 15241892 NR Description: IAA-amino acid hydrolase homolog 1 precursor
  misc_feature (1)..(327): Homolog of NCBI NO: 902791 NR Description: ILL2
  misc_feature (1)..(327): Homolog of NCBI NO: 15241894 NR Description: IAA-amino acid hydrolase (gb|AAC04866.1)
  misc_feature (1)..(327): Homolog of NCBI NO: 18175667 NR Description: IAA-amino acid hydrolase [Arabidopsis thaliana]
  misc_feature (1)..(327): Homolog of NCBI NO: 15218027 NR Description: IAA-Ala hydrolase (IAR3)
  misc_feature (1)..(316): Homolog of NCBI NO: 15218029 NR Description: auxin conjugate hydrolase (ILL5); protein id:
  misc_feature (1)..(327): Homolog of NCBI NO: 27948556 NR Description: IAA-amino acid hydrolase [Oryza sativa (indica
  misc_feature (1)..(327): Homolog of NCBI NO: 15218027 NR Description: IAA-Ala hydrolase (IAR3)
  misc_feature (1)..(327): Homolog of NCBI NO: 18175667 NR Description: IAA-amino acid hydrolase [Arabidopsis thaliana]
  misc_feature (1)..(327): Homolog of NCBI NO: 15241894 NR Description: IAA-amino acid hydrolase (gb|AAC04866.1)
  misc_feature (1)..(327): Homolog of NCBI NO: 902791 NR Description: ILL2
  misc_feature (1)..(327): Homolog of NCBI NO: 15241892 NR Description: IAA-amino acid hydrolase homolog 1 precursor

SEQ ID NO: 48305 - DNA, 1571 bp, Arabidopsis thaliana
  misc_feature (1)..(1571): Ceres Seq. ID no. 13649972
  misc_feature: MA Experiment ID: 20000180 Result: Down-regulated in Transcription
  misc_feature: MA Experiment 20000180 PARAMETER Experiment Name: At_Germinating_Seeds_P Parameter: Age (hr) Value: 24 vs. 0
  misc_feature: MA Experiment 20000180 PARAMETER Experiment Name: At_Germinating_Seeds_P Parameter: Tissue Value: Germinating Seeds
  misc_feature: MA Experiment ID: 20000265 Result: Up-regulated in Transcription
  misc_feature: MA Experiment 20000265 PARAMETER Experiment Name: At_Open_Flower_P Parameter: Age (day) Value: 21
  misc_feature: MA Experiment 20000265 PARAMETER Experiment Name: At_Open_Flower_P Parameter: Plant Line Value: WS
  misc_feature: MA Experiment 20000265 PARAMETER Experiment Name: At_Open_Flower_P Parameter: Tissue Value: Closed Flower vs. Whole Plant
  misc_feature: MA Experiment ID: 20001451 Result: Down-regulated in Transcription
  misc_feature: MA Experiment 20001451 PARAMETER Experiment Name: At_Far-red-induction_P Parameter: Age (day) Value: 7
  misc_feature: MA Experiment 20001451 PARAMETER Experiment Name: At_Far-red-induction_P Parameter: Light Value: Far-red vs. White
  misc_feature: MA Experiment 20001451 PARAMETER Experiment Name: At_Far-red-induction_P Parameter: Organism Value: A. thaliana
  misc_feature: MA Experiment 20001451 PARAMETER Experiment Name: At_Far-red-induction_P Parameter: Plant Line Value: Columbia
  misc_feature: MA Experiment 20001451 PARAMETER Experiment Name: At_Far-red-induction_P Parameter: Timepoint (hr) Value: 24
  misc_feature: MA Experiment 20001451 PARAMETER Experiment Name: At_Far-red-induction_P Parameter: Tissue Value: Whole Plant
atggtggataccgaaatgcaagagcaagatgtgacttttggtgcccttgttgagacaaagtatttagaggaagaacctttggagccagaaaatgatcacaaccctagtgaaatcccgcagccccttcttcttggagatggtcaggctaataatggtcatggcatgaatggtggtgctgttggagttgttgaccactctgaaaggaagactcgtagggtgcaaatgttgagtcctaagactgaaggtgagaatgccaaaaagaggaagacttggctgctggattctgaggcacagggaactgatgaagcagggacaccggtagaacaagtggcgtttctaagagaagtggaggccttttacaaagagagtttcctggaatttaaacctcctaagttttatggacagcctttaaacattctcaagctttggcgagcagtcgtgaacctaggtggctatgaagtggtcaccacaaataagctgtggcggcaagttggagaatccttcaatcctcccaagacatgcacaacagtctcctacacattccgcaatttctatgagaaggcacttttggagtacgaaaagtgtttaaggaataatggtgagcttaaccttcctggttcaacattgattctgtcttccagtgtcgagaaagagccaagtagccatcaaggttcagggtcaggcagggcacgaagagattctgcagctcgtgctatgcaaggttggcatgcgcagcgccttgttggatctggagaggttactgcgcctgctgttaaggataagggcttaatttccaccccaaagcacaagaaactcaaaagcattgggctgcaaaaacacaaacaacaaactagcatggaccatgttgttacaaatgaagctgacaaacagttggctgctgaggttgttgatgttggacccgttgctgactgggtgaagataaatgtcaaagaatctgtgagtaacttctgccaacggctaaagaaacgccaaaaacttgcaaactggatgtttgtttccaatatggaattcttaccaaatctgttttcctttttcttgaattcacagaaggattccttcgagatatttgccttggtacctggacttcttcgcaaagaggttcgaattcaatcagatcctgcgggaaaggtggttataacaggccagccagagcagcttgacaatccttgggggattacacccttcaaaaagattgttgacttatcagcaagaattgatccgcttcacacatccgcggtcatgagcatgcatggacggttgttcatacgagttccgtttgagcagtaatggatttcaagagagctggtcacttgttcgtggtttcttctaggaattcatatgtttcagaaccaaattgttaggcggctgaagcagttttgtaactgtgatttgaatctgaagactgaagttaggaacatgcaacaaacatttgatcttactgtaatatttctcttttgtataatttgagattagtaggagaaactgctccaaagacatttaggatgcaaccaacaatgatgattttgatctaaaatcggaatgttatgctt

SEQ ID NO: 48306 - protein, 435 aa, Arabidopsis thaliana
  peptide (1)..(435): Ceres Seq. ID no. 13649973
  misc_feature (103)..(213): Pfam Name: ARID/BRIGHT DNA binding domain Pfam Description: ARID/BRIGHT DNA binding domain
  misc_feature (31)..(323): Homolog of NCBI NO: 30679972 NR Description: expressed protein [Arabidopsis thaliana]
  misc_feature (300)..(323): Homolog of NCBI NO: 25406449 NR Description: probable DNA-binding protein, 48797-45229
  misc_feature (357)..(435): Homolog of NCBI NO: 25406449 NR Description: probable DNA-binding protein, 48797-45229
  misc_feature (77)..(276): Homolog of NCBI NO: 25406449 NR Description: probable DNA-binding protein, 48797-45229
  misc_feature (357)..(435): Homolog of NCBI NO: 30699177 NR Description: DNA-binding protein -related [Arabidopsis
  misc_feature (77)..(323): Homolog of NCBI NO: 30699177 NR Description: DNA-binding protein -related [Arabidopsis
  misc_feature (353)..(435): Homolog of NCBI NO: 30687082 NR Description: expressed protein [Arabidopsis thaliana]
  misc_feature (1)..(323): Homolog of NCBI NO: 30687082 NR Description: expressed protein [Arabidopsis thaliana]
  misc_feature (1)..(141): Homolog of NCBI NO: 25518704 NR Description: hypothetical protein F9H16.11 - Arabidopsis
  misc_feature (188)..(435): Homolog of NCBI NO: 25518704 NR Description: hypothetical protein F9H16.11 - Arabidopsis
MVDTEMQEQDVTFGALVETKYLEEEPLEPENDHNPSEIPQPLLLGDGQANNGHGMNGGAVGVVDHSERKTRRVQMLSPKTEGENAKKRKTWLLDSEAQGTDEAGTPVEQVAFLREVEAFYKESFLEFKPPKFYGQPLNILKLWRAVVNLGGYEVVTTNKLWRQVGESFNPPKTCTTVSYTFRNFYEKALLEYEKCLRNNGELNLPGSTLILSSSVEKEPSSHQGSGSGRARRDSAARAMQGWHAQRLVGSGEVTAPAVKDKGLISTPKHKKLKSIGLQKHKQQTSMDHVVTNEADKQLAAEVVDVGPVADWVKINVKESVSNFCQRLKKRQKLANWMFVSNMEFLPNLFSFFLNSQKDSFEIFALVPGLLRKEVRIQSDPAGKVVITGQPEQLDNPWGITPFKKIVDLSARIDPLHTSAVMSMHGRLFIRVPFEQ

SEQ ID NO: 48307 - protein, 430 aa, Arabidopsis thaliana
  peptide (1)..(430): Ceres Seq. ID no. 13649974
  misc_feature (98)..(208): Pfam Name: ARID/BRIGHT DNA binding domain Pfam Description: ARID/BRIGHT DNA binding domain
  misc_feature (26)..(318): Homolog of NCBI NO: 30679972 NR Description: expressed protein [Arabidopsis thaliana]
  misc_feature (295)..(318): Homolog of NCBI NO: 25406449 NR Description: probable DNA-binding protein, 48797-45229
  misc_feature (352)..(430): Homolog of NCBI NO: 25406449 NR Description: probable DNA-binding protein, 48797-45229
  misc_feature (72)..(271): Homolog of NCBI NO: 25406449 NR Description: probable DNA-binding protein, 48797-45229
  misc_feature (352)..(430): Homolog of NCBI NO: 30699177 NR Description: DNA-binding protein -related [Arabidopsis
  misc_feature (72)..(318): Homolog of NCBI NO: 30699177 NR Description: DNA-binding protein -related [Arabidopsis
  misc_feature (348)..(430): Homolog of NCBI NO: 30687082 NR Description: expressed protein [Arabidopsis thaliana]
  misc_feature (1)..(318): Homolog of NCBI NO: 30687082 NR Description: expressed protein [Arabidopsis thaliana]
  misc_feature (1)..(136): Homolog of NCBI NO: 25518704 NR Description: hypothetical protein F9H16.11 - Arabidopsis
  misc_feature (183)..(430): Homolog of NCBI NO: 25518704 NR Description: hypothetical protein F9H16.11 - Arabidopsis
MQEQDVTFGALVETKYLEEEPLEPENDHNPSEIPQPLLLGDGQANNGHGMNGGAVGVVDHSERKTRRVQMLSPKTEGENAKKRKTWLLDSEAQGTDEAGTPVEQVAFLREVEAFYKESFLEFKPPKFYGQPLNILKLWRAVVNLGGYEVVTTNKLWRQVGESFNPPKTCTTVSYTFRNFYEKALLEYEKCLRNNGELNLPGSTLILSSSVEKEPSSHQGSGSGRARRDSAARAMQGWHAQRLVGSGEVTAPAVKDKGLISTPKHKKLKSIGLQKHKQQTSMDHVVTNEADKQLAAEVVDVGPVADWVKINVKESVSNFCQRLKKRQKLANWMFVSNMEFLPNLFSFFLNSQKDSFEIFALVPGLLRKEVRIQSDPAGKVVITGQPEQLDNPWGITPFKKIVDLSARIDPLHTSAVMSMHGRLFIRVPFEQ

SEQ ID NO: 48308 - protein, 381 aa, Arabidopsis thaliana
  peptide (1)..(381): Ceres Seq. ID no. 13649975
  misc_feature (49)..(159): Pfam Name: ARID/BRIGHT DNA binding domain Pfam Description: ARID/BRIGHT DNA binding domain
  misc_feature (1)..(269): Homolog of NCBI NO: 30679972 NR Description: expressed protein [Arabidopsis thaliana]
  misc_feature (246)..(269): Homolog of NCBI NO: 25406449 NR Description: probable DNA-binding protein, 48797-45229
  misc_feature (303)..(381): Homolog of NCBI NO: 25406449 NR Description: probable DNA-binding protein, 48797-45229
  misc_feature (23)..(222): Homolog of NCBI NO: 25406449 NR Description: probable DNA-binding protein, 48797-45229
  misc_feature (303)..(381): Homolog of NCBI NO: 30699177 NR Description: DNA-binding protein -related [Arabidopsis
  misc_feature (23)..(269): Homolog of NCBI NO: 30699177 NR Description: DNA-binding protein -related [Arabidopsis
  misc_feature (299)..(381): Homolog of NCBI NO: 30687082 NR Description: expressed protein [Arabidopsis thaliana]
  misc_feature (1)..(269): Homolog of NCBI NO: 30687082 NR Description: expressed protein [Arabidopsis thaliana]
  misc_feature (1)..(87): Homolog of NCBI NO: 25518704 NR Description: hypothetical protein F9H16.11 - Arabidopsis
  misc_feature (134)..(381): Homolog of NCBI NO: 25518704 NR Description: hypothetical protein F9H16.11 - Arabidopsis
MNGGAVGVVDHSERKTRRVQMLSPKTEGENAKKRKTWLLDSEAQGTDEAGTPVEQVAFLREVEAFYKESFLEFKPPKFYGQPLNILKLWRAVVNLGGYEVVTTNKLWRQVGESFNPPKTCTTVSYTFRNFYEKALLEYEKCLRNNGELNLPGSTLILSSSVEKEPSSHQGSGSGRARRDSAARAMQGWHAQRLVGSGEVTAPAVKDKGLISTPKHKKLKSIGLQKHKQQTSMDHVVTNEADKQLAAEVVDVGPVADWVKINVKESVSNFCQRLKKRQKLANWMFVSNMEFLPNLFSFFLNSQKDSFEIFALVPGLLRKEVRIQSDPAGKVVITGQPEQLDNPWGITPFKKIVDLSARIDPLHTSAVMSMHGRLFIRVPFEQ

SEQ ID NO: 48309 - DNA, 1916 bp, Arabidopsis thaliana
  misc_feature (1)..(1916): Ceres Seq. ID no. 13649976
  misc_feature: MA Experiment ID: 20000315 Result: Down-regulated in Transcription
  misc_feature: MA Experiment 20000315 PARAMETER Experiment Name: At_14day_Shoots-Roots_Sub_P Parameter: Age (day) Value: 14
  misc_feature: MA Experiment 20000315 PARAMETER Experiment Name: At_14day_Shoots-Roots_Sub_P Parameter: Organism Value: A. thaliana
  misc_feature: MA Experiment 20000315 PARAMETER Experiment Name: At_14day_Shoots-Roots_Sub_P Parameter: Plant Line Value: WS
  misc_feature: MA Experiment 20000315 PARAMETER Experiment Name: At_14day_Shoots-Roots_Sub_P Parameter: Tissue Value: Shoots vs. Whole Plant
gatccgacggcatatgatttcttaccggcgaatctcgccggcgcaaaccctttctgacttgtgttcgccgggatccaatcgcaaatcgttaaattcgcatcccatggtggtttctccctccaatgcccatcagtaaccctaggaaacggccaatctgtgtcgcccaatcgtttctcagcaaacacgcaacgaaagcagagctctctcaggccgtatctcgtctcgagtccttgactcaacaagggattcgattaccctttgacctcctagcatctctgctccagcagtgtggagatacaaagtctttgaaacaaggcaaatggattcatcgtcacttgaagattactggattcaagagacccaacacgcttttgtccaatcatttaatcggaatgtacatgaaatgcggtaaacctattgatgcttgtaaagtgtttgatcaaatgcatctcaggaacttgtattcgtggaacaatatggtctctgggtatgtcaaatcagggatgttggtgcgtgcacgcgtagtgttcgatagtatgcctgagagagatgttgtttcttggaacacgatggttattgggtatgctcaggatgggaatctacacgaggcgttgtggttttataaagagtttaggagatctggaatcaagttcaacgagttcagcttcgctgggcttttgacggcatgtgtgaaatctaggcagctccagctcaatcggcaagctcacgggcaggttttggttgctgggtttttgtcaaatgtggtactttcgtgttctatcatcgatgcttatgcgaaatgtggtcagatggagagtgctaaaagatgttttgatgagatgacagtgaaggatattcatatttggactactctgatctctgggtatgccaaactgggagatatggaagctgctgaaaagttattctgtgagatgcctgagaaaaatccagtctcttggactgcattaattgctggatatgttagacaaggctcagggaatcgagcgcttgacttgtttagaaaaatgattgctttgggggttaaaccagagcaatttacttttagtagctgtctatgtgcctctgcgagcattgcttctcttagacatgggaaggaaattcatggctatatgatccgtaccaatgttagaccgaacgcgattgtcatcagttctttgatagatatgtactccaaatcaggtagtttagaagctagcgagcgggtgttcagaatttgcgatgacaagcacgactgcgttttttggaacacgatgatttctgcattggcacagcacgggcttggacacaaggccttgcgaatgcttgatgacatgatcaaattcagggtccagccaaaccggacgactctggttgtgattcttaatgcctgcagccattcaggtctggtagaggaaggattgaggtggtttgagtcaatgactgttcagcacgggattgttcccgaccaagagcattacgcatgtctgatagatctcctaggtcgcgccggttgtttcaaagaactgatgaggaagattgaggaaatgccttttgaacccgacaagcatatctggaacgcaatcctaggagtatgcagaatccatggaaacgaagaactgggaaagaaagcagcggacgagctgatcaaactggaccctgagtcgtctgcaccatacatattgctgtcaagcatttacgcagatcatgggaagtgggaattagtagagaagctgagaggggttatgaagaagagaagagtgaataaagaaaaagctgtgagttggattgaaatcgagaaaaaagtcgaagctttcactgtctcagatgggtcacatgctcatgctcggaaagaagagatatacttcattctgcataatctggctgcagttattgaagaagaagcttcaagaacatga

SEQ ID NO: 48310 - protein, 597 aa, Arabidopsis thaliana
  peptide (1)..(597): Ceres Seq. ID no. 13649977
  misc_feature (83)..(117): Pfam Name: PPR repeat Pfam Description: PPR repeat
  misc_feature (117)..(271): Homolog of NCBI NO: 38423978 NR Description: PPR-repeat protein-like [Oryza sativa (japonica
  misc_feature (241)..(591): Homolog of NCBI NO: 38423978 NR Description: PPR-repeat protein-like [Oryza sativa (japonica
  misc_feature (1)..(510): Homolog of NCBI NO: 37536962 NR Description: hypothetical protein [Oryza sativa (japonica
  misc_feature (94)..(596): Homolog of NCBI NO: 21740490 NR Description: OSJNBa0006B20.5 [Oryza sativa (japonica
  misc_feature (82)..(586): Homolog of NCBI NO: 15222566 NR Description: pentatricopeptide (PPR) repeat-containing protein
  misc_feature (110)..(597): Homolog of NCBI NO: 15225445 NR Description: pentatricopeptide (PPR) repeat-containing protein
  misc_feature (81)..(586): Homolog of NCBI NO: 15235498 NR Description: pentatricopeptide (PPR) repeat-containing protein
  misc_feature (6)..(588): Homolog of NCBI NO: 34393605 NR Description: pentatricopeptide (PPR) repeat-containing
  misc_feature (29)..(580): Homolog of NCBI NO: 34896896 NR Description: hypothetical protein [Oryza sativa (japonica
  misc_feature (29)..(586): Homolog of NCBI NO: 15227144 NR Description: pentatricopeptide (PPR) repeat-containing protein
MPISNPRKRPICVAQSFLSKHATKAELSQAVSRLESLTQQGIRLPFDLLASLLQQCGDTKSLKQGKWIHRHLKITGFKRPNTLLSNHLIGMYMKCGKPIDACKVFDQMHLRNLYSWNNMVSGYVKSGMLVRARVVFDSMPERDVVSWNTMVIGYAQDGNLHEALWFYKEFRRSGIKFNEFSFAGLLTACVKSRQLQLNRQAHGQVLVAGFLSNVVLSCSIIDAYAKCGQMESAKRCFDEMTVKDIHIWTTLISGYAKLGDMEAAEKLFCEMPEKNPVSWTALIAGYVRQGSGNRALDLFRKMIALGVKPEQFTFSSCLCASASIASLRHGKEIHGYMIRTNVRPNAIVISSLIDMYSKSGSLEASERVFRICDDKHDCVFWNTMISALAQHGLGHKALRMLDDMIKFRVQPNRTTLVVILNACSHSGLVEEGLRWFESMTVQHGIVPDQEHYACLIDLLGRAGCFKELMRKIEEMPFEPDKHIWNAILGVCRIHGNEELGKKAADELIKLDPESSAPYILLSSIYADHGKWELVEKLRGVMKKRRVNKEKAVSWIEIEKKVEAFTVSDGSHAHARKEEIYFILHNLAAVIEEEASRT

SEQ ID NO: 48311 - protein, 507 aa, Arabidopsis thaliana
  peptide (1)..(507): Ceres Seq. ID no. 13649978
  misc_feature (1)..(27): Pfam Name: PPR repeat Pfam Description: PPR repeat
  misc_feature (27)..(181): Homolog of NCBI NO: 38423978 NR Description: PPR-repeat protein-like [Oryza sativa (japonica
  misc_feature (151)..(501): Homolog of NCBI NO: 38423978 NR Description: PPR-repeat protein-like [Oryza sativa (japonica
  misc_feature (1)..(420): Homolog of NCBI NO: 37536962 NR Description: hypothetical protein [Oryza sativa (japonica
  misc_feature (4)..(506): Homolog of NCBI NO: 21740490 NR Description: OSJNBa0006B20.5 [Oryza sativa (japonica
  misc_feature (1)..(496): Homolog of NCBI NO: 15222566 NR Description: pentatricopeptide (PPR) repeat-containing protein
  misc_feature (20)..(507): Homolog of NCBI NO: 15225445 NR Description: pentatricopeptide (PPR) repeat-containing protein
  misc_feature (1)..(496): Homolog of NCBI NO: 15235498 NR Description: pentatricopeptide (PPR) repeat-containing protein
  misc_feature (1)..(498): Homolog of NCBI NO: 34393605 NR Description: pentatricopeptide (PPR) repeat-containing
  misc_feature (1)..(490): Homolog of NCBI NO: 34896896 NR Description: hypothetical protein [Oryza sativa (japonica
  misc_feature (1)..(496): Homolog of NCBI NO: 15227144 NR Description: pentatricopeptide (PPR) repeat-containing protein
MYMKCGKPIDACKVFDQMHLRNLYSWNNMVSGYVKSGMLVRARVVFDSMPERDVVSWNTMVIGYAQDGNLHEALWFYKEFRRSGIKFNEFSFAGLLTACVKSRQLQLNRQAHGQVLVAGFLSNVVLSCSIIDAYAKCGQMESAKRCFDEMTVKDIHIWTTLISGYAKLGDMEAAEKLFCEMPEKNPVSWTALIAGYVRQGSGNRALDLFRKMIALGVKPEQFTFSSCLCASASIASLRHGKEIHGYMIRTNVRPNAIVISSLIDMYSKSGSLEASERVFRICDDKHDCVFWNTMISALAQHGLGHKALRMLDDMIKFRVQPNRTTLVVILNACSHSGLVEEGLRWFESMTVQHGIVPDQEHYACLIDLLGRAGCFKELMRKIEEMPFEPDKHIWNAILGVCRIHGNEELGKKAADELIKLDPESSAPYILLSSIYADHGKWELVEKLRGVMKKRRVNKEKAVSWIEIEKKVEAFTVSDGSHAHARKEEIYFILHNLAAVIEEEASRT

SEQ ID NO: 48312 - protein, 505 aa, Arabidopsis thaliana
  peptide (1)..(505): Ceres Seq. ID no. 13649979
  misc_feature (1)..(25): Pfam Name: PPR repeat Pfam Description: PPR repeat
  misc_feature (25)..(179): Homolog of NCBI NO: 38423978 NR Description: PPR-repeat protein-like [Oryza sativa (japonica
  misc_feature (149)..(499): Homolog of NCBI NO: 38423978 NR Description: PPR-repeat protein-like [Oryza sativa (japonica
  misc_feature (1)..(418): Homolog of NCBI NO: 37536962 NR Description: hypothetical protein [Oryza sativa (japonica
  misc_feature (2)..(504): Homolog of NCBI NO: 21740490 NR Description: OSJNBa0006B20.5 [Oryza sativa (japonica
  misc_feature (1)..(494): Homolog of NCBI NO: 15222566 NR Description: pentatricopeptide (PPR) repeat-containing protein
  misc_feature (18)..(505): Homolog of NCBI NO: 15225445 NR Description: pentatricopeptide (PPR) repeat-containing protein
  misc_feature (1)..(494): Homolog of NCBI NO: 15235498 NR Description: pentatricopeptide (PPR) repeat-containing protein
  misc_feature (1)..(496): Homolog of NCBI NO: 34393605 NR Description: pentatricopeptide (PPR) repeat-containing
  misc_feature (1)..(488): Homolog of NCBI NO: 34896896 NR Description: hypothetical protein [Oryza sativa (japonica
  misc_feature (1)..(494): Homolog of NCBI NO: 15227144 NR Description: pentatricopeptide (PPR) repeat-containing protein
MKCGKPIDACKVFDQMHLRNLYSWNNMVSGYVKSGMLVRARVVFDSMPERDVVSWNTMVIGYAQDGNLHEALWFYKEFRRSGIKFNEFSFAGLLTACVKSRQLQLNRQAHGQVLVAGFLSNVVLSCSIIDAYAKCGQMESAKRCFDEMTVKDIHIWTTLISGYAKLGDMEAAEKLFCEMPEKNPVSWTALIAGYVRQGSGNRALDLFRKMIALGVKPEQFTFSSCLCASASIASLRHGKEIHGYMIRTNVRPNAIVISSLIDMYSKSGSLEASERVFRICDDKHDCVFWNTMISALAQHGLGHKALRMLDDMIKFRVQPNRTTLVVILNACSHSGLVEEGLRWFESMTVQHGIVPDQEHYACLIDLLGRAGCFKELMRKIEEMPFEPDKHIWNAILGVCRIHGNEELGKKAADELIKLDPESSAPYILLSSIYADHGKWELVEKLRGVMKKRRVNKEKAVSWIEIEKKVEAFTVSDGSHAHARKEEIYFILHNLAAVIEEEASRT

SEQ ID NO: 48313 - DNA, 3657 bp, Arabidopsis thaliana
  misc_feature (1)..(3657): Ceres Seq. ID no. 12733467
  misc_feature: MA Experiment ID: 20000173 Result: Down-regulated in Transcription
  misc_feature: MA Experiment 20000173 PARAMETER Experiment Name: At_42deg_Heat_P Parameter: Age (day) Value: 14
  misc_feature: MA Experiment 20000173 PARAMETER Experiment Name: At_42deg_Heat_P Parameter: Organism Value: A. thaliana
  misc_feature: MA Experiment 20000173 PARAMETER Experiment Name: At_42deg_Heat_P Parameter: Plant Line Value: WS
  misc_feature: MA Experiment 20000173 PARAMETER Experiment Name: At_42deg_Heat_P Parameter: Temperature (deg C) Value: 42 vs. 22
  misc_feature: MA Experiment 20000173 PARAMETER Experiment Name: At_42deg_Heat_P Parameter: Timepoint (hr) Value: 6
  misc_feature: MA Experiment 20000173 PARAMETER Experiment Name: At_42deg_Heat_P Parameter: Tissue Value: Aerial
  misc_feature: MA Experiment ID: 20000495 Result: Down-regulated in Transcription
  misc_feature: MA Experiment 20000495 PARAMETER Experiment Name: At_Guard_Cells_P Parameter: Harvest Date Value: 8/2/2002
  misc_feature: MA Experiment 20000495 PARAMETER Experiment Name: At_Guard_Cells_P Parameter: Organism Value: A. thaliana
  misc_feature: MA Experiment 20000495 PARAMETER Experiment Name: At_Guard_Cells_P Parameter: Tissue Value: Guard Cells vs. Leaves
  misc_feature: MA Experiment ID: 20001451 Result: Down-regulated in Transcription
  misc_feature: MA Experiment 20001451 PARAMETER Experiment Name: At_Far-red-induction_P Parameter: Age (day) Value: 7
  misc_feature: MA Experiment 20001451 PARAMETER Experiment Name: At_Far-red-induction_P Parameter: Light Value: Far-red vs. White
  misc_feature: MA Experiment 20001451 PARAMETER Experiment Name: At_Far-red-induction_P Parameter: Organism Value: A. thaliana
  misc_feature: MA Experiment 20001451 PARAMETER Experiment Name: At_Far-red-induction_P Parameter: Plant Line Value: Columbia
  misc_feature: MA Experiment 20001451 PARAMETER Experiment Name: At_Far-red-induction_P Parameter: Timepoint (hr) Value: 24
  misc_feature: MA Experiment 20001451 PARAMETER Experiment Name: At_Far-red-induction_P Parameter: Tissue Value: Whole Plant
atgctgaccaagttcgagaccaagagtaaccgagttaagggtctgagtttccaccctaaacgaccatggattctcgcgagtttacacagtggtgtgatccagctctgggattatcgtatgggtactttgatcgacagatttgatgagcacgaaggacctgttcgtggtgttcatttccacaactcacagcctttattcgtctctggaggggatgattacaagattaaagtttggaactacaaaactcacaggtgtcttttcactcttctcgggcatcttgattatatccgcactgtccaatttcaccacgaaaacccatggattgtgagtgctagtgacgatcagactatccgcatttggaactggcagtctaggacttgtatttccgtgttgactggtcacaatcattatgttatgtgtgcttctttccatccaaaggaagatcttgttgtatcagcatcactggatcagactgtccgtgtttgggacattggtgctcttaagaagaagtcagcatctcctgctgatgacctcatgcgatttagtcagatgaattctgatctttttggaggggttgacgctatagttaagtacgtccttgaaggtcatgatagaggagtcaactgggcttcttttcatcccacacttcctctcattgtctctggtgccgatgaccgccaagtaaagctgtggcgtatgaatgaaactaaagcttgggaggtggatacattgcgaggtcatatgaataacgtttcatccgttatgttccatgcaaaacaggacattatcgtgtcaaactctgaggataaaagcatccgtgtctgggatgctaccaagcgaactggaatccaaacttttcgtcgtgagcatgaccgattctggattcttgcagttcaccctgagattaatctacttgcagcaggacatgacaatggtatgattgttttcaaacttgagagagaacgtcctgcatttgctttgagtggtgattcgttattctatgccaaagatagatttctgcggtactatgaatattcaactcaaaaagattcccaagttattcctatacggcgtcctggtaccccaagcttgaatcaaagtccgaggactttatcctacagtccgacagaaaatgcagtcttaatctgctcagatctggatggtggttcttacgagttgtacatcataccgaaagatagcgttggcaggagtgatgttgtacaagatgcaaagagggggacagggggttctgcggtgttcattgctcgaaatcggtttgctgttctggagaaaagcaccagccaggtgttagtgaagaatctaaagaatgaggtggttaaaaagagttctttacctattcccacagatgctatcttttatgctgggactggaaatttgctttgtagatctgaggataaagtggttatatttgaccttcaacaaaggcttgttcttggtgagcttcagacaccgtttgttaggtacgttgtttggtctaacgatatggagagtgttgctttgctcagcaaacatactatcattattgcgagcaaaaaacttgtcctacagtgcacgcttcatgagacaatacgtgtgaaaagtggagcatgggacgacaatggtgtcttcatttacactactctgaaccacatcaagtactgtctgcctaatggagatagtggaatcatcagaaccctggatgtcccaatctacatcaccaaggtgtctggaaatacaatcttttgcttggaccgggatgggaaaaacagggctatcaccattaatgcaaccgaatacattttcaagcttgcactactgagaaagaaatatgatcatgtcatgagcatgataaagaactcccagctatgtggacaggctatgatcgcttatcttcagcagaaaggatttcctgaagttgccctacactttgttgaagacgagaggatccgattcaacttggctcttgaaagtggcaacatcagtgtagctgttgcatccgctacagagattaatgagaaagaccactggtatagactcggagtggaagctcttcgtcaaggaaattctagaattgttgagtttgcgtaccagcagacaaagaactttgagaggttatcttttctatatctcattactggcaatttagacaagctgtcaaagttgatgaagattgcagaggtgaagaacaatgtaatgggtcagtttcacaatgcactctacctaggagatgttaaagagcgtgttaagatactagagaatgctggtcatttgcctctagcttatatcacagcttcggttcatggtttaactgacattgctgagcgactagcaattgagctaggagacaatgtgccttcattgcctgaagggaagactccatcgcttttaatgccaccgtctcccatcatgtgtggtggtgattggcctctactgagagtgatgaaaggaatatttgaaggaggacttgagagtgcaaacagaggggctgttgatgaagaagaagaagatgttgaaggcgactggggtgagggacttgacaaattcgatgttgatggaatggagaacacagacatcgaagccatattggatggtgcagaagcaggtgaagaagaagacgacgaggaaggtggatggggacttgacttggatcttccaccagagcttgacactcctaaagcctctgctaacgcacgttcatctacttttgtgacacctcctcaaggtatgcccgtaagtcagatttggagtcagaaatcttcccttgctgctgagcaggctgcagcaggaagcttcgacactgcaatgcgtttgctccacaggcagcttggcattaagaactttgcgcctttgaaatcgatgtttcttgatctgttcagtgggagccatagctatctgcgtgccttttcttcatctcctgtggttcctcttgccattgagcgtggatggagtgagtcttccagtcctaacgtccgtggcccgccagctcttgtttttgatttctctcagcttgaagcaaagctcaaatccggctacaaagctacaacagctgggaaactatctgaggctcttcgtgtcttcctctctattctccaaaccatcccattggtggtagttgagtcaagaagagaagtagatgaggttaaggaactggtcatcattgttaaagaatatgtcctcggtcttcaattggagctcaagaggagagagatgaaagatgatccggtgaggcagcaagagctcgctgcttacttcactcactgtaaacttcaaacacctcacctacggctcgcgtacttcagtgcaatgaccgtctgctacaagtcaaagaacatggctactgctgctcacttcgccagaagtttgttggatacaaacccaactattgagagccaggccaggacggctagacaagttatgcaagcagctgaacgcaacatgacagatgcaacaacactcaactacgactttagaaacccgtttgtgatatgcgggtccacttatgtgccaatctacaaaggacagaaagacgttgcatgtccttactgcactgcccggtttgtaccaagccaggaaggtaacatttgctcggtctgtgatcttgcagtcattggcgcagacgcatctggcttgctatgctctgcctctcaagtccggtga

SEQ ID NO: 48314 - protein, 1218 aa, Arabidopsis thaliana
  peptide (1)..(1218): Ceres Seq. ID no. 12733468
  misc_feature (337)..(784): Pfam Name: Coatomer WD associated region Pfam Description: Coatomer WD associated region
  misc_feature (198)..(778): Homolog of NCBI NO: 30683862 NR Description: coatomer protein complex, subunit beta 2 (beta
  misc_feature (2)..(166): Homolog of NCBI NO: 9294445 NR Description: coatomer protein complex, beta prime; beta'-COP
  misc_feature (198)..(778): Homolog of NCBI NO: 9294445 NR Description: coatomer protein complex, beta prime; beta'-COP
  misc_feature (4)..(166): Homolog of NCBI NO: 30699476 NR Description: coatomer protein complex, subunit beta 2 (beta
  misc_feature (198)..(898): Homolog of NCBI NO: 30699476 NR Description: coatomer protein complex, subunit beta 2 (beta
  misc_feature (2)..(166): Homolog of NCBI NO: 12324597 NR Description: putative coatomer protein complex, subunit beta 2
  misc_feature (198)..(898): Homolog of NCBI NO: 12324597 NR Description: putative coatomer protein complex, subunit beta 2
  misc_feature (1)..(1213): Homolog of NCBI NO: 39595549 NR Description: Hypothetical protein CBG04223 [Caenorhabditis
  misc_feature (834)..(1210): Homolog of NCBI NO: 40744421 NR Description: hypothetical protein AN3026.2 [Aspergillus
  misc_feature (1)..(907): Homolog of NCBI NO: 40744421 NR Description: hypothetical protein AN3026.2 [Aspergillus
MLTKFETKSNRVKGLSFHPKRPWILASLHSGVIQLWDYRMGTLIDRFDEHEGPVRGVHFHNSQPLFVSGGDDYKIKVWNYKTHRCLFTLLGHLDYIRTVQFHHENPWIVSASDDQTIRIWNWQSRTCISVLTGHNHYVMCASFHPKEDLVVSASLDQTVRVWDIGALKKKSASPADDLMRFSQMNSDLFGGVDAIVKYVLEGHDRGVNWASFHPTLPLIVSGADDRQVKLWRMNETKAWEVDTLRGHMNNVSSVMFHAKQDIIVSNSEDKSIRVWDATKRTGIQTFRREHDRFWILAVHPEINLLAAGHDNGMIVFKLERERPAFALSGDSLFYAKDRFLRYYEYSTQKDSQVIPIRRPGTPSLNQSPRTLSYSPTENAVLICSDLDGGSYELYIIPKDSVGRSDVVQDAKRGTGGSAVFIARNRFAVLEKSTSQVLVKNLKNEVVKKSSLPIPTDAIFYAGTGNLLCRSEDKVVIFDLQQRLVLGELQTPFVRYVVWSNDMESVALLSKHTIIIASKKLVLQCTLHETIRVKSGAWDDNGVFIYTTLNHIKYCLPNGDSGIIRTLDVPIYITKVSGNTIFCLDRDGKNRAITINATEYIFKLALLRKKYDHVMSMIKNSQLCGQAMIAYLQQKGFPEVALHFVEDERIRFNLALESGNISVAVASATEINEKDHWYRLGVEALRQGNSRIVEFAYQQTKNFERLSFLYLITGNLDKLSKLMKIAEVKNNVMGQFHNALYLGDVKERVKILENAGHLPLAYITASVHGLTDIAERLAIELGDNVPSLPEGKTPSLLMPPSPIMCGGDWPLLRVMKGIFEGGLESANRGAVDEEEEDVEGDWGEGLDKFDVDGMENTDIEAILDGAEAGEEEDDEEGGWGLDLDLPPELDTPKASANARSSTFVTPPQGMPVSQIWSQKSSLAAEQAAAGSFDTAMRLLHRQLGIKNFAPLKSMFLDLFSGSHSYLRAFSSSPVVPLAIERGWSESSSPNVRGPPALVFDFSQLEAKLKSGYKATTAGKLSEALRVFLSILQTIPLVVVESRREVDEVKELVIIVKEYVLGLQLELKRREMKDDPVRQQELAAYFTHCKLQTPHLRLAYFSAMTVCYKSKNMATAAHFARSLLDTNPTIESQARTARQVMQAAERNMTDATTLNYDFRNPFVICGSTYVPIYKGQKDVACPYCTARFVPSQEGNICSVCDLAVIGADASGLLCSASQVR

SEQ ID NO: 48315 - protein, 1179 aa, Arabidopsis thaliana
  peptide (1)..(1179): Ceres Seq. ID no. 12733469
  misc_feature (298)..(745): Pfam Name: Coatomer WD associated region Pfam Description: Coatomer WD associated region
  misc_feature (159)..(739): Homolog of NCBI NO: 30683862 NR Description: coatomer protein complex, subunit beta 2 (beta
  misc_feature (1)..(127): Homolog of NCBI NO: 9294445 NR Description: coatomer protein complex, beta prime; beta'-COP
  misc_feature (159)..(739): Homolog of NCBI NO: 9294445 NR Description: coatomer protein complex, beta prime; beta'-COP
  misc_feature (1)..(127): Homolog of NCBI NO: 30699476 NR Description: coatomer protein complex, subunit beta 2 (beta
  misc_feature (159)..(859): Homolog of NCBI NO: 30699476 NR Description: coatomer protein complex, subunit beta 2 (beta
  misc_feature (1)..(127): Homolog of NCBI NO: 12324597 NR Description: putative coatomer protein complex, subunit beta 2
  misc_feature (159)..(859): Homolog of NCBI NO: 12324597 NR Description: putative coatomer protein complex, subunit beta 2
  misc_feature (1)..(1174): Homolog of NCBI NO: 39595549 NR Description: Hypothetical protein CBG04223 [Caenorhabditis
  misc_feature (795)..(1171): Homolog of NCBI NO: 40744421 NR Description: hypothetical protein AN3026.2 [Aspergillus
  misc_feature (1)..(868): Homolog of NCBI NO: 40744421 NR Description: hypothetical protein AN3026.2 [Aspergillus
MGTLIDRFDEHEGPVRGVHFHNSQPLFVSGGDDYKIKVWNYKTHRCLFTLLGHLDYIRTVQFHHENPWIVSASDDQTIRIWNWQSRTCISVLTGHNHYVMCASFHPKEDLVVSASLDQTVRVWDIGALKKKSASPADDLMRFSQMNSDLFGGVDAIVKYVLEGHDRGVNWASFHPTLPLIVSGADDRQVKLWRMNETKAWEVDTLRGHMNNVSSVMFHAKQDIIVSNSEDKSIRVWDATKRTGIQTFRREHDRFWILAVHPEINLLAAGHDNGMIVFKLERERPAFALSGDSLFYAKDRFLRYYEYSTQKDSQVIPIRRPGTPSLNQSPRTLSYSPTENAVLICSDLDGGSYELYIIPKDSVGRSDVVQDAKRGTGGSAVFIARNRFAVLEKSTSQVLVKNLKNEVVKKSSLPIPTDAIFYAGTGNLLCRSEDKVVIFDLQQRLVLGELQTPFVRYVVWSNDMESVALLSKHTIIIASKKLVLQCTLHETIRVKSGAWDDNGVFIYTTLNHIKYCLPNGDSGIIRTLDVPIYITKVSGNTIFCLDRDGKNRAITINATEYIFKLALLRKKYDHVMSMIKNSQLCGQAMIAYLQQKGFPEVALHFVEDERIRFNLALESGNISVAVASATEINEKDHWYRLGVEALRQGNSRIVEFAYQQTKNFERLSFLYLITGNLDKLSKLMKIAEVKNNVMGQFHNALYLGDVKERVKILENAGHLPLAYITASVHGLTDIAERLAIELGDNVPSLPEGKTPSLLMPPSPIMCGGDWPLLRVMKGIFEGGLESANRGAVDEEEEDVEGDWGEGLDKFDVDGMENTDIEAILDGAEAGEEEDDEEGGWGLDLDLPPELDTPKASANARSSTFVTPPQGMPVSQIWSQKSSLAAEQAAAGSFDTAMRLLHRQLGIKNFAPLKSMFLDLFSGSHSYLRAFSSSPVVPLAIERGWSESSSPNVRGPPALVFDFSQLEAKLKSGYKATTAGKLSEALRVFLSILQTIPLVVVESRREVDEVKELVIIVKEYVLGLQLELKRREMKDDPVRQQELAAYFTHCKLQTPHLRLAYFSAMTVCYKSKNMATAAHFARSLLDTNPTIESQARTARQVMQAAERNMTDATTLNYDFRNPFVICGSTYVPIYKGQKDVACPYCTARFVPSQEGNICSVCDLAVIGADASGLLCSASQVR

SEQ ID NO: 48316 - protein, 1080 aa, Arabidopsis thaliana
  peptide (1)..(1080): Ceres Seq. ID no. 12733470
  misc_feature (199)..(646): Pfam Name: Coatomer WD associated region Pfam Description: Coatomer WD associated region
  misc_feature (60)..(640): Homolog of NCBI NO: 30683862 NR Description: coatomer protein complex, subunit beta 2 (beta
  misc_feature (1)..(28): Homolog of NCBI NO: 9294445 NR Description: coatomer protein complex, beta prime; beta'-COP
  misc_feature (60)..(640): Homolog of NCBI NO: 9294445 NR Description: coatomer protein complex, beta prime; beta'-COP
  misc_feature (1)..(28): Homolog of NCBI NO: 30699476 NR Description: coatomer protein complex, subunit beta 2 (beta
  misc_feature (60)..(760): Homolog of NCBI NO: 30699476 NR Description: coatomer protein complex, subunit beta 2 (beta
  misc_feature (1)..(28): Homolog of NCBI NO: 12324597 NR Description: putative coatomer protein complex, subunit beta 2
  misc_feature (60)..(760): Homolog of NCBI NO: 12324597 NR Description: putative coatomer protein complex, subunit beta 2
  misc_feature (1)..(1075): Homolog of NCBI NO: 39595549 NR Description: Hypothetical protein CBG04223 [Caenorhabditis
  misc_feature (696)..(1072): Homolog of NCBI NO: 40744421 NR Description: hypothetical protein AN3026.2 [Aspergillus
  misc_feature (1)..(769): Homolog of NCBI NO: 40744421 NR Description: hypothetical protein AN3026.2 [Aspergillus
MCASFHPKEDLVVSASLDQTVRVWDIGALKKKSASPADDLMRFSQMNSDLFGGVDAIVKYVLEGHDRGVNWASFHPTLPLIVSGADDRQVKLWRMNETKAWEVDTLRGHMNNVSSVMFHAKQDIIVSNSEDKSIRVWDATKRTGIQTFRREHDRFWILAVHPEINLLAAGHDNGMIVFKLERERPAFALSGDSLFYAKDRFLRYYEYSTQKDSQVIPIRRPGTPSLNQSPRTLSYSPTENAVLICSDLDGGSYELYIIPKDSVGRSDVVQDAKRGTGGSAVFIARNRFAVLEKSTSQVLVKNLKNEVVKKSSLPIPTDAIFYAGTGNLLCRSEDKVVIFDLQQRLVLGELQTPFVRYVVWSNDMESVALLSKHTIIIASKKLVLQCTLHETIRVKSGAWDDNGVFIYTTLNHIKYCLPNGDSGIIRTLDVPIYITKVSGNTIFCLDRDGKNRAITINATEYIFKLALLRKKYDHVMSMIKNSQLCGQAMIAYLQQKGFPEVALHFVEDERIRFNLALESGNISVAVASATEINEKDHWYRLGVEALRQGNSRIVEFAYQQTKNFERLSFLYLITGNLDKLSKLMKIAEVKNNVMGQFHNALYLGDVKERVKILENAGHLPLAYITASVHGLTDIAERLAIELGDNVPSLPEGKTPSLLMPPSPIMCGGDWPLLRVMKGIFEGGLESANRGAVDEEEEDVEGDWGEGLDKFDVDGMENTDIEAILDGAEAGEEEDDEEGGWGLDLDLPPELDTPKASANARSSTFVTPPQGMPVSQIWSQKSSLAAEQAAAGSFDTAMRLLHRQLGIKNFAPLKSMFLDLFSGSHSYLRAFSSSPVVPLAIERGWSESSSPNVRGPPALVFDFSQLEAKLKSGYKATTAGKLSEALRVFLSILQTIPLVVVESRREVDEVKELVIIVKEYVLGLQLELKRREMKDDPVRQQELAAYFTHCKLQTPHLRLAYFSAMTVCYKSKNMATAAHFARSLLDTNPTIESQARTARQVMQAAERNMTDATTLNYDFRNPFVICGSTYVPIYKGQKDVACPYCTARFVPSQEGNICSVCDLAVIGADASGLLCSASQVR

SEQ ID NO: 48317 - DNA, 871 bp, Arabidopsis thaliana
  misc_feature (1)..(871): Ceres Seq. ID no. 12724123
  misc_feature: MA Experiment ID: 20000315 Result: Down-regulated in Transcription
  misc_feature: MA Experiment 20000315 PARAMETER Experiment Name: At_14day_Shoots-Roots_Sub_P Parameter: Age (day) Value: 14
  misc_feature: MA Experiment 20000315 PARAMETER Experiment Name: At_14day_Shoots-Roots_Sub_P Parameter: Organism Value: A. thaliana
  misc_feature: MA Experiment 20000315 PARAMETER Experiment Name: At_14day_Shoots-Roots_Sub_P Parameter: Plant Line Value: WS
  misc_feature: MA Experiment 20000315 PARAMETER Experiment Name: At_14day_Shoots-Roots_Sub_P Parameter: Tissue Value: Shoots vs. Whole Plant
  misc_feature: MA Experiment ID: 20000327 Result: Up-regulated in Transcription
  misc_feature: MA Experiment 20000327 PARAMETER Experiment Name: At_42deg_Heat_Sub_P Parameter: Age (day) Value: 14
  misc_feature: MA Experiment 20000327 PARAMETER Experiment Name: At_42deg_Heat_Sub_P Parameter: Organism Value: A. thaliana
  misc_feature: MA Experiment 20000327 PARAMETER Experiment Name: At_42deg_Heat_Sub_P Parameter: Plant Line Value: WS
  misc_feature: MA Experiment 20000327 PARAMETER Experiment Name: At_42deg_Heat_Sub_P Parameter: Temperature (deg C) Value: 42 vs. 22
  misc_feature: MA Experiment 20000327 PARAMETER Experiment Name: At_42deg_Heat_Sub_P Parameter: Timepoint (hr) Value: 1
  misc_feature: MA Experiment 20000327 PARAMETER Experiment Name: At_42deg_Heat_Sub_P Parameter: Tissue Value: Aerial
  misc_feature: MA Experiment ID: 20000328 Result: Up-regulated in Transcription
  misc_feature: MA Experiment 20000328 PARAMETER Experiment Name: At_42deg_Heat_Sub_P Parameter: Age (day) Value: 14
  misc_feature: MA Experiment 20000328 PARAMETER Experiment Name: At_42deg_Heat_Sub_P Parameter: Organism Value: A. thaliana
  misc_feature: MA Experiment 20000328 PARAMETER Experiment Name: At_42deg_Heat_Sub_P Parameter: Plant Line Value: WS
  misc_feature: MA Experiment 20000328 PARAMETER Experiment Name: At_42deg_Heat_Sub_P Parameter: Temperature (deg C) Value: 42 vs. 22
  misc_feature: MA Experiment 20000328 PARAMETER Experiment Name: At_42deg_Heat_Sub_P Parameter: Timepoint (hr) Value: 6
  misc_feature: MA Experiment 20000328 PARAMETER Experiment Name: At_42deg_Heat_Sub_P Parameter: Tissue Value: Aerial
agagagagatatcatcgacagagatcaacgaggacaagaagcttctcagagagatccgtggaggagaattctctcaggcggatctgtttgtcggagcttttgtgaatcatcatcatcaatgggtttgttggaagcttttctcaattggcttcgtagcctcttcttcaagcaagaaatggagctttctttgataggacttcaaaatgcaggaaagacatcacttgtaaatgttgttgcaactggtggatacagtgaagacatgattcctacggtcgggtttaacatgaggaaagtaacaaaaggaaatgttacaatcaaactatgggatcttggtggtcaaccaagattccgcagcatgtgggaacgttactgtcgcgctgtttctgccattgtgtatgtagttgatgctgcagatcctgacaacctaagtgtgtcgaaaagtgaactccatgatttgttgagcaagacttcgcttaatggtatccctcttctcgttcttgggaacaagattgacaaacctggagctctgtccaaagaagccttaacagacgaaatgggacttacatcacttacagatagagaagtctgctgtttcatgatatcatgcaagaactctaccaacattgatcaagtcattgattggctcgtaaagcattcaaagtcgaagaactaatcttcaccaagaacatatattctctcttcttgattcttcttagtcttcctgtattgtctagttgatgatgatggtgacaatttttcgtgtgaaacaagagtgtctttatttttcgccttccgtctctccttcttctgctggtctggtcttgtttggtcctccagtcttgtctttgtatattagatgtggattgttttt

SEQ ID NO: 48318 - protein, 223 aa, Arabidopsis thaliana
  peptide (1)..(223): Ceres Seq. ID no. 12724124
  misc_feature (45)..(219): Pfam Name: ADP-ribosylation factor family Pfam Description: ADP-ribosylation factor family
  misc_feature (40)..(222): Homolog of NCBI NO: 20270343 NR Description: hypothetical protein BC015408 [Homo sapiens]
  misc_feature (40)..(222): Homolog of NCBI NO: 38174393 NR Description: Unknown (protein for MGC:75773) [Silurana
  misc_feature (59)..(221): Homolog of NCBI NO: 9757978 NR Description: ADP-ribosylation factor-like protein [Arabidopsis
  misc_feature (59)..(223): Homolog of NCBI NO: 15229626 NR Description: putative protein; protein id: At3g49860.1
  misc_feature (186)..(223): Homolog of NCBI NO: 11274625 NR Description: ADP-ribosylation factor-like protein T16K5.220 -
  misc_feature (59)..(185): Homolog of NCBI NO: 11274625 NR Description: ADP-ribosylation factor-like protein T16K5.220 -
  misc_feature (40)..(221): Homolog of NCBI NO: 18421676 NR Description: ADP-ribosylation factor - like protein
  misc_feature (59)..(223): Homolog of NCBI NO: 9757877 NR Description: ADP-ribosylation factor-like protein [Arabidopsis
  misc_feature (40)..(223): Homolog of NCBI NO: 18425204 NR Description: ADP-ribosylation factor-like protein
  misc_feature (40)..(223): Homolog of NCBI NO: 22331720 NR Description: ADP-RIBOSYLATION FACTOR -like protein
ERDIIDRDQRGQEASQRDPWRRILSGGSVCRSFCESSSSMGLLEAFLNWLRSLFFKQEMELSLIGLQNAGKTSLVNVVATGGYSEDMIPTVGFNMRKVTKGNVTIKLWDLGGQPRFRSMWERYCRAVSAIVYVVDAADPDNLSVSKSELHDLLSKTSLNGIPLLVLGNKIDKPGALSKEALTDEMGLTSLTDREVCCFMISCKNSTNIDQVIDWLVKHSKSKN

SEQ ID NO: 48319 - protein, 184 aa, Arabidopsis thaliana
  peptide (1)..(184): Ceres Seq. ID no. 12724125
  misc_feature (6)..(180): Pfam Name: ADP-ribosylation factor family Pfam Description: ADP-ribosylation factor family
  misc_feature (1)..(183): Homolog of NCBI NO: 20270343 NR Description: hypothetical protein BC015408 [Homo sapiens]
  misc_feature (1)..(183): Homolog of NCBI NO: 38174393 NR Description: Unknown (protein for MGC:75773) [Silurana
  misc_feature (20)..(182): Homolog of NCBI NO: 9757978 NR Description: ADP-ribosylation factor-like protein [Arabidopsis
  misc_feature (20)..(184): Homolog of NCBI NO: 15229626 NR Description: putative protein; protein id: At3g49860.1
  misc_feature (147)..(184): Homolog of NCBI NO: 11274625 NR Description: ADP-ribosylation factor-like protein T16K5.220 -
  misc_feature (20)..(146): Homolog of NCBI NO: 11274625 NR Description: ADP-ribosylation factor-like protein T16K5.220 -
  misc_feature (1)..(182): Homolog of NCBI NO: 18421676 NR Description: ADP-ribosylation factor - like protein
  misc_feature (20)..(184): Homolog of NCBI NO: 9757877 NR Description: ADP-ribosylation factor-like protein [Arabidopsis
  misc_feature (1)..(184): Homolog of NCBI NO: 18425204 NR Description: ADP-ribosylation factor-like protein
  misc_feature (1)..(184): Homolog of NCBI NO: 22331720 NR Description: ADP-RIBOSYLATION FACTOR -like protein
MGLLEAFLNWLRSLFFKQEMELSLIGLQNAGKTSLVNVVATGGYSEDMIPTVGFNMRKVTKGNVTIKLWDLGGQPRFRSMWERYCRAVSAIVYVVDAADPDNLSVSKSELHDLLSKTSLNGIPLLVLGNKIDKPGALSKEALTDEMGLTSLTDREVCCFMISCKNSTNIDQVIDWLVKHSKSKN

SEQ ID NO: 48320 - protein, 165 aa, Arabidopsis thaliana
  peptide (1)..(165): Ceres Seq. ID no. 12724126
  misc_feature (1)..(161): Pfam Name: ADP-ribosylation factor family Pfam Description: ADP-ribosylation factor family
  misc_feature (1)..(164): Homolog of NCBI NO: 20270343 NR Description: hypothetical protein BC015408 [Homo sapiens]
  misc_feature (1)..(164): Homolog of NCBI NO: 38174393 NR Description: Unknown (protein for MGC:75773) [Silurana
  misc_feature (1)..(163): Homolog of NCBI NO: 9757978 NR Description: ADP-ribosylation factor-like protein [Arabidopsis
  misc_feature (1)..(165): Homolog of NCBI NO: 15229626 NR Description: putative protein; protein id: At3g49860.1
  misc_feature (128)..(165): Homolog of NCBI NO: 11274625 NR Description: ADP-ribosylation factor-like protein T16K5.220 -
  misc_feature (1)..(127): Homolog of NCBI NO: 11274625 NR Description: ADP-ribosylation factor-like protein T16K5.220 -
  misc_feature (1)..(163): Homolog of NCBI NO: 18421676 NR Description: ADP-ribosylation factor - like protein
  misc_feature (1)..(165): Homolog of NCBI NO: 9757877 NR Description: ADP-ribosylation factor-like protein [Arabidopsis
  misc_feature (1)..(165): Homolog of NCBI NO: 18425204 NR Description: ADP-ribosylation factor-like protein
  misc_feature (1)..(165): Homolog of NCBI NO: 22331720 NR Description: ADP-RIBOSYLATION FACTOR -like protein
MELSLIGLQNAGKTSLVNVVATGGYSEDMIPTVGFNMRKVTKGNVTIKLWDLGGQPRFRSMWERYCRAVSAIVYVVDAADPDNLSVSKSELHDLLSKTSLNGIPLLVLGNKIDKPGALSKEALTDEMGLTSLTDREVCCFMISCKNSTNIDQVIDWLVKHSKSKN

SEQ ID NO: 48321 - DNA, 2093 bp, Arabidopsis thaliana
  misc_feature (1)..(2093): Ceres Seq. ID no. 13649980
  misc_feature: MA Experiment ID: 20000355 Result: Up-regulated in Transcription
  misc_feature: MA Experiment 20000355 PARAMETER Experiment Name: At_Siliques_Sub_P Parameter: Age (day) Value: 21
  misc_feature: MA Experiment 20000355 PARAMETER Experiment Name: At_Siliques_Sub_P Parameter: Organism Value: A. thaliana
  misc_feature: MA Experiment 20000355 PARAMETER Experiment Name: At_Siliques_Sub_P Parameter: Plant Line Value: WS
  misc_feature: MA Experiment 20000355 PARAMETER Experiment Name: At_Siliques_Sub_P Parameter: Tissue Value: Less Than 5mm Siliques vs. Whole Plant
aaaaaaagtcacactcgaagtctcacaccacaccaaccacttcttcttcttcttcttcttctacataaaacctaacgccatggattcagatttcggaatccccagagaactctcccctcttcagcaacttcgatctcagtacaaacctgagcttcctccttgtctccaggggactactgtccgcgtggagcttggtgatggaaccactgtggctgaagctgctgattcacataccatggctcgtgctttcccgcataccttaggccagcctttggctcacttcctcagggaaactgctcaagttcctgatgcgcacatcattaccgagcttccttcagttagagttggaattgtgttttgtggaaggcaagctccaggtggacataatgtgatctggggtcttttcgaggctctcaaggtgcacaacgcaaaaagcactttgctaggatttttgggtggttccgagggtctatttgcacaaaagactctagagattacagatgatatacttcagacttacaaaaaccaaggtggttatgatttgctcggaagaactaaggatcagatcaaaacaactgagcaggttaacgctgcactcaaagcttgcacagatttaaagttagatggccttgttatcattggaggcgtaatatcaaacacagatgcagctcatctcgctgaattttttgctgctgcaaaatgctcaactaaggtggttggtgttccagttactacaaatggagatctcaaaaatcagtttgtggaggcaaacgtgggttttgacaccatatgcaaggtgaactcacaactcattagcaatgcctgcactgatgccctttctgcagagaagtattattatttcatccgcctcatgggtcgtaagcactctcatgttgcccttgagtgtacactccagtctcatccaaacatggtgatactgggcgaggaggttgcagcatctaagctcacaatttttgacattgctaaacagatctgtgatgctgttcaagcaagagcagtagaagacaagaatcatggagtcatcctcattcctgaagggcttatagtcagtattcctgaagtctacgctctgttaaaggaaattcacgggctgctgaggcagggtgtatctgctgataagatttctactcagctctcaccttggtcatctgctttgtttgaatttcttcctccattcattaagaaacagctacttctccatcctgagtctgatgattctgctcagctatcccagattgagacagagaaacttcttgcgtatctcgtggagactgaaatgaacaagcgcttgaaagaaggcacatacaaggggaagaaattcaatgccatatgtcacttttttggttaccaagctcgtggatctcttccatcgaaattcgattgtgattacgcctacgttcttggacatatatgttaccacatccttgcagctggtctgaatggttacatggcaacagtgaccaacctaaaaagtcctgtgaacaagtggaaatgtggtgctacacctattacagcgatgatgacggtgaagcattggtcccaggatgctagttatactttaacttcaattggtagacctgcaattcatccagctatggtggatttgaaaggcaaagcatacgacctcttgagacagaatgcacaaaaattcttgatggaagatctgtacagaaacccaggaccgctacagtacgatggtcctggtgcggatgctaaagcagtgagtctctgtgttgaagatcaagattacatgggacgtatcaagaagctgcaggaatatcttgaccaagtgaggacgatagtgaaaccaggatgttctcaagacgtattgaaggcagcactgagtgtgatggcttcggtgactgatgttcttactactatttcttcaaatggtggtcaatgatttgcttaaaacttaaggacaaagctcttatgaatcacacacgtcgtgtttgttctcttctttttgttttctttcttttgagatgtaacttttgttgtattttttaagttattgagtttggaaagacataaaaattgaaaaggtttggattatagaggcgctatttcac

SEQ ID NO: 48322 - protein, 640 aa, Arabidopsis thaliana
  peptide (1)..(640): Ceres Seq. ID no. 13649981
  misc_feature (114)..(394): Pfam Name: Phosphofructokinase Pfam Description: Phosphofructokinase
  misc_feature (38)..(589): Homolog of NCBI NO: 34540025 NR Description: phosphofructokinase [Porphyromonas gingivalis
  misc_feature (37)..(586): Homolog of NCBI NO: 15639531 NR Description: pyrophosphate--fructose 6-phosphate
  misc_feature (38)..(586): Homolog of NCBI NO: 15221156 NR Description: pyrophosphate-fructose-6-phosphate
  misc_feature (37)..(574): Homolog of NCBI NO: 11528427 NR Description: pyrophosphate-dependent phosphofructokinase
  misc_feature (114)..(511): Homolog of NCBI NO: 29367525 NR Description: fructose-6-phosphate 1-phosphotransferase
  misc_feature (27)..(635): Homolog of NCBI NO: 29647436 NR Description: putative pyrophosphate--fructose 6-phosphate
  misc_feature (27)..(636): Homolog of NCBI NO: 129881 NR Description: Pyrophosphate--fructose 6-phosphate alpha subunit (PFP) (6-phosphofructokinase, (Pyrophosphate-dependent 6-phosphofructose-1-kinase) (PPI-PFK)
  misc_feature (27)..(636): Homolog of NCBI NO: 2499488 NR Description: Pyrophosphate--fructose 6-phosphate alpha subunit (PFP) (6-phosphofructokinase, pyrophosphate
  misc_feature (27)..(640): Homolog of NCBI NO: 3790102 NR Description: pyrophosphate-dependent phosphofructokinase alpha
  misc_feature (27)..(640): Homolog of NCBI NO: 15223082 NR Description: pyrophosphate-dependent phosphofructokinase alpha
KKVTLEVSHHTNHFFFFFFFYIKPNAMDSDFGIPRELSPLQQLRSQYKPELPPCLQGTTVRVELGDGTTVAEAADSHTMARAFPHTLGQPLAHFLRETAQVPDAHIITELPSVRVGIVFCGRQAPGGHNVIWGLFEALKVHNAKSTLLGFLGGSEGLFAQKTLEITDDILQTYKNQGGYDLLGRTKDQIKTTEQVNAALKACTDLKLDGLVIIGGVISNTDAAHLAEFFAAAKCSTKVVGVPVTTNGDLKNQFVEANVGFDTICKVNSQLISNACTDALSAEKYYYFIRLMGRKHSHVALECTLQSHPNMVILGEEVAASKLTIFDIAKQICDAVQARAVEDKNHGVILIPEGLIVSIPEVYALLKEIHGLLRQGVSADKISTQLSPWSSALFEFLPPFIKKQLLLHPESDDSAQLSQIETEKLLAYLVETEMNKRLKEGTYKGKKFNAICHFFGYQARGSLPSKFDCDYAYVLGHICYHILAAGLNGYMATVTNLKSPVNKWKCGATPITAMMTVKHWSQDASYTLTSIGRPAIHPAMVDLKGKAYDLLRQNAQKFLMEDLYRNPGPLQYDGPGADAKAVSLCVEDQDYMGRIKKLQEYLDQVRTIVKPGCSQDVLKAALSVMASVTDVLTTISSNGGQ

SEQ ID NO: 48323 - protein, 614 aa, Arabidopsis thaliana
  peptide (1)..(614): Ceres Seq. ID no. 13649982
  misc_feature (88)..(368): Pfam Name: Phosphofructokinase Pfam Description: Phosphofructokinase
  misc_feature (12)..(563): Homolog of NCBI NO: 34540025 NR Description: phosphofructokinase [Porphyromonas gingivalis
  misc_feature (11)..(560): Homolog of NCBI NO: 15639531 NR Description: pyrophosphate--fructose 6-phosphate
  misc_feature (12)..(560): Homolog of NCBI NO: 15221156 NR Description: pyrophosphate-fructose-6-phosphate
  misc_feature (11)..(548): Homolog of NCBI NO: 11528427 NR Description: pyrophosphate-dependent phosphofructokinase
  misc_feature (88)..(485): Homolog of NCBI NO: 29367525 NR Description: fructose-6-phosphate 1-phosphotransferase
  misc_feature (1)..(609): Homolog of NCBI NO: 29647436 NR Description: putative pyrophosphate--fructose 6-phosphate
  misc_feature (1)..(610): Homolog of NCBI NO: 129881 NR Description: Pyrophosphate--fructose 6-phosphate alpha subunit (PFP) (6-phosphofructokinase, (Pyrophosphate-dependent 6-phosphofructose-1-kinase) (PPI-PFK)
  misc_feature (1)..(610): Homolog of NCBI NO: 2499488 NR Description: Pyrophosphate--fructose 6-phosphate alpha subunit (PFP) (6-phosphofructokinase, pyrophosphate
  misc_feature (1)..(614): Homolog of NCBI NO: 3790102 NR Description: pyrophosphate-dependent phosphofructokinase alpha
  misc_feature (1)..(614): Homolog of NCBI NO: 15223082 NR Description: pyrophosphate-dependent phosphofructokinase alpha
MDSDFGIPRELSPLQQLRSQYKPELPPCLQGTTVRVELGDGTTVAEAADSHTMARAFPHTLGQPLAHFLRETAQVPDAHIITELPSVRVGIVFCGRQAPGGHNVIWGLFEALKVHNAKSTLLGFLGGSEGLFAQKTLEITDDILQTYKNQGGYDLLGRTKDQIKTTEQVNAALKACTDLKLDGLVIIGGVISNTDAAHLAEFFAAAKCSTKVVGVPVTTNGDLKNQFVEANVGFDTICKVNSQLISNACTDALSAEKYYYFIRLMGRKHSHVALECTLQSHPNMVILGEEVAASKLTIFDIAKQICDAVQARAVEDKNHGVILIPEGLIVSIPEVYALLKEIHGLLRQGVSADKISTQLSPWSSALFEFLPPFIKKQLLLHPESDDSAQLSQIETEKLLAYLVETEMNKRLKEGTYKGKKFNAICHFFGYQARGSLPSKFDCDYAYVLGHICYHILAAGLNGYMATVTNLKSPVNKWKCGATPITAMMTVKHWSQDASYTLTSIGRPAIHPAMVDLKGKAYDLLRQNAQKFLMEDLYRNPGPLQYDGPGADAKAVSLCVEDQDYMGRIKKLQEYLDQVRTIVKPGCSQDVLKAALSVMASVTDVLTTISSNGGQ

SEQ ID NO: 48324 - protein, 562 aa, Arabidopsis thaliana
  peptide (1)..(562): Ceres Seq. ID no. 13649983
  misc_feature (36)..(316): Pfam Name: Phosphofructokinase Pfam Description: Phosphofructokinase
  misc_feature (1)..(511): Homolog of NCBI NO: 34540025 NR Description: phosphofructokinase [Porphyromonas gingivalis
  misc_feature (1)..(508): Homolog of NCBI NO: 15639531 NR Description: pyrophosphate--fructose 6-phosphate
  misc_feature (1)..(508): Homolog of NCBI NO: 15221156 NR Description: pyrophosphate-fructose-6-phosphate
  misc_feature (1)..(496): Homolog of NCBI NO: 11528427 NR Description: pyrophosphate-dependent phosphofructokinase
  misc_feature (36)..(433): Homolog of NCBI NO: 29367525 NR Description: fructose-6-phosphate 1-phosphotransferase
  misc_feature (1)..(557): Homolog of NCBI NO: 29647436 NR Description: putative pyrophosphate--fructose 6-phosphate
  misc_feature (1)..(558): Homolog of NCBI NO: 129881 NR Description: Pyrophosphate--fructose 6-phosphate alpha subunit (PFP) (6-phosphofructokinase, (Pyrophosphate-dependent 6-phosphofructose-1-kinase) (PPI-PFK)
  misc_feature (1)..(558): Homolog of NCBI NO: 2499488 NR Description: Pyrophosphate--fructose 6-phosphate alpha subunit (PFP) (6-phosphofructokinase, pyrophosphate
  misc_feature (1)..(562): Homolog of NCBI NO: 3790102 NR Description: pyrophosphate-dependent phosphofructokinase alpha
  misc_feature (1)..(562): Homolog of NCBI NO: 15223082 NR Description: pyrophosphate-dependent phosphofructokinase alpha
MARAFPHTLGQPLAHFLRETAQVPDAHIITELPSVRVGIVFCGRQAPGGHNVIWGLFEALKVHNAKSTLLGFLGGSEGLFAQKTLEITDDILQTYKNQGGYDLLGRTKDQIKTTEQVNAALKACTDLKLDGLVIIGGVISNTDAAHLAEFFAAAKCSTKVVGVPVTTNGDLKNQFVEANVGFDTICKVNSQLISNACTDALSAEKYYYFIRLMGRKHSHVALECTLQSHPNMVILGEEVAASKLTIFDIAKQICDAVQARAVEDKNHGVILIPEGLIVSIPEVYALLKEIHGLLRQGVSADKISTQLSPWSSALFEFLPPFIKKQLLLHPESDDSAQLSQIETEKLLAYLVETEMNKRLKEGTYKGKKFNAICHFFGYQARGSLPSKFDCDYAYVLGHICYHILAAGLNGYMATVTNLKSPVNKWKCGATPITAMMTVKHWSQDASYTLTSIGRPAIHPAMVDLKGKAYDLLRQNAQKFLMEDLYRNPGPLQYDGPGADAKAVSLCVEDQDYMGRIKKLQEYLDQVRTIVKPGCSQDVLKAALSVMASVTDVLTTISSNGGQ

SEQ ID NO: 48325 - DNA, 1771 bp, Arabidopsis thaliana; identical to SEQ ID NO: 39258
  misc_feature (1)..(1771): Ceres Seq. ID no. 13495902
  misc_feature: MA Experiment ID: 108474 Result: Down-regulated in Transcription
  misc_feature: MA Experiment 108474 PARAMETER Experiment Name: At_Drought_Flowers_cDNA_P Parameter: Timepoint (hr) Value: null
  misc_feature: MA Experiment 108474 PARAMETER Experiment Name: At_Drought_Flowers_cDNA_P Parameter: Treatment Value: Drought vs. No Drought
  misc_feature: MA Experiment ID: 108501 Result: Down-regulated in Transcription
  misc_feature: MA Experiment 108501 PARAMETER Experiment Name: At_ap2_floral_buds_cDNA_P Parameter: Plant Line Value: ap2 (Ler.)
  misc_feature: MA Experiment 108501 PARAMETER Experiment Name: At_ap2_floral_buds_cDNA_P Parameter: Tissue Value: Closed Flower
  misc_feature: MA Experiment ID: 108595 Result: Up-regulated in Transcription
  misc_feature: MA Experiment 108595 PARAMETER Experiment Name: At_Ler-pi_Ovule_cDNA_P Parameter: Plant Line Value: null

SEQ ID NO: 48326 - protein, 548 aa, Arabidopsis thaliana; identical to SEQ ID NO: 39259
  peptide (1)..(548): Ceres Seq. ID no. 13495903
  misc_feature (61)..(473): Pfam Name: AMP-binding enzyme Pfam Description: AMP-binding enzyme
  misc_feature (61)..(473): Pfam Name: AMP-binding enzyme Pfam Description: AMP-binding enzyme
  misc_feature (7)..(542): Homolog of NCBI NO: 12229632 NR Description: 4-coumarate--CoA ligase 2 (4CL 2)
  misc_feature (16)..(544): Homolog of NCBI NO: 112801 NR Description: 4-coumarate--CoA ligase 1 (4CL 1)
  misc_feature (16)..(544): Homolog of NCBI NO: 112800 NR Description: 4-coumarate--CoA ligase 1 (4CL 1)
  misc_feature (5)..(542): Homolog of NCBI NO: 398963 NR Description: 4-coumarate--CoA ligase 1 (4CL 1)
  misc_feature (7)..(542): Homolog of NCBI NO: 7428495 NR Description: 4-coumarate-CoA ligase (EC 6.2.1.12) - common
  misc_feature (7)..(542): Homolog of NCBI NO: 12229632 NR Description: 4-coumarate--CoA ligase 2 (4CL 2)
  misc_feature (16)..(544): Homolog of NCBI NO: 112800 NR Description: 4-coumarate--CoA ligase 1 (4CL 1)
  misc_feature (7)..(542): Homolog of NCBI NO: 7428495 NR Description: 4-coumarate-CoA ligase (EC 6.2.1.12) - common
  misc_feature (7)..(548): Homolog of NCBI NO: 15221636 NR Description: 4-coumarate:CoA ligase (4-coumaroyl-CoA synthase)
  misc_feature (7)..(543): Homolog of NCBI NO: 28628063 NR Description: 4-coumarate:CoA ligase-like [Nicotiana
  misc_feature (11)..(543): Homolog of NCBI NO: 38567930 NR Description: OSJNBa0033H08.6 [Oryza sativa (japonica
  misc_feature (7)..(542): Homolog of NCBI NO: 17063848 NR Description: 4-coumarate:CoA ligase [Amorpha fruticosa]
  misc_feature (5)..(542): Homolog of NCBI NO: 5163399 NR Description: 4-coumarate:coenzyme A ligase [Solanum tuberosum]
  misc_feature (5)..(542): Homolog of NCBI NO: 398963 NR Description: 4-coumarate--CoA ligase 1 (4CL 1)
  misc_feature (16)..(544): Homolog of NCBI NO: 112801 NR Description: 4-coumarate--CoA ligase 1 (4CL 1)
  misc_feature (5)..(542): Homolog of NCBI NO: 5163399 NR Description: 4-coumarate:coenzyme A ligase [Solanum tuberosum]
  misc_feature (7)..(542): Homolog of NCBI NO: 17063848 NR Description: 4-coumarate:CoA ligase [Amorpha fruticosa]
  misc_feature (11)..(543): Homolog of NCBI NO: 38567930 NR Description: OSJNBa0033H08.6 [Oryza sativa (japonica
  misc_feature (7)..(543): Homolog of NCBI NO: 28628063 NR Description: 4-coumarate:CoA ligase-like [Nicotiana
  misc_feature (7)..(548): Homolog of NCBI NO: 15221636 NR Description: 4-coumarate:CoA ligase (4-coumaroyl-CoA synthase)

SEQ ID NO: 48327 - protein, 542 aa, Arabidopsis thaliana; identical to SEQ ID NO: 39260
  peptide (1)..(542): Ceres Seq. ID no. 13495904
  misc_feature (55)..(467): Pfam Name: AMP-binding enzyme Pfam Description: AMP-binding enzyme
  misc_feature (55)..(467): Pfam Name: AMP-binding enzyme Pfam Description: AMP-binding enzyme
  misc_feature (1)..(536): Homolog of NCBI NO: 12229632 NR Description: 4-coumarate--CoA ligase 2 (4CL 2)
  misc_feature (10)..(538): Homolog of NCBI NO: 112801 NR Description: 4-coumarate--CoA ligase 1 (4CL 1)
  misc_feature (10)..(538): Homolog of NCBI NO: 112800 NR Description: 4-coumarate--CoA ligase 1 (4CL 1)
  misc_feature (1)..(536): Homolog of NCBI NO: 398963 NR Description: 4-coumarate--CoA ligase 1 (4CL 1)
  misc_feature (1)..(536): Homolog of NCBI NO: 7428495 NR Description: 4-coumarate-CoA ligase (EC 6.2.1.12) - common
  misc_feature (1)..(536): Homolog of NCBI NO: 12229632 NR Description: 4-coumarate--CoA ligase 2 (4CL 2)
  misc_feature (10)..(538): Homolog of NCBI NO: 112800 NR Description: 4-coumarate--CoA ligase 1 (4CL 1)
  misc_feature (1)..(536): Homolog of NCBI NO: 7428495 NR Description: 4-coumarate-CoA ligase (EC 6.2.1.12) - common
  misc_feature (1)..(542): Homolog of NCBI NO: 15221636 NR Description: 4-coumarate:CoA ligase (4-coumaroyl-CoA synthase)
  misc_feature (1)..(537): Homolog of NCBI NO: 28628063 NR Description: 4-coumarate:CoA ligase-like [Nicotiana
  misc_feature (5)..(537): Homolog of NCBI NO: 38567930 NR Description: OSJNBa0033H08.6 [Oryza sativa (japonica
  misc_feature (1)..(536): Homolog of NCBI NO: 17063848 NR Description: 4-coumarate:CoA ligase [Amorpha fruticosa]
  misc_feature (1)..(536): Homolog of NCBI NO: 5163399 NR Description: 4-coumarate:coenzyme A ligase [Solanum tuberosum]
  misc_feature (1)..(536): Homolog of NCBI NO: 398963 NR Description: 4-coumarate--CoA ligase 1 (4CL 1)
  misc_feature (10)..(538): Homolog of NCBI NO: 112801 NR Description: 4-coumarate--CoA ligase 1 (4CL 1)
  misc_feature (1)..(536): Homolog of NCBI NO: 5163399 NR Description: 4-coumarate:coenzyme A ligase [Solanum tuberosum]
  misc_feature (1)..(536): Homolog of NCBI NO: 17063848 NR Description: 4-coumarate:CoA ligase [Amorpha fruticosa]
  misc_feature (5)..(537): Homolog of NCBI NO: 38567930 NR Description: OSJNBa0033H08.6 [Oryza sativa (japonica
  misc_feature (1)..(537): Homolog of NCBI NO: 28628063 NR Description: 4-coumarate:CoA ligase-like [Nicotiana
  misc_feature (1)..(542): Homolog of NCBI NO: 15221636 NR Description: 4-coumarate:CoA ligase (4-coumaroyl-CoA synthase)

SEQ ID NO: 48328 - protein, 462 aa, Arabidopsis thaliana; identical to SEQ ID NO: 39261
  peptide (1)..(462): Ceres Seq. ID no. 13495905
  misc_feature (1)..(387): Pfam Name: AMP-binding enzyme Pfam Description: AMP-binding enzyme
  misc_feature (1)..(387): Pfam Name: AMP-binding enzyme Pfam Description: AMP-binding enzyme
  misc_feature (1)..(456): Homolog of NCBI NO: 12229632 NR Description: 4-coumarate--CoA ligase 2 (4CL 2)
  misc_feature (1)..(458): Homolog of NCBI NO: 112801 NR Description: 4-coumarate--CoA ligase 1 (4CL 1)
  misc_feature (1)..(458): Homolog of NCBI NO: 112800 NR Description: 4-coumarate--CoA ligase 1 (4CL 1)
  misc_feature (1)..(456): Homolog of NCBI NO: 398963 NR Description: 4-coumarate--CoA ligase 1 (4CL 1)
  misc_feature (1)..(456): Homolog of NCBI NO: 7428495 NR Description: 4-coumarate-CoA ligase (EC 6.2.1.12) - common
  misc_feature (1)..(456): Homolog of NCBI NO: 12229632 NR Description: 4-coumarate--CoA ligase 2 (4CL 2)
  misc_feature (1)..(458): Homolog of NCBI NO: 112800 NR Description: 4-coumarate--CoA ligase 1 (4CL 1)
  misc_feature (1)..(456): Homolog of NCBI NO: 7428495 NR Description: 4-coumarate-CoA ligase (EC 6.2.1.12) - common
  misc_feature (1)..(462): Homolog of NCBI NO: 15221636 NR Description: 4-coumarate:CoA ligase (4-coumaroyl-CoA synthase)
  misc_feature (1)..(457): Homolog of NCBI NO: 28628063 NR Description: 4-coumarate:CoA ligase-like [Nicotiana
  misc_feature (1)..(457): Homolog of NCBI NO: 38567930 NR Description: OSJNBa0033H08.6 [Oryza sativa (japonica
  misc_feature (1)..(456): Homolog of NCBI NO: 17063848 NR Description: 4-coumarate:CoA ligase [Amorpha fruticosa]
  misc_feature (1)..(456): Homolog of NCBI NO: 5163399 NR Description: 4-coumarate:coenzyme A ligase [Solanum tuberosum]
  misc_feature (1)..(456): Homolog of NCBI NO: 398963 NR Description: 4-coumarate--CoA ligase 1 (4CL 1)
  misc_feature (1)..(458): Homolog of NCBI NO: 112801 NR Description: 4-coumarate--CoA ligase 1 (4CL 1)
  misc_feature (1)..(456): Homolog of NCBI NO: 5163399 NR Description: 4-coumarate:coenzyme A ligase [Solanum tuberosum]
  misc_feature (1)..(456): Homolog of NCBI NO: 17063848 NR Description: 4-coumarate:CoA ligase [Amorpha fruticosa]
  misc_feature (1)..(457): Homolog of NCBI NO: 38567930 NR Description: OSJNBa0033H08.6 [Oryza sativa (japonica
  misc_feature (1)..(457): Homolog of NCBI NO: 28628063 NR Description: 4-coumarate:CoA ligase-like [Nicotiana
  misc_feature (1)..(462): Homolog of NCBI NO: 15221636 NR Description: 4-coumarate:CoA ligase (4-coumaroyl-CoA synthase)

SEQ ID NO: 48329 - DNA, 1046 bp, Arabidopsis thaliana
  misc_feature (1)..(1046): Ceres Seq. ID no. 12670711
  misc_feature: MA Experiment ID: 20000166 Result: Up-regulated in Transcription
  misc_feature: MA Experiment 20000166 PARAMETER Experiment Name: At_100uM_ABA_P Parameter: Age (day) Value: 14
  misc_feature: MA Experiment 20000166 PARAMETER Experiment Name: At_100uM_ABA_P Parameter: Organism Value: A. thaliana
  misc_feature: MA Experiment 20000166 PARAMETER Experiment Name: At_100uM_ABA_P Parameter: Plant Line Value: WS
  misc_feature: MA Experiment 20000166 PARAMETER Experiment Name: At_100uM_ABA_P Parameter: Timepoint (hr) Value: 1
  misc_feature: MA Experiment 20000166 PARAMETER Experiment Name: At_100uM_ABA_P Parameter: Tissue Value: Aerial
  misc_feature: MA Experiment 20000166 PARAMETER Experiment Name: At_100uM_ABA_P Parameter: Treatment Value: 100uM ABA vs. No Treatment
  misc_feature: MA Experiment ID: 20000169 Result: Up-regulated in Transcription
  misc_feature: MA Experiment 20000169 PARAMETER Experiment Name: At_100uM_ABA_P Parameter: Age (day) Value: 14
  misc_feature: MA Experiment 20000169 PARAMETER Experiment Name: At_100uM_ABA_P Parameter: Organism Value: A. thaliana
  misc_feature: MA Experiment 20000169 PARAMETER Experiment Name: At_100uM_ABA_P Parameter: Plant Line Value: WS
  misc_feature: MA Experiment 20000169 PARAMETER Experiment Name: At_100uM_ABA_P Parameter: Timepoint (hr) Value: 6
  misc_feature: MA Experiment 20000169 PARAMETER Experiment Name: At_100uM_ABA_P Parameter: Tissue Value: Aerial
  misc_feature: MA Experiment 20000169 PARAMETER Experiment Name: At_100uM_ABA_P Parameter: Treatment Value: 100uM ABA vs. No Treatment
  misc_feature: MA Experiment ID: 20000180 Result: Up-regulated in Transcription
  misc_feature: MA Experiment 20000180 PARAMETER Experiment Name: At_Germinating_Seeds_P Parameter: Age (hr) Value: 24 vs. 0
  misc_feature: MA Experiment 20000180 PARAMETER Experiment Name: At_Germinating_Seeds_P Parameter: Tissue Value: Germinating Seeds
  misc_feature: MA Experiment ID: 20000264 Result: Down-regulated in Transcription
  misc_feature: MA Experiment 20000264 PARAMETER Experiment Name: At_Open_Flower_P Parameter: Age (day) Value: 21
  misc_feature: MA Experiment 20000264 PARAMETER Experiment Name: At_Open_Flower_P Parameter: Plant Line Value: WS
  misc_feature: MA Experiment 20000264 PARAMETER Experiment Name: At_Open_Flower_P Parameter: Tissue Value: Open Flower vs. Whole Plant
  misc_feature: MA Experiment ID: 20000265 Result: Down-regulated in Transcription
  misc_feature: MA Experiment 20000265 PARAMETER Experiment Name: At_Open_Flower_P Parameter: Age (day) Value: 21
  misc_feature: MA Experiment 20000265 PARAMETER Experiment Name: At_Open_Flower_P Parameter: Plant Line Value: WS
  misc_feature: MA Experiment 20000265 PARAMETER Experiment Name: At_Open_Flower_P Parameter: Tissue Value: Closed Flower vs. Whole Plant
  misc_feature: MA Experiment ID: 20000286 Result: Down-regulated in Transcription
  misc_feature: MA Experiment 20000286 PARAMETER Experiment Name: At_Open_Flower_P Parameter: Age (day) Value: 21
  misc_feature: MA Experiment 20000286 PARAMETER Experiment Name: At_Open_Flower_P Parameter: Plant Line Value: WS
  misc_feature: MA Experiment 20000286 PARAMETER Experiment Name: At_Open_Flower_P Parameter: Tissue Value: Half Open vs. Whole Plant
  misc_feature: MA Experiment ID: 20000436 Result: Up-regulated in Transcription
  misc_feature: MA Experiment 20000436 PARAMETER Experiment Name: At_Drought_P Parameter: Age (day) Value: 7
  misc_feature: MA Experiment 20000436 PARAMETER Experiment Name: At_Drought_P Parameter: Organism Value: A. thaliana
  misc_feature: MA Experiment 20000436 PARAMETER Experiment Name: At_Drought_P Parameter: Plant Line Value: WS
  misc_feature: MA Experiment 20000436 PARAMETER Experiment Name: At_Drought_P Parameter: Timepoint (hr) Value: 12
  misc_feature: MA Experiment 20000436 PARAMETER Experiment Name: At_Drought_P Parameter: Tissue Value: Whole Plant
  misc_feature: MA Experiment 20000436 PARAMETER Experiment Name: At_Drought_P Parameter: Treatment Value: Drought vs. No Drought
  misc_feature: MA Experiment ID: 20000437 Result: Up-regulated in Transcription
  misc_feature: MA Experiment 20000437 PARAMETER Experiment Name: At_Drought_P Parameter: Age (day) Value: 8
  misc_feature: MA Experiment 20000437 PARAMETER Experiment Name: At_Drought_P Parameter: Organism Value: A. thaliana
  misc_feature: MA Experiment 20000437 PARAMETER Experiment Name: At_Drought_P Parameter: Plant Line Value: WS
  misc_feature: MA Experiment 20000437 PARAMETER Experiment Name: At_Drought_P Parameter: Timepoint (hr) Value: 24
  misc_feature: MA Experiment 20000437 PARAMETER Experiment Name: At_Drought_P Parameter: Tissue Value: Whole Plant
  misc_feature: MA Experiment 20000437 PARAMETER Experiment Name: At_Drought_P Parameter: Treatment Value: Drought vs. No Drought
  misc_feature: MA Experiment ID: 20000439 Result: Down-regulated in Transcription
  misc_feature: MA Experiment 20000439 PARAMETER Experiment Name: At_Roots__P Parameter: Age (day) Value: 14 vs. 21
  misc_feature: MA Experiment 20000439 PARAMETER Experiment Name: At_Roots__P Parameter: Organism Value: A. thaliana
  misc_feature: MA Experiment 20000439 PARAMETER Experiment Name: At_Roots__P Parameter: Tissue Value: Roots vs. Whole Plant
  misc_feature: MA Experiment ID: 20000453 Result: Up-regulated in Transcription
  misc_feature: MA Experiment 20000453 PARAMETER Experiment Name: At_100uM_ABA_P Parameter: Age (day) Value: 15
  misc_feature: MA Experiment 20000453 PARAMETER Experiment Name: At_100uM_ABA_P Parameter: Organism Value: A. thaliana
  misc_feature: MA Experiment 20000453 PARAMETER Experiment Name: At_100uM_ABA_P Parameter: Plant Line Value: WS
  misc_feature: MA Experiment 20000453 PARAMETER Experiment Name: At_100uM_ABA_P Parameter: Timepoint (hr) Value: 24
  misc_feature: MA Experiment 20000453 PARAMETER Experiment Name: At_100uM_ABA_P Parameter: Tissue Value: Aerial
  misc_feature: MA Experiment 20000453 PARAMETER Experiment Name: At_100uM_ABA_P Parameter: Treatment Value: 100uM ABA vs. No Treatment
  misc_feature: MA Experiment ID: 20000573 Result: Down-regulated in Transcription
  misc_feature: MA Experiment 20000573 PARAMETER Experiment Name: At_100uM_ABA_Mutants__P Parameter: Organism Value: A. thaliana
  misc_feature: MA Experiment 20000573 PARAMETER Experiment Name: At_100uM_ABA_Mutants__P Parameter: Plant Line Value: CS22 vs. Ler wt
  misc_feature: MA Experiment 20000573 PARAMETER Experiment Name: At_100uM_ABA_Mutants__P Parameter: Timepoint (hr) Value: N/A
  misc_feature: MA Experiment 20000573 PARAMETER Experiment Name: At_100uM_ABA_Mutants__P Parameter: Tissue Value: Whole Plant
  misc_feature: MA Experiment 20000573 PARAMETER Experiment Name: At_100uM_ABA_Mutants__P Parameter: Treatment Value: None
  misc_feature: MA Experiment ID: 20000574 Result: Down-regulated in Transcription
  misc_feature: MA Experiment 20000574 PARAMETER Experiment Name: At_100uM_ABA_Mutants__P Parameter: Organism Value: A. thaliana
  misc_feature: MA Experiment 20000574 PARAMETER Experiment Name: At_100uM_ABA_Mutants__P Parameter: Plant Line Value: CS23 vs. Ler wt
  misc_feature: MA Experiment 20000574 PARAMETER Experiment Name: At_100uM_ABA_Mutants__P Parameter: Timepoint (hr) Value: N/A
  misc_feature: MA Experiment 20000574 PARAMETER Experiment Name: At_100uM_ABA_Mutants__P Parameter: Tissue Value: Whole Plant
  misc_feature: MA Experiment 20000574 PARAMETER Experiment Name: At_100uM_ABA_Mutants__P Parameter: Treatment Value: None
  misc_feature: MA Experiment ID: 20000794 Result: Down-regulated in Transcription
  misc_feature: MA Experiment 20000794 PARAMETER Experiment Name: At_Petals_P Parameter: Age (day) Value: 23-25 days
  misc_feature: MA Experiment 20000794 PARAMETER Experiment Name: At_Petals_P Parameter: Plant Line Value: WS
  misc_feature: MA Experiment 20000794 PARAMETER Experiment Name: At_Petals_P Parameter: Tissue Value: Petals vs. Whole plant
  misc_feature: MA Experiment ID: 20001554 Result: Up-regulated in Transcription
  misc_feature: MA Experiment 20001554 PARAMETER Experiment Name: At_Drought_Soil_Dry_P Parameter: Age (day) Value: 21
  misc_feature: MA Experiment 20001554 PARAMETER Experiment Name: At_Drought_Soil_Dry_P Parameter: Organism Value: A. thaliana
  misc_feature: MA Experiment 20001554 PARAMETER Experiment Name: At_Drought_Soil_Dry_P Parameter: Plant Line Value: WS
  misc_feature: MA Experiment 20001554 PARAMETER Experiment Name: At_Drought_Soil_Dry_P Parameter: Post Timepoint (hr) Value: None
  misc_feature: MA Experiment 20001554 PARAMETER Experiment Name: At_Drought_Soil_Dry_P Parameter: Post-Treatment Value: None
  misc_feature: MA Experiment 20001554 PARAMETER Experiment Name: At_Drought_Soil_Dry_P Parameter: Timepoint (day) Value: 7
  misc_feature: MA Experiment 20001554 PARAMETER Experiment Name: At_Drought_Soil_Dry_P Parameter: Treatment Value: Drought vs. No Drought
  misc_feature: MA Experiment ID: 20001555 Result: Up-regulated in Transcription
  misc_feature: MA Experiment 20001555 PARAMETER Experiment Name: At_Drought_Soil_Dry_P Parameter: Age (day) Value: 24
  misc_feature: MA Experiment 20001555 PARAMETER Experiment Name: At_Drought_Soil_Dry_P Parameter: Organism Value: A. thaliana
  misc_feature: MA Experiment 20001555 PARAMETER Experiment Name: At_Drought_Soil_Dry_P Parameter: Plant Line Value: WS
  misc_feature: MA Experiment 20001555 PARAMETER Experiment Name: At_Drought_Soil_Dry_P Parameter: Post Timepoint (hr) Value: None
  misc_feature: MA Experiment 20001555 PARAMETER Experiment Name: At_Drought_Soil_Dry_P Parameter: Post-Treatment Value: None
  misc_feature: MA Experiment 20001555 PARAMETER Experiment Name: At_Drought_Soil_Dry_P Parameter: Timepoint (day) Value: 10
  misc_feature: MA Experiment 20001555 PARAMETER Experiment Name: At_Drought_Soil_Dry_P Parameter: Treatment Value: Drought vs. No Drought
  misc_feature: MA Experiment ID: 20001557 Result: Down-regulated in Transcription
  misc_feature: MA Experiment 20001557 PARAMETER Experiment Name: At_Drought_Soil_Dry_P Parameter: Age (day) Value: 27
  misc_feature: MA Experiment 20001557 PARAMETER Experiment Name: At_Drought_Soil_Dry_P Parameter: Organism Value: A. thaliana
  misc_feature: MA Experiment 20001557 PARAMETER Experiment Name: At_Drought_Soil_Dry_P Parameter: Plant Line Value: WS
  misc_feature: MA Experiment 20001557 PARAMETER Experiment Name: At_Drought_Soil_Dry_P Parameter: Post Timepoint (hr) Value: 3
  misc_feature: MA Experiment 20001557 PARAMETER Experiment Name: At_Drought_Soil_Dry_P Parameter: Post-Treatment Value: Re-Water vs. No Drought
  misc_feature: MA Experiment 20001557 PARAMETER Experiment Name: At_Drought_Soil_Dry_P Parameter: Timepoint (day) Value: 13
  misc_feature: MA Experiment 20001557 PARAMETER Experiment Name: At_Drought_Soil_Dry_P Parameter: Treatment Value: Drought vs. No Drought
  misc_feature: MA Experiment ID: 20001558 Result: Down-regulated in Transcription
  misc_feature: MA Experiment 20001558 PARAMETER Experiment Name: At_Drought_Soil_Dry_P Parameter: Age (day) Value: 27
  misc_feature: MA Experiment 20001558 PARAMETER Experiment Name: At_Drought_Soil_Dry_P Parameter: Organism Value: A. thaliana
  misc_feature: MA Experiment 20001558 PARAMETER Experiment Name: At_Drought_Soil_Dry_P Parameter: Plant Line Value: WS
  misc_feature: MA Experiment 20001558 PARAMETER Experiment Name: At_Drought_Soil_Dry_P Parameter: Post Timepoint (hr) Value: 6
  misc_feature: MA Experiment 20001558 PARAMETER Experiment Name: At_Drought_Soil_Dry_P Parameter: Post-Treatment Value: Re-Water vs. No Drought
  misc_feature: MA Experiment 20001558 PARAMETER Experiment Name: At_Drought_Soil_Dry_P Parameter: Timepoint (day) Value: 13
  misc_feature: MA Experiment 20001558 PARAMETER Experiment Name: At_Drought_Soil_Dry_P Parameter: Treatment Value: Drought vs. No Drought
  misc_feature: MA Experiment ID: 20001560 Result: Down-regulated in Transcription
  misc_feature: MA Experiment 20001560 PARAMETER Experiment Name: At_Drought_Soil_Dry_P Parameter: Age (day) Value: 28
  misc_feature: MA Experiment 20001560 PARAMETER Experiment Name: At_Drought_Soil_Dry_P Parameter: Organism Value: A. thaliana
  misc_feature: MA Experiment 20001560 PARAMETER Experiment Name: At_Drought_Soil_Dry_P Parameter: Plant Line Value: WS
  misc_feature: MA Experiment 20001560 PARAMETER Experiment Name: At_Drought_Soil_Dry_P Parameter: Post Timepoint (hr) Value: None
  misc_feature: MA Experiment 20001560 PARAMETER Experiment Name: At_Drought_Soil_Dry_P Parameter: Post-Treatment Value: None
  misc_feature: MA Experiment 20001560 PARAMETER Experiment Name: At_Drought_Soil_Dry_P Parameter: Timepoint (day) Value: 14
  misc_feature: MA Experiment 20001560 PARAMETER Experiment Name: At_Drought_Soil_Dry_P Parameter: Treatment Value: Drought vs. No Drought
gtgtacaataccagccgacacttaacaattcacacctgctctttttactctttctaaaaccctaaattttctcgcttcagtcttcccactcaagtcaaccaccaattgaattcgatttcgaatcattgatggaaatgatttgaaaaaagagtaaagtttatttttttattccttgtaattttcagaaatgggggattccgacagggattccggtggagggcaaaacgggaacaaccagaacggacagtcctccttgtctccaagagagcaagacaggttcttgccgatcgctaacgtcagccggatcatgaagaaggccttgcccgccaacgccaagatctctaaagatgccaaagagacgatgcaggagtgtgtctccgagttcatcagcttcgtcaccggagaagcatctgataagtgtcagaaggagaagaggaagacgatcaacggagacgatttgctctgggctatgactactctaggttttgaggattatgttgagccattgaaagtttacttgcagaggtttagggagatcgaaggggagaggactggactagggaggccacagactggtggtgaggtcggagagcatcagagagatgctgtcggagatggcggtgggttctacggtggtggtggtgggatgcagtatcaccaacatcatcagtttcttcaccagcagaaccatatgtatggagccacaggtggcggtagcgacagtggaggtggagctgcctccggtaggacaaggacttaacaaagattggtgaagtggatctctctctgtatatagatacataaatacatgtatacacatgcctatttttacgacccatataaggtatctatcatgtgatagaacgaacattggtgttggtgatgtaaaatcagatgtgcattaagggtttagattttgaggctgtgtaaagaagatcaagtgtgcttgttgaacaataggattcactaacgaatctgcttcattgaatcttgtatgtaactaaagccattgtattgaatgcaaatgttttcatttgggatgcttt

SEQ ID NO: 48330 - protein, 190 aa, Arabidopsis thaliana
  peptide (1)..(190): Ceres Seq. ID no. 12670712
  misc_feature (19)..(149): Homolog of NCBI NO: 18404885 NR Description: putative CCAAT-binding transcription factor
  misc_feature (1)..(159): Homolog of NCBI NO: 17979253 NR Description: At2g37060/T2N18.18 [Arabidopsis thaliana]
  misc_feature (6)..(168): Homolog of NCBI NO: 30409461 NR Description: NF-YB [Oryza sativa (japonica cultivar-group)]
  misc_feature (4)..(139): Homolog of NCBI NO: 15231796 NR Description: transcription factor NF-Y, CCAAT-binding - like
  misc_feature (1)..(168): Homolog of NCBI NO: 115840 NR Description: CCAAT-BINDING TRANSCRIPTION FACTOR SUBUNIT A (NF-Y PROTEIN CHAIN B) (NF-YB) (CAAT-BOX DNA BINDING PROTEIN
  misc_feature (1)..(168): Homolog of NCBI NO: 22380 NR Description: CAAT-box DNA binding protein subunit B (NF-YB)
  misc_feature (1)..(164): Homolog of NCBI NO: 15233475 NR Description: CCAAT-binding transcription factor subunit
  misc_feature (68)..(190): Homolog of NCBI NO: 9965735 NR Description: transcription factor Hap3b [Arabidopsis thaliana]
  misc_feature (5)..(190): Homolog of NCBI NO: 2398529 NR Description: Transcription factor [Arabidopsis thaliana]
  misc_feature (1)..(190): Homolog of NCBI NO: 15238156 NR Description: putative protein
MGDSDRDSGGGQNGNNQNGQSSLSPREQDRFLPIANVSRIMKKALPANAKISKDAKETMQECVSEFISFVTGEASDKCQKEKRKTINGDDLLWAMTTLGFEDYVEPLKVYLQRFREIEGERTGLGRPQTGGEVGEHQRDAVGDGGGFYGGGGGMQYHQHHQFLHQQNHMYGATGGGSDSGGGAASGRTRT

SEQ ID NO: 48331 - protein, 150 aa, Arabidopsis thaliana
  peptide (1)..(150): Ceres Seq. ID no. 12670713
  misc_feature (1)..(109): Homolog of NCBI NO: 18404885 NR Description: putative CCAAT-binding transcription factor
  misc_feature (1)..(119): Homolog of NCBI NO: 17979253 NR Description: At2g37060/T2N18.18 [Arabidopsis thaliana]
  misc_feature (1)..(128): Homolog of NCBI NO: 30409461 NR Description: NF-YB [Oryza sativa (japonica cultivar-group)]
  misc_feature (1)..(99): Homolog of NCBI NO: 15231796 NR Description: transcription factor NF-Y, CCAAT-binding - like
  misc_feature (1)..(128): Homolog of NCBI NO: 115840 NR Description: CCAAT-BINDING TRANSCRIPTION FACTOR SUBUNIT A (NF-Y PROTEIN CHAIN B) (NF-YB) (CAAT-BOX DNA BINDING PROTEIN
  misc_feature (1)..(128): Homolog of NCBI NO: 22380 NR Description: CAAT-box DNA binding protein subunit B (NF-YB)
  misc_feature (1)..(124): Homolog of NCBI NO: 15233475 NR Description: CCAAT-binding transcription factor subunit
  misc_feature (28)..(150): Homolog of NCBI NO: 9965735 NR Description: transcription factor Hap3b [Arabidopsis thaliana]
  misc_feature (1)..(150): Homolog of NCBI NO: 2398529 NR Description: Transcription factor [Arabidopsis thaliana]
  misc_feature (1)..(150): Homolog of NCBI NO: 15238156 NR Description: putative protein
MKKALPANAKISKDAKETMQECVSEFISFVTGEASDKCQKEKRKTINGDDLLWAMTTLGFEDYVEPLKVYLQRFREIEGERTGLGRPQTGGEVGEHQRDAVGDGGGFYGGGGGMQYHQHHQFLHQQNHMYGATGGGSDSGGGAASGRTRT

SEQ ID NO: 48332 - protein, 132 aa, Arabidopsis thaliana
  peptide (1)..(132): Ceres Seq. ID no. 12670714
  misc_feature (1)..(91): Homolog of NCBI NO: 18404885 NR Description: putative CCAAT-binding transcription factor
  misc_feature (1)..(101): Homolog of NCBI NO: 17979253 NR Description: At2g37060/T2N18.18 [Arabidopsis thaliana]
  misc_feature (1)..(110): Homolog of NCBI NO: 30409461 NR Description: NF-YB [Oryza sativa (japonica cultivar-group)]
  misc_feature (1)..(81): Homolog of NCBI NO: 15231796 NR Description: transcription factor NF-Y, CCAAT-binding - like
  misc_feature (1)..(110): Homolog of NCBI NO: 115840 NR Description: CCAAT-BINDING TRANSCRIPTION FACTOR SUBUNIT A (NF-Y PROTEIN CHAIN B) (NF-YB) (CAAT-BOX DNA BINDING PROTEIN
  misc_feature (1)..(110): Homolog of NCBI NO: 22380 NR Description: CAAT-box DNA binding protein subunit B (NF-YB)
  misc_feature (1)..(106): Homolog of NCBI NO: 15233475 NR Description: CCAAT-binding transcription factor subunit
  misc_feature (10)..(132): Homolog of NCBI NO: 9965735 NR Description: transcription factor Hap3b [Arabidopsis thaliana]
  misc_feature (1)..(132): Homolog of NCBI NO: 2398529 NR Description: Transcription factor [Arabidopsis thaliana]
  misc_feature (1)..(132): Homolog of NCBI NO: 15238156 NR Description: putative protein
MQECVSEFISFVTGEASDKCQKEKRKTINGDDLLWAMTTLGFEDYVEPLKVYLQRFREIEGERTGLGRPQTGGEVGEHQRDAVGDGGGFYGGGGGMQYHQHHQFLHQQNHMYGATGGGSDSGGGAASGRTRT

SEQ ID NO: 48333 - DNA, 1754 bp, Arabidopsis thaliana; identical to SEQ ID NO: 47175
  misc_feature (1)..(1754): Ceres Seq. ID no. 13592461
  misc_feature: MA Experiment ID: 20000180 Result: Up-regulated in Transcription
  misc_feature: MA Experiment 20000180 PARAMETER Experiment Name: At_Germinating_Seeds_P Parameter: Age (hr) Value: 24 vs. 0
  misc_feature: MA Experiment 20000180 PARAMETER Experiment Name: At_Germinating_Seeds_P Parameter: Tissue Value: Germinating Seeds
  misc_feature: MA Experiment ID: 20000437 Result: Down-regulated in Transcription
  misc_feature: MA Experiment 20000437 PARAMETER Experiment Name: At_Drought_P Parameter: Age (day) Value: 8
  misc_feature: MA Experiment 20000437 PARAMETER Experiment Name: At_Drought_P Parameter: Organism Value: A. thaliana
  misc_feature: MA Experiment 20000437 PARAMETER Experiment Name: At_Drought_P Parameter: Plant Line Value: WS
  misc_feature: MA Experiment 20000437 PARAMETER Experiment Name: At_Drought_P Parameter: Timepoint (hr) Value: 24
  misc_feature: MA Experiment 20000437 PARAMETER Experiment Name: At_Drought_P Parameter: Tissue Value: Whole Plant
  misc_feature: MA Experiment 20000437 PARAMETER Experiment Name: At_Drought_P Parameter: Treatment Value: Drought vs. No Drought
  misc_feature: MA Experiment ID: 20001450 Result: Down-regulated in Transcription
  misc_feature: MA Experiment 20001450 PARAMETER Experiment Name: At_Far-red-induction_P Parameter: Age (day) Value: 7
  misc_feature: MA Experiment 20001450 PARAMETER Experiment Name: At_Far-red-induction_P Parameter: Light Value: Far-red vs. White
  misc_feature: MA Experiment 20001450 PARAMETER Experiment Name: At_Far-red-induction_P Parameter: Organism Value: A. thaliana
  misc_feature: MA Experiment 20001450 PARAMETER Experiment Name: At_Far-red-induction_P Parameter: Plant Line Value: Columbia
  misc_feature: MA Experiment 20001450 PARAMETER Experiment Name: At_Far-red-induction_P Parameter: Timepoint (hr) Value: 8
  misc_feature: MA Experiment 20001450 PARAMETER Experiment Name: At_Far-red-induction_P Parameter: Tissue Value: Whole Plant
  misc_feature: MA Experiment ID: 20001555 Result: Down-regulated in Transcription
  misc_feature: MA Experiment 20001555 PARAMETER Experiment Name: At_Drought_Soil_Dry_P Parameter: Age (day) Value: 24
  misc_feature: MA Experiment 20001555 PARAMETER Experiment Name: At_Drought_Soil_Dry_P Parameter: Organism Value: A. thaliana
  misc_feature: MA Experiment 20001555 PARAMETER Experiment Name: At_Drought_Soil_Dry_P Parameter: Plant Line Value: WS
  misc_feature: MA Experiment 20001555 PARAMETER Experiment Name: At_Drought_Soil_Dry_P Parameter: Post Timepoint (hr) Value: None
  misc_feature: MA Experiment 20001555 PARAMETER Experiment Name: At_Drought_Soil_Dry_P Parameter: Post-Treatment Value: None
  misc_feature: MA Experiment 20001555 PARAMETER Experiment Name: At_Drought_Soil_Dry_P Parameter: Timepoint (day) Value: 10
  misc_feature: MA Experiment 20001555 PARAMETER Experiment Name: At_Drought_Soil_Dry_P Parameter: Treatment Value: Drought vs. No Drought
  misc_feature: MA Experiment ID: 20001904 Result: Down-regulated in Transcription
  misc_feature: MA Experiment 20001904 PARAMETER Experiment Name: At_Drought_Reproduction_P Parameter: Age (day) Value: 37
  misc_feature: MA Experiment 20001904 PARAMETER Experiment Name: At_Drought_Reproduction_P Parameter: Organism Value: A. thaliana
  misc_feature: MA Experiment 20001904 PARAMETER Experiment Name: At_Drought_Reproduction_P Parameter: Plant Line Value: WS
  misc_feature: MA Experiment 20001904 PARAMETER Experiment Name: At_Drought_Reproduction_P Parameter: Timepoint (day) Value: 7
  misc_feature: MA Experiment 20001904 PARAMETER Experiment Name: At_Drought_Reproduction_P Parameter: Tissue Value: Rosettes
  misc_feature: MA Experiment 20001904 PARAMETER Experiment Name: At_Drought_Reproduction_P Parameter: Treatment Value: Drought vs. No Drought
  misc_feature: MA Experiment ID: 20001906 Result: Down-regulated in Transcription
  misc_feature: MA Experiment 20001906 PARAMETER Experiment Name: At_Drought_Reproduction_P Parameter: Age (day) Value: 35
  misc_feature: MA Experiment 20001906 PARAMETER Experiment Name: At_Drought_Reproduction_P Parameter: Organism Value: A. thaliana
  misc_feature: MA Experiment 20001906 PARAMETER Experiment Name: At_Drought_Reproduction_P Parameter: Plant Line Value: WS
  misc_feature: MA Experiment 20001906 PARAMETER Experiment Name: At_Drought_Reproduction_P Parameter: Timepoint (day) Value: 5
  misc_feature: MA Experiment 20001906 PARAMETER Experiment Name: At_Drought_Reproduction_P Parameter: Tissue Value: Siliques
  misc_feature: MA Experiment 20001906 PARAMETER Experiment Name: At_Drought_Reproduction_P Parameter: Treatment Value: Drought vs. No Drought

SEQ ID NO: 48334 - protein, 478 aa, Arabidopsis thaliana; identical to SEQ ID NO: 47176
  peptide (1)..(478): Ceres Seq. ID no. 13592462
  misc_feature (75)..(474): Pfam Name: Phosphoglycerate kinase Pfam Description: Phosphoglycerate kinase
  misc_feature (75)..(474): Pfam Name: Phosphoglycerate kinase Pfam Description: Phosphoglycerate kinase
  misc_feature (52)..(462): Homolog of NCBI NO: 282833 NR Description: phosphoglycerate kinase (EC 2.7.2.3) - spinach
  misc_feature (52)..(478): Homolog of NCBI NO: 1346698 NR Description: Phosphoglycerate kinase, chloroplast precursor
  misc_feature (80)..(478): Homolog of NCBI NO: 2129669 NR Description: phosphoglycerate kinase (EC 2.7.2.3) OBP44 -
  misc_feature (1)..(472): Homolog of NCBI NO: 129915 NR Description: Phosphoglycerate kinase, chloroplast precursor
  misc_feature (1)..(478): Homolog of NCBI NO: 7434544 NR Description: phosphoglycerate kinase (EC 2.7.2.3) precursor,
  misc_feature (52)..(462): Homolog of NCBI NO: 282833 NR Description: phosphoglycerate kinase (EC 2.7.2.3) - spinach
  misc_feature (80)..(478): Homolog of NCBI NO: 2129669 NR Description: phosphoglycerate kinase (EC 2.7.2.3) OBP44 -
  misc_feature (1)..(478): Homolog of NCBI NO: 7434544 NR Description: phosphoglycerate kinase (EC 2.7.2.3) precursor,
  misc_feature (1)..(478): Homolog of NCBI NO: 15223484 NR Description: phosphoglycerate kinase -related [Arabidopsis
  misc_feature (1)..(478): Homolog of NCBI NO: 12644295 NR Description: PHOSPHOGLYCERATE KINASE, CHLOROPLAST PRECURSOR
  misc_feature (1)..(478): Homolog of NCBI NO: 15230595 NR Description: phosphoglycerate kinase -related [Arabidopsis
  misc_feature (1)..(478): Homolog of NCBI NO: 3738261 NR Description: chloroplast phosphoglycerate kinase [Populus
  misc_feature (1)..(478): Homolog of NCBI NO: 2499497 NR Description: Phosphoglycerate kinase, chloroplast precursor
  misc_feature (1)..(472): Homolog of NCBI NO: 129915 NR Description: Phosphoglycerate kinase, chloroplast precursor
  misc_feature (52)..(478): Homolog of NCBI NO: 1346698 NR Description: Phosphoglycerate kinase, chloroplast precursor
  misc_feature (1)..(478): Homolog of NCBI NO: 2499497 NR Description: Phosphoglycerate kinase, chloroplast precursor
  misc_feature (1)..(478): Homolog of NCBI NO: 3738261 NR Description: chloroplast phosphoglycerate kinase [Populus
  misc_feature (1)..(478): Homolog of NCBI NO: 15230595 NR Description: phosphoglycerate kinase -related [Arabidopsis
  misc_feature (1)..(478): Homolog of NCBI NO: 12644295 NR Description: PHOSPHOGLYCERATE KINASE, CHLOROPLAST PRECURSOR
  misc_feature (1)..(478): Homolog of NCBI NO: 15223484 NR Description: phosphoglycerate kinase -related [Arabidopsis

SEQ ID NO: 48335 - protein, 405 aa, Arabidopsis thaliana; identical to SEQ ID NO: 47177
  peptide (1)..(405): Ceres Seq. ID no. 13592463
  misc_feature (2)..(401): Pfam Name: Phosphoglycerate kinase Pfam Description: Phosphoglycerate kinase
  misc_feature (2)..(401): Pfam Name: Phosphoglycerate kinase Pfam Description: Phosphoglycerate kinase
  misc_feature (1)..(389): Homolog of NCBI NO: 282833 NR Description: phosphoglycerate kinase (EC 2.7.2.3) - spinach
  misc_feature (1)..(405): Homolog of NCBI NO: 1346698 NR Description: Phosphoglycerate kinase, chloroplast precursor
  misc_feature (7)..(405): Homolog of NCBI NO: 2129669 NR Description: phosphoglycerate kinase (EC 2.7.2.3) OBP44 -
  misc_feature (1)..(399): Homolog of NCBI NO: 129915 NR Description: Phosphoglycerate kinase, chloroplast precursor
  misc_feature (1)..(405): Homolog of NCBI NO: 7434544 NR Description: phosphoglycerate kinase (EC 2.7.2.3) precursor,
  misc_feature (1)..(389): Homolog of NCBI NO: 282833 NR Description: phosphoglycerate kinase (EC 2.7.2.3) - spinach
  misc_feature (7)..(405): Homolog of NCBI NO: 2129669 NR Description: phosphoglycerate kinase (EC 2.7.2.3) OBP44 -
  misc_feature (1)..(405): Homolog of NCBI NO: 7434544 NR Description: phosphoglycerate kinase (EC 2.7.2.3) precursor,
  misc_feature (1)..(405): Homolog of NCBI NO: 15223484 NR Description: phosphoglycerate kinase -related [Arabidopsis
  misc_feature (1)..(405): Homolog of NCBI NO: 12644295 NR Description: PHOSPHOGLYCERATE KINASE, CHLOROPLAST PRECURSOR
  misc_feature (1)..(405): Homolog of NCBI NO: 15230595 NR Description: phosphoglycerate kinase -related [Arabidopsis
  misc_feature (1)..(405): Homolog of NCBI NO: 3738261 NR Description: chloroplast phosphoglycerate kinase [Populus
  misc_feature (1)..(405): Homolog of NCBI NO: 2499497 NR Description: Phosphoglycerate kinase, chloroplast precursor
  misc_feature (1)..(399): Homolog of NCBI NO: 129915 NR Description: Phosphoglycerate kinase, chloroplast precursor
  misc_feature (1)..(405): Homolog of NCBI NO: 1346698 NR Description: Phosphoglycerate kinase, chloroplast precursor
  misc_feature (1)..(405): Homolog of NCBI NO: 2499497 NR Description: Phosphoglycerate kinase, chloroplast precursor
  misc_feature (1)..(405): Homolog of NCBI NO: 3738261 NR Description: chloroplast phosphoglycerate kinase [Populus
  misc_feature (1)..(405): Homolog of NCBI NO: 15230595 NR Description: phosphoglycerate kinase -related [Arabidopsis
  misc_feature (1)..(405): Homolog of NCBI NO: 12644295 NR Description: PHOSPHOGLYCERATE KINASE, CHLOROPLAST PRECURSOR
  misc_feature (1)..(405): Homolog of NCBI NO: 15223484 NR Description: phosphoglycerate kinase -related [Arabidopsis

SEQ ID NO: 48336 - DNA, 1753 bp, Arabidopsis thaliana
  misc_feature (1)..(1753): Ceres Seq. ID no. 13649992
  misc_feature: MA Experiment ID: 20000184 Result: Down-regulated in Transcription
  misc_feature: MA Experiment 20000184 PARAMETER Experiment Name: At_Shoots__P Parameter: Age (day) Value: 7
  misc_feature: MA Experiment 20000184 PARAMETER Experiment Name: At_Shoots__P Parameter: Tissue Value: Shoots vs. Whole Plant
  misc_feature: MA Experiment ID: 20000185 Result: Up-regulated in Transcription
  misc_feature: MA Experiment 20000185 PARAMETER Experiment Name: At_Roots__P Parameter: Age (day) Value: 7 vs. 21
  misc_feature: MA Experiment 20000185 PARAMETER Experiment Name: At_Roots__P Parameter: Organism Value: A. thaliana
  misc_feature: MA Experiment 20000185 PARAMETER Experiment Name: At_Roots__P Parameter: Tissue Value: Roots vs. Whole Plant
  misc_feature: MA Experiment ID: 20000265 Result: Down-regulated in Transcription
  misc_feature: MA Experiment 20000265 PARAMETER Experiment Name: At_Open_Flower_P Parameter: Age (day) Value: 21
  misc_feature: MA Experiment 20000265 PARAMETER Experiment Name: At_Open_Flower_P Parameter: Plant Line Value: WS
  misc_feature: MA Experiment 20000265 PARAMETER Experiment Name: At_Open_Flower_P Parameter: Tissue Value: Closed Flower vs. Whole Plant
  misc_feature: MA Experiment ID: 20000437 Result: Up-regulated in Transcription
  misc_feature: MA Experiment 20000437 PARAMETER Experiment Name: At_Drought_P Parameter: Age (day) Value: 8
  misc_feature: MA Experiment 20000437 PARAMETER Experiment Name: At_Drought_P Parameter: Organism Value: A. thaliana
  misc_feature: MA Experiment 20000437 PARAMETER Experiment Name: At_Drought_P Parameter: Plant Line Value: WS
  misc_feature: MA Experiment 20000437 PARAMETER Experiment Name: At_Drought_P Parameter: Timepoint (hr) Value: 24
  misc_feature: MA Experiment 20000437 PARAMETER Experiment Name: At_Drought_P Parameter: Tissue Value: Whole Plant
  misc_feature: MA Experiment 20000437 PARAMETER Experiment Name: At_Drought_P Parameter: Treatment Value: Drought vs. No Drought
  misc_feature: MA Experiment ID: 20000438 Result: Down-regulated in Transcription
  misc_feature: MA Experiment 20000438 PARAMETER Experiment Name: At_Shoots__P Parameter: Age (day) Value: 14
  misc_feature: MA Experiment 20000438 PARAMETER Experiment Name: At_Shoots__P Parameter: Tissue Value: Shoots vs. Whole Plant
  misc_feature: MA Experiment ID: 20000439 Result: Up-regulated in Transcription
  misc_feature: MA Experiment 20000439 PARAMETER Experiment Name: At_Roots__P Parameter: Age (day) Value: 14 vs. 21
  misc_feature: MA Experiment 20000439 PARAMETER Experiment Name: At_Roots__P Parameter: Organism Value: A. thaliana
  misc_feature: MA Experiment 20000439 PARAMETER Experiment Name: At_Roots__P Parameter: Tissue Value: Roots vs. Whole Plant
  misc_feature: MA Experiment ID: 20001247 Result: Up-regulated in Transcription
  misc_feature: MA Experiment 20001247 PARAMETER Experiment Name: At_Far-red-induction_P Parameter: Age (day) Value: 7
  misc_feature: MA Experiment 20001247 PARAMETER Experiment Name: At_Far-red-induction_P Parameter: Light Value: Far-red vs. White
  misc_feature: MA Experiment 20001247 PARAMETER Experiment Name: At_Far-red-induction_P Parameter: Organism Value: A. thaliana
  misc_feature: MA Experiment 20001247 PARAMETER Experiment Name: At_Far-red-induction_P Parameter: Plant Line Value: Columbia
  misc_feature: MA Experiment 20001247 PARAMETER Experiment Name: At_Far-red-induction_P Parameter: Timepoint (hr) Value: 1
  misc_feature: MA Experiment 20001247 PARAMETER Experiment Name: At_Far-red-induction_P Parameter: Tissue Value: Whole Plant
  misc_feature: MA Experiment ID: 20001451 Result: Up-regulated in Transcription
  misc_feature: MA Experiment 20001451 PARAMETER Experiment Name: At_Far-red-induction_P Parameter: Age (day) Value: 7
  misc_feature: MA Experiment 20001451 PARAMETER Experiment Name: At_Far-red-induction_P Parameter: Light Value: Far-red vs. White
  misc_feature: MA Experiment 20001451 PARAMETER Experiment Name: At_Far-red-induction_P Parameter: Organism Value: A. thaliana
  misc_feature: MA Experiment 20001451 PARAMETER Experiment Name: At_Far-red-induction_P Parameter: Plant Line Value: Columbia
  misc_feature: MA Experiment 20001451 PARAMETER Experiment Name: At_Far-red-induction_P Parameter: Timepoint (hr) Value: 24
  misc_feature: MA Experiment 20001451 PARAMETER Experiment Name: At_Far-red-induction_P Parameter: Tissue Value: Whole Plant
  misc_feature: MA Experiment ID: 20001904 Result: Up-regulated in Transcription
  misc_feature: MA Experiment 20001904 PARAMETER Experiment Name: At_Drought_Reproduction_P Parameter: Age (day) Value: 37
  misc_feature: MA Experiment 20001904 PARAMETER Experiment Name: At_Drought_Reproduction_P Parameter: Organism Value: A. thaliana
  misc_feature: MA Experiment 20001904 PARAMETER Experiment Name: At_Drought_Reproduction_P Parameter: Plant Line Value: WS
  misc_feature: MA Experiment 20001904 PARAMETER Experiment Name: At_Drought_Reproduction_P Parameter: Timepoint (day) Value: 7
  misc_feature: MA Experiment 20001904 PARAMETER Experiment Name: At_Drought_Reproduction_P Parameter: Tissue Value: Rosettes
  misc_feature: MA Experiment 20001904 PARAMETER Experiment Name: At_Drought_Reproduction_P Parameter: Treatment Value: Drought vs. No Drought
  misc_feature: MA Experiment ID: 20001905 Result: Up-regulated in Transcription
  misc_feature: MA Experiment 20001905 PARAMETER Experiment Name: At_Drought_Reproduction_P Parameter: Age (day) Value: 40
  misc_feature: MA Experiment 20001905 PARAMETER Experiment Name: At_Drought_Reproduction_P Parameter: Organism Value: A. thaliana
  misc_feature: MA Experiment 20001905 PARAMETER Experiment Name: At_Drought_Reproduction_P Parameter: Plant Line Value: WS
  misc_feature: MA Experiment 20001905 PARAMETER Experiment Name: At_Drought_Reproduction_P Parameter: Timepoint (day) Value: 10
  misc_feature: MA Experiment 20001905 PARAMETER Experiment Name: At_Drought_Reproduction_P Parameter: Tissue Value: Rosettes
  misc_feature: MA Experiment 20001905 PARAMETER Experiment Name: At_Drought_Reproduction_P Parameter: Treatment Value: Drought vs. No Drought
  misc_feature: MA Experiment ID: 20001906 Result: Up-regulated in Transcription
  misc_feature: MA Experiment 20001906 PARAMETER Experiment Name: At_Drought_Reproduction_P Parameter: Age (day) Value: 35
  misc_feature: MA Experiment 20001906 PARAMETER Experiment Name: At_Drought_Reproduction_P Parameter: Organism Value: A. thaliana
  misc_feature: MA Experiment 20001906 PARAMETER Experiment Name: At_Drought_Reproduction_P Parameter: Plant Line Value: WS
  misc_feature: MA Experiment 20001906 PARAMETER Experiment Name: At_Drought_Reproduction_P Parameter: Timepoint (day) Value: 5
  misc_feature: MA Experiment 20001906 PARAMETER Experiment Name: At_Drought_Reproduction_P Parameter: Tissue Value: Siliques
  misc_feature: MA Experiment 20001906 PARAMETER Experiment Name: At_Drought_Reproduction_P Parameter: Treatment Value: Drought vs. No Drought
  misc_feature: MA Experiment ID: 20001911 Result: Up-regulated in Transcription
  misc_feature: MA Experiment 20001911 PARAMETER Experiment Name: At_Drought_Reproduction_P Parameter: Age (day) Value: 40
  misc_feature: MA Experiment 20001911 PARAMETER Experiment Name: At_Drought_Reproduction_P Parameter: Organism Value: A. thaliana
  misc_feature: MA Experiment 20001911 PARAMETER Experiment Name: At_Drought_Reproduction_P Parameter: Plant Line Value: WS
  misc_feature: MA Experiment 20001911 PARAMETER Experiment Name: At_Drought_Reproduction_P Parameter: Timepoint (day) Value: 10
  misc_feature: MA Experiment 20001911 PARAMETER Experiment Name: At_Drought_Reproduction_P Parameter: Tissue Value: Flowers
  misc_feature: MA Experiment 20001911 PARAMETER Experiment Name: At_Drought_Reproduction_P Parameter: Treatment Value: Drought vs. No Drought
atcttttttcaatagtctcatgattgtctcttgtgtgtttccagctttcccatagggtccattgatttttgcagccatggattatgatctgcttcgttccaagaagagtatcaaacgcgtagaatccaccaaatcaaatccatggtggtgggatagtcatatcggtctcaaaaattctaagtggcttgagaataatctcgatgagatggaccggagcgtgaaacggatggtgaagttgatagaggaggatgcagattcttttgctaagaaggcagagatgtattaccagtcaagacctgagcttattgctcttgtggatgagtttcaccgtatgtaccgtgctttggcagagcggtacgagaacatcaccggagagttgagaaaaggctctcctttagagcttcagtcacagggctctggtctttctgacatctctgcttctgacctctctgctttatggacctctaatgaggttaataggttaggtcgtcctccttctggtcgacgtgctcctggttttgaatacttccttggcaatggaggacttccttctgatctttatcacaaagatggagatgattctgcttccattactgattctgaacttgaatctgatgattcttctgtgactaattaccctggttatgtgagtataggctctgactttcagtccctaagcaagaggatcatggatcttgagattgagctacgtgaagccaaagaaagacttaggatgcaacttgaagggaacactgagagcttgttgccgagggtgaaaagtgagactaaatttgttgatttcccggcaaaacttgctgcttgtgagcaagaactgaaagatgtaaatgagaagttacagaattcagaagaccaaatctatattttaaagagtcagcttgctagatacttgccatctgggttggatgatgaacagagcgaaggggcagcttcaactcaagaactggacattgagactttgtctgaagagctgagaattacaagcctgaggcttcgggaggcagaaaaacaaaacggtatcatgagaaaagaagtcgagaaaagcaagtctgatgatgcaaaactcaagagtctgcaagacatgcttgagtcggcacagaaagaagctgcagcatggaaaagcaaggctagtgcagataaaagagaggtggtgaagctgcttgatagaatctcaatgttgaagtcgagtttagcaggtagagatcatgagatcagggatttaaagacagcattgtctgacgcagaagagaagattttcccggagaaagcacaggtcaaagccgatatagcaaagctgttggaagaaaaaatacaccgggatgaccaattcaaagagctggaagccaatgtgcgttatcttgaagatgagagaagaaaggtgaacaatgagaaaatagaagaggaggaaaagctgaagagcgaaatcgaggtgctgacactggaaaaggtagagaaagggagatgcatagagacgttaagcagaaaggtgagtgagctagagtcggagataagtcgacttggaagtgaaataaaagcgagagacgataggactatggagatggagaaggaggtggagaagcagaggagggaactagaagaagtagcagaagagaagagggaagtgataagacagctctgtttttcactagactactccagagacgaatacaagagactacgcatagccttttcagggcatccaccaacaagaccatcatccattcttgcttcttaa

SEQ ID NO: 48337 - protein, 558 aa, Arabidopsis thaliana
  peptide (1)..(558): Ceres Seq. ID no. 13649993
  misc_feature (194)..(539): Pfam Name: Myosin tail Pfam Description: Myosin tail
  misc_feature (19)..(539): Homolog of NCBI NO: 22002966 NR Description: putative CENP-E like kinetochore protein
  misc_feature (9)..(420): Homolog of NCBI NO: 34896152 NR Description: P0701D05.31 [Oryza sativa (japonica
  misc_feature (7)..(465): Homolog of NCBI NO: 28416683 NR Description: At2g30500 [Arabidopsis thaliana]
  misc_feature (7)..(465): Homolog of NCBI NO: 15224515 NR Description: expressed protein [Arabidopsis thaliana]
  misc_feature (10)..(517): Homolog of NCBI NO: 34896156 NR Description: P0701D05.33 [Oryza sativa (japonica
  misc_feature (163)..(551): Homolog of NCBI NO: 28416683 NR Description: At2g30500 [Arabidopsis thaliana]
  misc_feature (163)..(551): Homolog of NCBI NO: 15224515 NR Description: expressed protein [Arabidopsis thaliana]
  misc_feature (1)..(488): Homolog of NCBI NO: 30697043 NR Description: contains similarity to unknown protein
  misc_feature (1)..(558): Homolog of NCBI NO: 8777333 NR Description: contains similarity to unknown
  misc_feature (1)..(558): Homolog of NCBI NO: 30697046 NR Description: contains similarity to unknown protein
MDYDLLRSKKSIKRVESTKSNPWWWDSHIGLKNSKWLENNLDEMDRSVKRMVKLIEEDADSFAKKAEMYYQSRPELIALVDEFHRMYRALAERYENITGELRKGSPLELQSQGSGLSDISASDLSALWTSNEVNRLGRPPSGRRAPGFEYFLGNGGLPSDLYHKDGDDSASITDSELESDDSSVTNYPGYVSIGSDFQSLSKRIMDLEIELREAKERLRMQLEGNTESLLPRVKSETKFVDFPAKLAACEQELKDVNEKLQNSEDQIYILKSQLARYLPSGLDDEQSEGAASTQELDIETLSEELRITSLRLREAEKQNGIMRKEVEKSKSDDAKLKSLQDMLESAQKEAAAWKSKASADKREVVKLLDRISMLKSSLAGRDHEIRDLKTALSDAEEKIFPEKAQVKADIAKLLEEKIHRDDQFKELEANVRYLEDERRKVNNEKIEEEEKLKSEIEVLTLEKVEKGRCIETLSRKVSELESEISRLGSEIKARDDRTMEMEKEVEKQRRELEEVAEEKREVIRQLCFSLDYSRDEYKRLRIAFSGHPPTRPSSILAS

SEQ ID NO: 48338 - protein, 515 aa, Arabidopsis thaliana
  peptide (1)..(515): Ceres Seq. ID no. 13649994
  misc_feature (151)..(496): Pfam Name: Myosin tail Pfam Description: Myosin tail
  misc_feature (1)..(496): Homolog of NCBI NO: 22002966 NR Description: putative CENP-E like kinetochore protein
  misc_feature (1)..(377): Homolog of NCBI NO: 34896152 NR Description: P0701D05.31 [Oryza sativa (japonica
  misc_feature (1)..(422): Homolog of NCBI NO: 28416683 NR Description: At2g30500 [Arabidopsis thaliana]
  misc_feature (1)..(422): Homolog of NCBI NO: 15224515 NR Description: expressed protein [Arabidopsis thaliana]
  misc_feature (1)..(474): Homolog of NCBI NO: 34896156 NR Description: P0701D05.33 [Oryza sativa (japonica
  misc_feature (120)..(508): Homolog of NCBI NO: 28416683 NR Description: At2g30500 [Arabidopsis thaliana]
  misc_feature (120)..(508): Homolog of NCBI NO: 15224515 NR Description: expressed protein [Arabidopsis thaliana]
  misc_feature (1)..(445): Homolog of NCBI NO: 30697043 NR Description: contains similarity to unknown protein
  misc_feature (1)..(515): Homolog of NCBI NO: 8777333 NR Description: contains similarity to unknown
  misc_feature (1)..(515): Homolog of NCBI NO: 30697046 NR Description: contains similarity to unknown protein
MDRSVKRMVKLIEEDADSFAKKAEMYYQSRPELIALVDEFHRMYRALAERYENITGELRKGSPLELQSQGSGLSDISASDLSALWTSNEVNRLGRPPSGRRAPGFEYFLGNGGLPSDLYHKDGDDSASITDSELESDDSSVTNYPGYVSIGSDFQSLSKRIMDLEIELREAKERLRMQLEGNTESLLPRVKSETKFVDFPAKLAACEQELKDVNEKLQNSEDQIYILKSQLARYLPSGLDDEQSEGAASTQELDIETLSEELRITSLRLREAEKQNGIMRKEVEKSKSDDAKLKSLQDMLESAQKEAAAWKSKASADKREVVKLLDRISMLKSSLAGRDHEIRDLKTALSDAEEKIFPEKAQVKADIAKLLEEKIHRDDQFKELEANVRYLEDERRKVNNEKIEEEEKLKSEIEVLTLEKVEKGRCIETLSRKVSELESEISRLGSEIKARDDRTMEMEKEVEKQRRELEEVAEEKREVIRQLCFSLDYSRDEYKRLRIAFSGHPPTRPSSILAS

SEQ ID NO: 48339 - protein, 508 aa, Arabidopsis thaliana
  peptide (1)..(508): Ceres Seq. ID no. 13649995
  misc_feature (144)..(489): Pfam Name: Myosin tail Pfam Description: Myosin tail
  misc_feature (1)..(489): Homolog of NCBI NO: 22002966 NR Description: putative CENP-E like kinetochore protein
  misc_feature (1)..(370): Homolog of NCBI NO: 34896152 NR Description: P0701D05.31 [Oryza sativa (japonica
  misc_feature (1)..(415): Homolog of NCBI NO: 28416683 NR Description: At2g30500 [Arabidopsis thaliana]
  misc_feature (1)..(415): Homolog of NCBI NO: 15224515 NR Description: expressed protein [Arabidopsis thaliana]
  misc_feature (1)..(467): Homolog of NCBI NO: 34896156 NR Description: P0701D05.33 [Oryza sativa (japonica
  misc_feature (113)..(501): Homolog of NCBI NO: 28416683 NR Description: At2g30500 [Arabidopsis thaliana]
  misc_feature (113)..(501): Homolog of NCBI NO: 15224515 NR Description: expressed protein [Arabidopsis thaliana]
  misc_feature (1)..(438): Homolog of NCBI NO: 30697043 NR Description: contains similarity to unknown protein
  misc_feature (1)..(508): Homolog of NCBI NO: 8777333 NR Description: contains similarity to unknown
  misc_feature (1)..(508): Homolog of NCBI NO: 30697046 NR Description: contains similarity to unknown protein
MVKLIEEDADSFAKKAEMYYQSRPELIALVDEFHRMYRALAERYENITGELRKGSPLELQSQGSGLSDISASDLSALWTSNEVNRLGRPPSGRRAPGFEYFLGNGGLPSDLYHKDGDDSASITDSELESDDSSVTNYPGYVSIGSDFQSLSKRIMDLEIELREAKERLRMQLEGNTESLLPRVKSETKFVDFPAKLAACEQELKDVNEKLQNSEDQIYILKSQLARYLPSGLDDEQSEGAASTQELDIETLSEELRITSLRLREAEKQNGIMRKEVEKSKSDDAKLKSLQDMLESAQKEAAAWKSKASADKREVVKLLDRISMLKSSLAGRDHEIRDLKTALSDAEEKIFPEKAQVKADIAKLLEEKIHRDDQFKELEANVRYLEDERRKVNNEKIEEEEKLKSEIEVLTLEKVEKGRCIETLSRKVSELESEISRLGSEIKARDDRTMEMEKEVEKQRRELEEVAEEKREVIRQLCFSLDYSRDEYKRLRIAFSGHPPTRPSSILAS

SEQ ID NO: 48340 - DNA, 1153 bp, Arabidopsis thaliana
  misc_feature (1)..(1153): Ceres Seq. ID no. 13649996
  misc_feature: MA Experiment ID: 20000184 Result: Up-regulated in Transcription
  misc_feature: MA Experiment 20000184 PARAMETER Experiment Name: At_Shoots__P Parameter: Age (day) Value: 7
  misc_feature: MA Experiment 20000184 PARAMETER Experiment Name: At_Shoots__P Parameter: Tissue Value: Shoots vs. Whole Plant
gactacctctctcttctctctctactcacacacaaacacatttcctttgccgtgttcttcttgcaacttcctctgttctgtttcataacatcttcttctgatctttgcaatggcagtgtctgggttcgagggtttcgagaaaagactcgaacttcggttcttcgacgatgacaaaccaatcaccaaaaaccctatgggactccgtctaatagacttcgaatctttagaccaagtcttaaacgaagtgcagtgcacagtggtctccgccgtagcgaatcgtagcttcgacgcttacgttctctcagagtcaagcctctttgtatacccaaccaaaatcatcatcaaaacatgtggaaccacgcaactcctcaaatcaatccgaccgttgatccatctcgcacgtaacctcggcctcacgttacgcgcgtgtcgctactcgcgtggcagcttcatcttccctaaagctcagcctttcccttacacaagcttcaaagacgaagtcatcgtcgtcgaagaaagcctcccaaaatctctctgttaccgcaaagcctctgttatgacgccttctaataacccatcacgtgcttggcacgtgttcaccgcaagcgctgacgtggaatccgacgaacatgtcgtcgtagtcgaagtatgtatgacggagctggaccgagtcaacgctcgaagcttctttaaacggaaaggtgacgagaaaaacaacagcgattccgccgggaaagagatgacgcggctcagtggtatcgataacataaacgcaaacgcttatatatgcgatttcgcgtttgatccttgcggttactcgatgaacggcgtcgacggtgaccgttactcaactatccacgtaacgcctgaagacggttttagctacgcgagcttcgagtgtggtttgtctctctacgacaacggtcacgaagatatctctgaggtgttaagccgggccattgatgttttccgtccaagtgacgtctcgatcgccaccacttacggcggcgaagattacaaccacgaggtgactaagcgcgtggagcgtgtgttagctaagaagcttgatcttaagtgtcggagccgtcttatggatgagtttccaggctccggaaccgtcgtttatcagtccttcacgcctcgtcggaaatag

SEQ ID NO: 48341 - protein, 347 aa, Arabidopsis thaliana
  peptide (1)..(347): Ceres Seq. ID no. 13649997
  misc_feature (1)..(342): Pfam Name: Adenosylmethionine decarboxylase Pfam Description: Adenosylmethionine decarboxylase
  misc_feature (5)..(342): Homolog of NCBI NO: 3913427 NR Description: S-adenosylmethionine decarboxylase proenzyme
  misc_feature (1)..(342): Homolog of NCBI NO: 15237226 NR Description: S-adenosylmethionine decarboxylase (adoMetDC2)
  misc_feature (5)..(343): Homolog of NCBI NO: 6646868 NR Description: S-adenosylmethionine decarboxylase 2
  misc_feature (1)..(342): Homolog of NCBI NO: 1490554 NR Description: S-adenosylmethionine decarboxylase [Arabidopsis
  misc_feature (1)..(342): Homolog of NCBI NO: 15230853 NR Description: S-adenosylmethionine decarboxylase -related
  misc_feature (1)..(342): Homolog of NCBI NO: 1531763 NR Description: S-adenosylmethionine decarboxylase [Arabidopsis
  misc_feature (1)..(342): Homolog of NCBI NO: 15809836 NR Description: AT3g02470/F16B3_10 [Arabidopsis thaliana]
  misc_feature (1)..(342): Homolog of NCBI NO: 15213968 NR Description: S-adenosylmethionine decarboxylase proenzyme 3
  misc_feature (1)..(342): Homolog of NCBI NO: 15232910 NR Description: S-adenosylmethionine decarboxylase [Arabidopsis
  misc_feature (1)..(347): Homolog of NCBI NO: 15239612 NR Description: S-adenosyl-L-methionine decarboxylase - like
MAVSGFEGFEKRLELRFFDDDKPITKNPMGLRLIDFESLDQVLNEVQCTVVSAVANRSFDAYVLSESSLFVYPTKIIIKTCGTTQLLKSIRPLIHLARNLGLTLRACRYSRGSFIFPKAQPFPYTSFKDEVIVVEESLPKSLCYRKASVMTPSNNPSRAWHVFTASADVESDEHVVVVEVCMTELDRVNARSFFKRKGDEKNNSDSAGKEMTRLSGIDNINANAYICDFAFDPCGYSMNGVDGDRYSTIHVTPEDGFSYASFECGLSLYDNGHEDISEVLSRAIDVFRPSDVSIATTYGGEDYNHEVTKRVERVLAKKLDLKCRSRLMDEFPGSGTVVYQSFTPRRK

SEQ ID NO: 48342 - protein, 319 aa, Arabidopsis thaliana
  peptide (1)..(319): Ceres Seq. ID no. 13649998
  misc_feature (1)..(314): Pfam Name: Adenosylmethionine decarboxylase Pfam Description: Adenosylmethionine decarboxylase
  misc_feature (1)..(314): Homolog of NCBI NO: 3913427 NR Description: S-adenosylmethionine decarboxylase proenzyme
  misc_feature (1)..(314): Homolog of NCBI NO: 15237226 NR Description: S-adenosylmethionine decarboxylase (adoMetDC2)
  misc_feature (1)..(315): Homolog of NCBI NO: 6646868 NR Description: S-adenosylmethionine decarboxylase 2
  misc_feature (1)..(314): Homolog of NCBI NO: 1490554 NR Description: S-adenosylmethionine decarboxylase [Arabidopsis
  misc_feature (1)..(314): Homolog of NCBI NO: 15230853 NR Description: S-adenosylmethionine decarboxylase -related
  misc_feature (1)..(314): Homolog of NCBI NO: 1531763 NR Description: S-adenosylmethionine decarboxylase [Arabidopsis
  misc_feature (1)..(314): Homolog of NCBI NO: 15809836 NR Description: AT3g02470/F16B3_10 [Arabidopsis thaliana]
  misc_feature (1)..(314): Homolog of NCBI NO: 15213968 NR Description: S-adenosylmethionine decarboxylase proenzyme 3
  misc_feature (1)..(314): Homolog of NCBI NO: 15232910 NR Description: S-adenosylmethionine decarboxylase [Arabidopsis
  misc_feature (1)..(319): Homolog of NCBI NO: 15239612 NR Description: S-adenosyl-L-methionine decarboxylase - like
MGLRLIDFESLDQVLNEVQCTVVSAVANRSFDAYVLSESSLFVYPTKIIIKTCGTTQLLKSIRPLIHLARNLGLTLRACRYSRGSFIFPKAQPFPYTSFKDEVIVVEESLPKSLCYRKASVMTPSNNPSRAWHVFTASADVESDEHVVVVEVCMTELDRVNARSFFKRKGDEKNNSDSAGKEMTRLSGIDNINANAYICDFAFDPCGYSMNGVDGDRYSTIHVTPEDGFSYASFECGLSLYDNGHEDISEVLSRAIDVFRPSDVSIATTYGGEDYNHEVTKRVERVLAKKLDLKCRSRLMDEFPGSGTVVYQSFTPRRK

SEQ ID NO: 48343 - protein, 198 aa, Arabidopsis thaliana
  peptide (1)..(198): Ceres Seq. ID no. 13649999
  misc_feature (1)..(193): Pfam Name: Adenosylmethionine decarboxylase Pfam Description: Adenosylmethionine decarboxylase
  misc_feature (1)..(193): Homolog of NCBI NO: 3913427 NR Description: S-adenosylmethionine decarboxylase proenzyme
  misc_feature (1)..(193): Homolog of NCBI NO: 15237226 NR Description: S-adenosylmethionine decarboxylase (adoMetDC2)
  misc_feature (1)..(194): Homolog of NCBI NO: 6646868 NR Description: S-adenosylmethionine decarboxylase 2
  misc_feature (1)..(193): Homolog of NCBI NO: 1490554 NR Description: S-adenosylmethionine decarboxylase [Arabidopsis
  misc_feature (1)..(193): Homolog of NCBI NO: 15230853 NR Description: S-adenosylmethionine decarboxylase -related
  misc_feature (1)..(193): Homolog of NCBI NO: 1531763 NR Description: S-adenosylmethionine decarboxylase [Arabidopsis
  misc_feature (1)..(193): Homolog of NCBI NO: 15809836 NR Description: AT3g02470/F16B3_10 [Arabidopsis thaliana]
  misc_feature (1)..(193): Homolog of NCBI NO: 15213968 NR Description: S-adenosylmethionine decarboxylase proenzyme 3
  misc_feature (1)..(193): Homolog of NCBI NO: 15232910 NR Description: S-adenosylmethionine decarboxylase [Arabidopsis
  misc_feature (1)..(198): Homolog of NCBI NO: 15239612 NR Description: S-adenosyl-L-methionine decarboxylase - like
MTPSNNPSRAWHVFTASADVESDEHVVVVEVCMTELDRVNARSFFKRKGDEKNNSDSAGKEMTRLSGIDNINANAYICDFAFDPCGYSMNGVDGDRYSTIHVTPEDGFSYASFECGLSLYDNGHEDISEVLSRAIDVFRPSDVSIATTYGGEDYNHEVTKRVERVLAKKLDLKCRSRLMDEFPGSGTVVYQSFTPRRK

SEQ ID NO: 48344 - DNA, 2532 bp, Arabidopsis thaliana; identical to SEQ ID NO: 39469
  misc_feature (1)..(2532): Ceres Seq. ID no. 13504839
  misc_feature: MA Experiment ID: 108434 Result: Down-regulated in Transcription
  misc_feature: MA Experiment 108434 PARAMETER Experiment Name: At_Root_Tips_cDNA_P Parameter: Tissue Value: Root Tips
  misc_feature: MA Experiment ID: 108461 Result: Down-regulated in Transcription
  misc_feature: MA Experiment 108461 PARAMETER Experiment Name: At_Germinating_Seeds_cDNA_P Parameter: Age (day) Value: 1 vs. 0
  misc_feature: MA Experiment 108461 PARAMETER Experiment Name: At_Germinating_Seeds_cDNA_P Parameter: Tissue Value: Germinating Seeds
  misc_feature: MA Experiment ID: 108462 Result: Down-regulated in Transcription
  misc_feature: MA Experiment 108462 PARAMETER Experiment Name: At_Germinating_Seeds_cDNA_P Parameter: Age (day) Value: 2 vs. 0
  misc_feature: MA Experiment 108462 PARAMETER Experiment Name: At_Germinating_Seeds_cDNA_P Parameter: Tissue Value: Germinating Seeds
  misc_feature: MA Experiment ID: 108463 Result: Down-regulated in Transcription
  misc_feature: MA Experiment 108463 PARAMETER Experiment Name: At_Germinating_Seeds_cDNA_P Parameter: Age (day) Value: 3 vs. 0
  misc_feature: MA Experiment 108463 PARAMETER Experiment Name: At_Germinating_Seeds_cDNA_P Parameter: Tissue Value: Germinating Seeds
  misc_feature: MA Experiment ID: 108464 Result: Down-regulated in Transcription
  misc_feature: MA Experiment 108464 PARAMETER Experiment Name: At_Germinating_Seeds_cDNA_P Parameter: Age (day) Value: 4 vs. 0
  misc_feature: MA Experiment 108464 PARAMETER Experiment Name: At_Germinating_Seeds_cDNA_P Parameter: Tissue Value: Germinating Seeds
  misc_feature: MA Experiment ID: 108594 Result: Up-regulated in Transcription
  misc_feature: MA Experiment 108594 PARAMETER Experiment Name: At_Ler-rhl_Root_cDNA_P Parameter: Plant Line Value: null
  misc_feature: MA Experiment ID: 108605 Result: Down-regulated in Transcription
  misc_feature: MA Experiment 108605 PARAMETER Experiment Name: At_100uM_ABA_cDNA_P Parameter: Timepoint (hr) Value: 6
  misc_feature: MA Experiment 108605 PARAMETER Experiment Name: At_100uM_ABA_cDNA_P Parameter: Tissue Value: Aerial
  misc_feature: MA Experiment 108605 PARAMETER Experiment Name: At_100uM_ABA_cDNA_P Parameter: Treatment Value: 100uM ABA vs. No Treatment
  misc_feature: MA Experiment ID: 108608 Result: Down-regulated in Transcription
  misc_feature: MA Experiment 108608 PARAMETER Experiment Name: At_100uM_ABA_cDNA_P Parameter: Timepoint (hr) Value: 1
  misc_feature: MA Experiment 108608 PARAMETER Experiment Name: At_100uM_ABA_cDNA_P Parameter: Tissue Value: Aerial
  misc_feature: MA Experiment 108608 PARAMETER Experiment Name: At_100uM_ABA_cDNA_P Parameter: Treatment Value: 100uM ABA vs. No Treatment
  misc_feature: MA Experiment ID: 20000166 Result: Down-regulated in Transcription
  misc_feature: MA Experiment 20000166 PARAMETER Experiment Name: At_100uM_ABA_P Parameter: Age (day) Value: 14
  misc_feature: MA Experiment 20000166 PARAMETER Experiment Name: At_100uM_ABA_P Parameter: Organism Value: A. thaliana
  misc_feature: MA Experiment 20000166 PARAMETER Experiment Name: At_100uM_ABA_P Parameter: Plant Line Value: WS
  misc_feature: MA Experiment 20000166 PARAMETER Experiment Name: At_100uM_ABA_P Parameter: Timepoint (hr) Value: 1
  misc_feature: MA Experiment 20000166 PARAMETER Experiment Name: At_100uM_ABA_P Parameter: Tissue Value: Aerial
  misc_feature: MA Experiment 20000166 PARAMETER Experiment Name: At_100uM_ABA_P Parameter: Treatment Value: 100uM ABA vs. No Treatment
  misc_feature: MA Experiment ID: 20000180 Result: Down-regulated in Transcription
  misc_feature: MA Experiment 20000180 PARAMETER Experiment Name: At_Germinating_Seeds_P Parameter: Age (hr) Value: 24 vs. 0
  misc_feature: MA Experiment 20000180 PARAMETER Experiment Name: At_Germinating_Seeds_P Parameter: Tissue Value: Germinating Seeds
  misc_feature: MA Experiment ID: 20000265 Result: Up-regulated in Transcription
  misc_feature: MA Experiment 20000265 PARAMETER Experiment Name: At_Open_Flower_P Parameter: Age (day) Value: 21
  misc_feature: MA Experiment 20000265 PARAMETER Experiment Name: At_Open_Flower_P Parameter: Plant Line Value: WS
  misc_feature: MA Experiment 20000265 PARAMETER Experiment Name: At_Open_Flower_P Parameter: Tissue Value: Closed Flower vs. Whole Plant
  misc_feature: MA Experiment ID: 20000286 Result: Up-regulated in Transcription
  misc_feature: MA Experiment 20000286 PARAMETER Experiment Name: At_Open_Flower_P Parameter: Age (day) Value: 21
  misc_feature: MA Experiment 20000286 PARAMETER Experiment Name: At_Open_Flower_P Parameter: Plant Line Value: WS
  misc_feature: MA Experiment 20000286 PARAMETER Experiment Name: At_Open_Flower_P Parameter: Tissue Value: Half Open vs. Whole Plant
  misc_feature: MA Experiment ID: 20000441 Result: Up-regulated in Transcription
  misc_feature: MA Experiment 20000441 PARAMETER Experiment Name: At_1uM_BR-BRZ__P Parameter: Tissue Value: Shoot Apices
  misc_feature: MA Experiment 20000441 PARAMETER Experiment Name: At_1uM_BR-BRZ__P Parameter: Treatment Value: 1uM BR vs. No Treatment
  misc_feature: MA Experiment ID: 20000443 Result: Up-regulated in Transcription
  misc_feature: MA Experiment 20000443 PARAMETER Experiment Name: At_1uM_BR-BRZ__P Parameter: Tissue Value: Shoot Apices
  misc_feature: MA Experiment 20000443 PARAMETER Experiment Name: At_1uM_BR-BRZ__P Parameter: Treatment Value: 1uM BRZ vs. No Treatment
  misc_feature: MA Experiment ID: 20000444 Result: Down-regulated in Transcription
  misc_feature: MA Experiment 20000444 PARAMETER Experiment Name: At_100uM_NAA__P Parameter: Age (day) Value: 14
  misc_feature: MA Experiment 20000444 PARAMETER Experiment Name: At_100uM_NAA__P Parameter: Organism Value: A. thaliana
  misc_feature: MA Experiment 20000444 PARAMETER Experiment Name: At_100uM_NAA__P Parameter: Plant Line Value: WS
  misc_feature: MA Experiment 20000444 PARAMETER Experiment Name: At_100uM_NAA__P Parameter: Timepoint (hr) Value: 1
  misc_feature: MA Experiment 20000444 PARAMETER Experiment Name: At_100uM_NAA__P Parameter: Tissue Value: Aerial
  misc_feature: MA Experiment 20000444 PARAMETER Experiment Name: At_100uM_NAA__P Parameter: Treatment Value: 100uM NAA vs. No Treatment
  misc_feature: MA Experiment ID: 20000495 Result: Up-regulated in Transcription
  misc_feature: MA Experiment 20000495 PARAMETER Experiment Name: At_Guard_Cells_P Parameter: Harvest Date Value: 8/2/2002
  misc_feature: MA Experiment 20000495 PARAMETER Experiment Name: At_Guard_Cells_P Parameter: Organism Value: A. thaliana
  misc_feature: MA Experiment 20000495 PARAMETER Experiment Name: At_Guard_Cells_P Parameter: Tissue Value: Guard Cells vs. Leaves
  misc_feature: MA Experiment ID: 20000496 Result: Up-regulated in Transcription
  misc_feature: MA Experiment 20000496 PARAMETER Experiment Name: At_Guard_Cells_P Parameter: Harvest Date Value: 7/19/2002
  misc_feature: MA Experiment 20000496 PARAMETER Experiment Name: At_Guard_Cells_P Parameter: Organism Value: Canola
  misc_feature: MA Experiment 20000496 PARAMETER Experiment Name: At_Guard_Cells_P Parameter: Tissue Value: Guard Cells vs. Leaves
  misc_feature: MA Experiment ID: 20000527 Result: Down-regulated in Transcription
  misc_feature: MA Experiment 20000527 PARAMETER Experiment Name: At_10percent_PEG_P Parameter: Age (day) Value: 20
  misc_feature: MA Experiment 20000527 PARAMETER Experiment Name: At_10percent_PEG_P Parameter: Organism Value: A. thaliana
  misc_feature: MA Experiment 20000527 PARAMETER Experiment Name: At_10percent_PEG_P Parameter: Plant Line Value: WS
  misc_feature: MA Experiment 20000527 PARAMETER Experiment Name: At_10percent_PEG_P Parameter: Timepoint (day) Value: 20
  misc_feature: MA Experiment 20000527 PARAMETER Experiment Name: At_10percent_PEG_P Parameter: Tissue Value: Whole Plant
  misc_feature: MA Experiment 20000527 PARAMETER Experiment Name: At_10percent_PEG_P Parameter: Treatment Value: 10percent PEG vs. No Treatment
  misc_feature: MA Experiment ID: 20000573 Result: Up-regulated in Transcription
  misc_feature: MA Experiment 20000573 PARAMETER Experiment Name: At_100uM_ABA_Mutants__P Parameter: Organism Value: A. thaliana
  misc_feature: MA Experiment 20000573 PARAMETER Experiment Name: At_100uM_ABA_Mutants__P Parameter: Plant Line Value: CS22 vs. Ler wt
  misc_feature: MA Experiment 20000573 PARAMETER Experiment Name: At_100uM_ABA_Mutants__P Parameter: Timepoint (hr) Value: N/A
  misc_feature: MA Experiment 20000573 PARAMETER Experiment Name: At_100uM_ABA_Mutants__P Parameter: Tissue Value: Whole Plant
  misc_feature: MA Experiment 20000573 PARAMETER Experiment Name: At_100uM_ABA_Mutants__P Parameter: Treatment Value: None
  misc_feature: MA Experiment ID: 20000709 Result: Down-regulated in Transcription
  misc_feature: MA Experiment 20000709 PARAMETER Experiment Name: At_15mM_NH4NO3_L-to-H_P Parameter: Age (hr) Value: 14
  misc_feature: MA Experiment 20000709 PARAMETER Experiment Name: At_15mM_NH4NO3_L-to-H_P Parameter: Organism Value: A. thaliana
  misc_feature: MA Experiment 20000709 PARAMETER Experiment Name: At_15mM_NH4NO3_L-to-H_P Parameter: Plant Line Value: WS
  misc_feature: MA Experiment 20000709 PARAMETER Experiment Name: At_15mM_NH4NO3_L-to-H_P Parameter: Timepoint (hr) Value: 4
  misc_feature: MA Experiment 20000709 PARAMETER Experiment Name: At_15mM_NH4NO3_L-to-H_P Parameter: Tissue Value: Aerial
  misc_feature: MA Experiment 20000709 PARAMETER Experiment Name: At_15mM_NH4NO3_L-to-H_P Parameter: Treatment Value: 15mM NH4NO3 vs. 30mM Mannitol
  misc_feature: MA Experiment ID: 20000794 Result: Up-regulated in Transcription
  misc_feature: MA Experiment 20000794 PARAMETER Experiment Name: At_Petals_P Parameter: Age (day) Value: 23-25 days
  misc_feature: MA Experiment 20000794 PARAMETER Experiment Name: At_Petals_P Parameter: Plant Line Value: WS
  misc_feature: MA Experiment 20000794 PARAMETER Experiment Name: At_Petals_P Parameter: Tissue Value: Petals vs. Whole plant
  misc_feature: MA Experiment ID: 20001247 Result: Up-regulated in Transcription
  misc_feature: MA Experiment 20001247 PARAMETER Experiment Name: At_Far-red-induction_P Parameter: Age (day) Value: 7
  misc_feature: MA Experiment 20001247 PARAMETER Experiment Name: At_Far-red-induction_P Parameter: Light Value: Far-red vs. White
  misc_feature: MA Experiment 20001247 PARAMETER Experiment Name: At_Far-red-induction_P Parameter: Organism Value: A. thaliana
  misc_feature: MA Experiment 20001247 PARAMETER Experiment Name: At_Far-red-induction_P Parameter: Plant Line Value: Columbia
  misc_feature: MA Experiment 20001247 PARAMETER Experiment Name: At_Far-red-induction_P Parameter: Timepoint (hr) Value: 1
  misc_feature: MA Experiment 20001247 PARAMETER Experiment Name: At_Far-red-induction_P Parameter: Tissue Value: Whole Plant
  misc_feature: MA Experiment ID: 20001556 Result: Down-regulated in Transcription
  misc_feature: MA Experiment 20001556 PARAMETER Experiment Name: At_Drought_Soil_Dry_P Parameter: Age (day) Value: 26
  misc_feature: MA Experiment 20001556 PARAMETER Experiment Name: At_Drought_Soil_Dry_P Parameter: Organism Value: A. thaliana
  misc_feature: MA Experiment 20001556 PARAMETER Experiment Name: At_Drought_Soil_Dry_P Parameter: Plant Line Value: WS
  misc_feature: MA Experiment 20001556 PARAMETER Experiment Name: At_Drought_Soil_Dry_P Parameter: Post Timepoint (hr) Value: None
  misc_feature: MA Experiment 20001556 PARAMETER Experiment Name: At_Drought_Soil_Dry_P Parameter: Post-Treatment Value: None
  misc_feature: MA Experiment 20001556 PARAMETER Experiment Name: At_Drought_Soil_Dry_P Parameter: Timepoint (day) Value: 12
  misc_feature: MA Experiment 20001556 PARAMETER Experiment Name: At_Drought_Soil_Dry_P Parameter: Treatment Value: Drought vs. No Drought
  misc_feature: MA Experiment ID: 20001557 Result: Up-regulated in Transcription
  misc_feature: MA Experiment 20001557 PARAMETER Experiment Name: At_Drought_Soil_Dry_P Parameter: Age (day) Value: 27
  misc_feature: MA Experiment 20001557 PARAMETER Experiment Name: At_Drought_Soil_Dry_P Parameter: Organism Value: A. thaliana
  misc_feature: MA Experiment 20001557 PARAMETER Experiment Name: At_Drought_Soil_Dry_P Parameter: Plant Line Value: WS
  misc_feature: MA Experiment 20001557 PARAMETER Experiment Name: At_Drought_Soil_Dry_P Parameter: Post Timepoint (hr) Value: 3
  misc_feature: MA Experiment 20001557 PARAMETER Experiment Name: At_Drought_Soil_Dry_P Parameter: Post-Treatment Value: Re-Water vs. No Drought
  misc_feature: MA Experiment 20001557 PARAMETER Experiment Name: At_Drought_Soil_Dry_P Parameter: Timepoint (day) Value: 13
  misc_feature: MA Experiment 20001557 PARAMETER Experiment Name: At_Drought_Soil_Dry_P Parameter: Treatment Value: Drought vs. No Drought
  misc_feature: MA Experiment ID: 20001558 Result: Up-regulated in Transcription
  misc_feature: MA Experiment 20001558 PARAMETER Experiment Name: At_Drought_Soil_Dry_P Parameter: Age (day) Value: 27
  misc_feature: MA Experiment 20001558 PARAMETER Experiment Name: At_Drought_Soil_Dry_P Parameter: Organism Value: A. thaliana
  misc_feature: MA Experiment 20001558 PARAMETER Experiment Name: At_Drought_Soil_Dry_P Parameter: Plant Line Value: WS
  misc_feature: MA Experiment 20001558 PARAMETER Experiment Name: At_Drought_Soil_Dry_P Parameter: Post Timepoint (hr) Value: 6
  misc_feature: MA Experiment 20001558 PARAMETER Experiment Name: At_Drought_Soil_Dry_P Parameter: Post-Treatment Value: Re-Water vs. No Drought
  misc_feature: MA Experiment 20001558 PARAMETER Experiment Name: At_Drought_Soil_Dry_P Parameter: Timepoint (day) Value: 13
  misc_feature: MA Experiment 20001558 PARAMETER Experiment Name: At_Drought_Soil_Dry_P Parameter: Treatment Value: Drought vs. No Drought

SEQ ID NO: 48345 - protein, 671 aa, Arabidopsis thaliana; identical to SEQ ID NO: 39470
  peptide (1)..(671): Ceres Seq. ID no. 13504840
  misc_feature (1)..(658): Homolog of NCBI NO: 19115899 NR Description: putative pheromone response and mating-type
  misc_feature (1)..(651): Homolog of NCBI NO: 19112445 NR Description: sexual differentiation process protein isp4
  misc_feature (11)..(547): Homolog of NCBI NO: 18414644 NR Description: isp4 like protein [Arabidopsis thaliana]
  misc_feature (11)..(547): Homolog of NCBI NO: 7485100 NR Description: hypothetical protein - Arabidopsis thaliana
  misc_feature (11)..(671): Homolog of NCBI NO: 30722286 NR Description: glutathione transporter GT1 [Brassica juncea]
  misc_feature (1)..(671): Homolog of NCBI NO: 15218331 NR Description: hypothetical protein [Arabidopsis thaliana]
  misc_feature (1)..(670): Homolog of NCBI NO: 25553564 NR Description: putative isp4 protein [Oryza sativa (japonica
  misc_feature (1)..(671): Homolog of NCBI NO: 15236912 NR Description: oligopeptide transporter -related [Arabidopsis
  misc_feature (1)..(671): Homolog of NCBI NO: 34898010 NR Description: EST D25093(R3139) corresponds to a region of the
  misc_feature (1)..(671): Homolog of NCBI NO: 15238763 NR Description: isp4 protein [Arabidopsis thaliana]
  misc_feature (1)..(658): Homolog of NCBI NO: 19115899 NR Description: putative pheromone response and mating-type
  misc_feature (1)..(651): Homolog of NCBI NO: 19112445 NR Description: sexual differentiation process protein isp4
  misc_feature (11)..(547): Homolog of NCBI NO: 18414644 NR Description: isp4 like protein [Arabidopsis thaliana]
  misc_feature (11)..(547): Homolog of NCBI NO: 7485100 NR Description: hypothetical protein - Arabidopsis thaliana
  misc_feature (11)..(671): Homolog of NCBI NO: 30722286 NR Description: glutathione transporter GT1 [Brassica juncea]
  misc_feature (1)..(671): Homolog of NCBI NO: 15218331 NR Description: hypothetical protein [Arabidopsis thaliana]
  misc_feature (1)..(670): Homolog of NCBI NO: 25553564 NR Description: putative isp4 protein [Oryza sativa (japonica
  misc_feature (1)..(671): Homolog of NCBI NO: 15236912 NR Description: oligopeptide transporter -related [Arabidopsis
  misc_feature (1)..(671): Homolog of NCBI NO: 34898010 NR Description: EST D25093(R3139) corresponds to a region of the
  misc_feature (1)..(671): Homolog of NCBI NO: 15238763 NR Description: isp4 protein [Arabidopsis thaliana]

SEQ ID NO: 48346 - protein, 651 aa, Arabidopsis thaliana; identical to SEQ ID NO: 39471
  peptide (1)..(651): Ceres Seq. ID no. 13504841
  misc_feature (1)..(638): Homolog of NCBI NO: 19115899 NR Description: putative pheromone response and mating-type
  misc_feature (1)..(631): Homolog of NCBI NO: 19112445 NR Description: sexual differentiation process protein isp4
  misc_feature (1)..(527): Homolog of NCBI NO: 18414644 NR Description: isp4 like protein [Arabidopsis thaliana]
  misc_feature (1)..(527): Homolog of NCBI NO: 7485100 NR Description: hypothetical protein - Arabidopsis thaliana
  misc_feature (1)..(651): Homolog of NCBI NO: 30722286 NR Description: glutathione transporter GT1 [Brassica juncea]
  misc_feature (1)..(651): Homolog of NCBI NO: 15218331 NR Description: hypothetical protein [Arabidopsis thaliana]
  misc_feature (1)..(650): Homolog of NCBI NO: 25553564 NR Description: putative isp4 protein [Oryza sativa (japonica
  misc_feature (1)..(651): Homolog of NCBI NO: 15236912 NR Description: oligopeptide transporter -related [Arabidopsis
  misc_feature (1)..(651): Homolog of NCBI NO: 34898010 NR Description: EST D25093(R3139) corresponds to a region of the
  misc_feature (1)..(651): Homolog of NCBI NO: 15238763 NR Description: isp4 protein [Arabidopsis thaliana]
  misc_feature (1)..(638): Homolog of NCBI NO: 19115899 NR Description: putative pheromone response and mating-type
  misc_feature (1)..(631): Homolog of NCBI NO: 19112445 NR Description: sexual differentiation process protein isp4
  misc_feature (1)..(527): Homolog of NCBI NO: 18414644 NR Description: isp4 like protein [Arabidopsis thaliana]
  misc_feature (1)..(527): Homolog of NCBI NO: 7485100 NR Description: hypothetical protein - Arabidopsis thaliana
  misc_feature (1)..(651): Homolog of NCBI NO: 30722286 NR Description: glutathione transporter GT1 [Brassica juncea]
  misc_feature (1)..(651): Homolog of NCBI NO: 15218331 NR Description: hypothetical protein [Arabidopsis thaliana]
  misc_feature (1)..(650): Homolog of NCBI NO: 25553564 NR Description: putative isp4 protein [Oryza sativa (japonica
  misc_feature (1)..(651): Homolog of NCBI NO: 15236912 NR Description: oligopeptide transporter -related [Arabidopsis
  misc_feature (1)..(651): Homolog of NCBI NO: 34898010 NR Description: EST D25093(R3139) corresponds to a region of the
  misc_feature (1)..(651): Homolog of NCBI NO: 15238763 NR Description: isp4 protein [Arabidopsis thaliana]

SEQ ID NO: 48347 - protein, 582 aa, Arabidopsis thaliana; identical to SEQ ID NO: 39472
  peptide (1)..(582): Ceres Seq. ID no. 13504842
  misc_feature (1)..(569): Homolog of NCBI NO: 19115899 NR Description: putative pheromone response and mating-type
  misc_feature (1)..(562): Homolog of NCBI NO: 19112445 NR Description: sexual differentiation process protein isp4
  misc_feature (1)..(458): Homolog of NCBI NO: 18414644 NR Description: isp4 like protein [Arabidopsis thaliana]
  misc_feature (1)..(458): Homolog of NCBI NO: 7485100 NR Description: hypothetical protein - Arabidopsis thaliana
  misc_feature (1)..(582): Homolog of NCBI NO: 30722286 NR Description: glutathione transporter GT1 [Brassica juncea]
  misc_feature (1)..(582): Homolog of NCBI NO: 15218331 NR Description: hypothetical protein [Arabidopsis thaliana]
  misc_feature (1)..(581): Homolog of NCBI NO: 25553564 NR Description: putative isp4 protein [Oryza sativa (japonica
  misc_feature (1)..(582): Homolog of NCBI NO: 15236912 NR Description: oligopeptide transporter -related [Arabidopsis
  misc_feature (1)..(582): Homolog of NCBI NO: 34898010 NR Description: EST D25093(R3139) corresponds to a region of the
  misc_feature (1)..(582): Homolog of NCBI NO: 15238763 NR Description: isp4 protein [Arabidopsis thaliana]
  misc_feature (1)..(569): Homolog of NCBI NO: 19115899 NR Description: putative pheromone response and mating-type
  misc_feature (1)..(562): Homolog of NCBI NO: 19112445 NR Description: sexual differentiation process protein isp4
  misc_feature (1)..(458): Homolog of NCBI NO: 18414644 NR Description: isp4 like protein [Arabidopsis thaliana]
  misc_feature (1)..(458): Homolog of NCBI NO: 7485100 NR Description: hypothetical protein - Arabidopsis thaliana
  misc_feature (1)..(582): Homolog of NCBI NO: 30722286 NR Description: glutathione transporter GT1 [Brassica juncea]
  misc_feature (1)..(582): Homolog of NCBI NO: 15218331 NR Description: hypothetical protein [Arabidopsis thaliana]
  misc_feature (1)..(581): Homolog of NCBI NO: 25553564 NR Description: putative isp4 protein [Oryza sativa (japonica
  misc_feature (1)..(582): Homolog of NCBI NO: 15236912 NR Description: oligopeptide transporter -related [Arabidopsis
  misc_feature (1)..(582): Homolog of NCBI NO: 34898010 NR Description: EST D25093(R3139) corresponds to a region of the
  misc_feature (1)..(582): Homolog of NCBI NO: 15238763 NR Description: isp4 protein [Arabidopsis thaliana]

SEQ ID NO: 48348 - DNA, 1547 bp, Arabidopsis thaliana; identical to SEQ ID NO: 44750
  misc_feature (1)..(1547): Ceres Seq. ID no. 13509870
  misc_feature: MA Experiment ID: 20000264 Result: Up-regulated in Transcription
  misc_feature: MA Experiment 20000264 PARAMETER Experiment Name: At_Open_Flower_P Parameter: Age (day) Value: 21
  misc_feature: MA Experiment 20000264 PARAMETER Experiment Name: At_Open_Flower_P Parameter: Plant Line Value: WS
  misc_feature: MA Experiment 20000264 PARAMETER Experiment Name: At_Open_Flower_P Parameter: Tissue Value: Open Flower vs. Whole Plant
  misc_feature: MA Experiment ID: 20000265 Result: Up-regulated in Transcription
  misc_feature: MA Experiment 20000265 PARAMETER Experiment Name: At_Open_Flower_P Parameter: Age (day) Value: 21
  misc_feature: MA Experiment 20000265 PARAMETER Experiment Name: At_Open_Flower_P Parameter: Plant Line Value: WS
  misc_feature: MA Experiment 20000265 PARAMETER Experiment Name: At_Open_Flower_P Parameter: Tissue Value: Closed Flower vs. Whole Plant
  misc_feature: MA Experiment ID: 20000437 Result: Down-regulated in Transcription
  misc_feature: MA Experiment 20000437 PARAMETER Experiment Name: At_Drought_P Parameter: Age (day) Value: 8
  misc_feature: MA Experiment 20000437 PARAMETER Experiment Name: At_Drought_P Parameter: Organism Value: A. thaliana
  misc_feature: MA Experiment 20000437 PARAMETER Experiment Name: At_Drought_P Parameter: Plant Line Value: WS
  misc_feature: MA Experiment 20000437 PARAMETER Experiment Name: At_Drought_P Parameter: Timepoint (hr) Value: 24
  misc_feature: MA Experiment 20000437 PARAMETER Experiment Name: At_Drought_P Parameter: Tissue Value: Whole Plant
  misc_feature: MA Experiment 20000437 PARAMETER Experiment Name: At_Drought_P Parameter: Treatment Value: Drought vs. No Drought

SEQ ID NO: 48349 - protein, 486 aa, Arabidopsis thaliana; identical to SEQ ID NO: 44751
  peptide (1)..(486): Ceres Seq. ID no. 13509871
  misc_feature (2)..(276): Homolog of NCBI NO: 40539114 NR Description: expressed protein [Oryza sativa (japonica
  misc_feature (226)..(483): Homolog of NCBI NO: 38567811 NR Description: CDT1a protein [Arabidopsis thaliana]
  misc_feature (226)..(483): Homolog of NCBI NO: 22530894 NR Description: hypothetical protein [Arabidopsis thaliana]
  misc_feature (226)..(483): Homolog of NCBI NO: 15224645 NR Description: expressed protein [Arabidopsis thaliana]
  misc_feature (2)..(388): Homolog of NCBI NO: 22530894 NR Description: hypothetical protein [Arabidopsis thaliana]
  misc_feature (2)..(388): Homolog of NCBI NO: 15224645 NR Description: expressed protein [Arabidopsis thaliana]
  misc_feature (2)..(388): Homolog of NCBI NO: 38567811 NR Description: CDT1a protein [Arabidopsis thaliana]
  misc_feature (390)..(477): Homolog of NCBI NO: 38344618 NR Description: OSJNBb0003A12.4 [Oryza sativa (japonica
  misc_feature (26)..(341): Homolog of NCBI NO: 38344618 NR Description: OSJNBb0003A12.4 [Oryza sativa (japonica
  misc_feature (1)..(486): Homolog of NCBI NO: 15232570 NR Description: hypothetical protein [Arabidopsis thaliana]
  misc_feature (2)..(276): Homolog of NCBI NO: 40539114 NR Description: expressed protein [Oryza sativa (japonica
  misc_feature (226)..(483): Homolog of NCBI NO: 38567811 NR Description: CDT1a protein [Arabidopsis thaliana]
  misc_feature (226)..(483): Homolog of NCBI NO: 22530894 NR Description: hypothetical protein [Arabidopsis thaliana]
  misc_feature (226)..(483): Homolog of NCBI NO: 15224645 NR Description: expressed protein [Arabidopsis thaliana]
  misc_feature (2)..(388): Homolog of NCBI NO: 22530894 NR Description: hypothetical protein [Arabidopsis thaliana]
  misc_feature (2)..(388): Homolog of NCBI NO: 15224645 NR Description: expressed protein [Arabidopsis thaliana]
  misc_feature (2)..(388): Homolog of NCBI NO: 38567811 NR Description: CDT1a protein [Arabidopsis thaliana]
  misc_feature (390)..(477): Homolog of NCBI NO: 38344618 NR Description: OSJNBb0003A12.4 [Oryza sativa (japonica
  misc_feature (26)..(341): Homolog of NCBI NO: 38344618 NR Description: OSJNBb0003A12.4 [Oryza sativa (japonica
  misc_feature (1)..(486): Homolog of NCBI NO: 15232570 NR Description: hypothetical protein [Arabidopsis thaliana]

SEQ ID NO: 48350 - protein, 473 aa, Arabidopsis thaliana; identical to SEQ ID NO: 44752
  peptide (1)..(473): Ceres Seq. ID no. 13509872
  misc_feature (1)..(263): Homolog of NCBI NO: 40539114 NR Description: expressed protein [Oryza sativa (japonica
  misc_feature (213)..(470): Homolog of NCBI NO: 38567811 NR Description: CDT1a protein [Arabidopsis thaliana]
  misc_feature (213)..(470): Homolog of NCBI NO: 22530894 NR Description: hypothetical protein [Arabidopsis thaliana]
  misc_feature (213)..(470): Homolog of NCBI NO: 15224645 NR Description: expressed protein [Arabidopsis thaliana]
  misc_feature (1)..(375): Homolog of NCBI NO: 22530894 NR Description: hypothetical protein [Arabidopsis thaliana]
  misc_feature (1)..(375): Homolog of NCBI NO: 15224645 NR Description: expressed protein [Arabidopsis thaliana]
  misc_feature (1)..(375): Homolog of NCBI NO: 38567811 NR Description: CDT1a protein [Arabidopsis thaliana]
  misc_feature (377)..(464): Homolog of NCBI NO: 38344618 NR Description: OSJNBb0003A12.4 [Oryza sativa (japonica
  misc_feature (13)..(328): Homolog of NCBI NO: 38344618 NR Description: OSJNBb0003A12.4 [Oryza sativa (japonica
  misc_feature (1)..(473): Homolog of NCBI NO: 15232570 NR Description: hypothetical protein [Arabidopsis thaliana]
  misc_feature (1)..(263): Homolog of NCBI NO: 40539114 NR Description: expressed protein [Oryza sativa (japonica
  misc_feature (213)..(470): Homolog of NCBI NO: 38567811 NR Description: CDT1a protein [Arabidopsis thaliana]
  misc_feature (213)..(470): Homolog of NCBI NO: 22530894 NR Description: hypothetical protein [Arabidopsis thaliana]
  misc_feature (213)..(470): Homolog of NCBI NO: 15224645 NR Description: expressed protein [Arabidopsis thaliana]
  misc_feature (1)..(375): Homolog of NCBI NO: 22530894 NR Description: hypothetical protein [Arabidopsis thaliana]
  misc_feature (1)..(375): Homolog of NCBI NO: 15224645 NR Description: expressed protein [Arabidopsis thaliana]
  misc_feature (1)..(375): Homolog of NCBI NO: 38567811 NR Description: CDT1a protein [Arabidopsis thaliana]
  misc_feature (377)..(464): Homolog of NCBI NO: 38344618 NR Description: OSJNBb0003A12.4 [Oryza sativa (japonica
  misc_feature (13)..(328): Homolog of NCBI NO: 38344618 NR Description: OSJNBb0003A12.4 [Oryza sativa (japonica
  misc_feature (1)..(473): Homolog of NCBI NO: 15232570 NR Description: hypothetical protein [Arabidopsis thaliana]

SEQ ID NO: 48351 - protein, 388 aa, Arabidopsis thaliana; identical to SEQ ID NO: 44753
  peptide (1)..(388): Ceres Seq. ID no. 13509873
  misc_feature (1)..(178): Homolog of NCBI NO: 40539114 NR Description: expressed protein [Oryza sativa (japonica
  misc_feature (128)..(385): Homolog of NCBI NO: 38567811 NR Description: CDT1a protein [Arabidopsis thaliana]
  misc_feature (128)..(385): Homolog of NCBI NO: 22530894 NR Description: hypothetical protein [Arabidopsis thaliana]
  misc_feature (128)..(385): Homolog of NCBI NO: 15224645 NR Description: expressed protein [Arabidopsis thaliana]
  misc_feature (1)..(290): Homolog of NCBI NO: 22530894 NR Description: hypothetical protein [Arabidopsis thaliana]
  misc_feature (1)..(290): Homolog of NCBI NO: 15224645 NR Description: expressed protein [Arabidopsis thaliana]
  misc_feature (1)..(290): Homolog of NCBI NO: 38567811 NR Description: CDT1a protein [Arabidopsis thaliana]
  misc_feature (292)..(379): Homolog of NCBI NO: 38344618 NR Description: OSJNBb0003A12.4 [Oryza sativa (japonica
  misc_feature (1)..(243): Homolog of NCBI NO: 38344618 NR Description: OSJNBb0003A12.4 [Oryza sativa (japonica
  misc_feature (1)..(388): Homolog of NCBI NO: 15232570 NR Description: hypothetical protein [Arabidopsis thaliana]
  misc_feature (1)..(178): Homolog of NCBI NO: 40539114 NR Description: expressed protein [Oryza sativa (japonica
  misc_feature (128)..(385): Homolog of NCBI NO: 38567811 NR Description: CDT1a protein [Arabidopsis thaliana]
  misc_feature (128)..(385): Homolog of NCBI NO: 22530894 NR Description: hypothetical protein [Arabidopsis thaliana]
  misc_feature (128)..(385): Homolog of NCBI NO: 15224645 NR Description: expressed protein [Arabidopsis thaliana]
  misc_feature (1)..(290): Homolog of NCBI NO: 22530894 NR Description: hypothetical protein [Arabidopsis thaliana]
  misc_feature (1)..(290): Homolog of NCBI NO: 15224645 NR Description: expressed protein [Arabidopsis thaliana]
  misc_feature (1)..(290): Homolog of NCBI NO: 38567811 NR Description: CDT1a protein [Arabidopsis thaliana]
  misc_feature (292)..(379): Homolog of NCBI NO: 38344618 NR Description: OSJNBb0003A12.4 [Oryza sativa (japonica
  misc_feature (1)..(243): Homolog of NCBI NO: 38344618 NR Description: OSJNBb0003A12.4 [Oryza sativa (japonica
  misc_feature (1)..(388): Homolog of NCBI NO: 15232570 NR Description: hypothetical protein [Arabidopsis thaliana]

SEQ ID NO: 48352 - DNA, 2389 bp, Arabidopsis thaliana; identical to SEQ ID NO: 43744
  misc_feature (1)..(2389): Ceres Seq. ID no. 13591580
  misc_feature: MA Experiment ID: 108434 Result: Up-regulated in Transcription
  misc_feature: MA Experiment 108434 PARAMETER Experiment Name: At_Root_Tips_cDNA_P Parameter: Tissue Value: Root Tips
  misc_feature: MA Experiment ID: 108463 Result: Down-regulated in Transcription
  misc_feature: MA Experiment 108463 PARAMETER Experiment Name: At_Germinating_Seeds_cDNA_P Parameter: Age (day) Value: 3 vs. 0
  misc_feature: MA Experiment 108463 PARAMETER Experiment Name: At_Germinating_Seeds_cDNA_P Parameter: Tissue Value: Germinating Seeds
  misc_feature: MA Experiment ID: 108469 Result: Up-regulated in Transcription
  misc_feature: MA Experiment ID: 108573 Result: Down-regulated in Transcription
  misc_feature: MA Experiment 108573 PARAMETER Experiment Name: At_Drought_cDNA_P Parameter: Timepoint (hr) Value: 6
  misc_feature: MA Experiment 108573 PARAMETER Experiment Name: At_Drought_cDNA_P Parameter: Tissue Value: Aerial
  misc_feature: MA Experiment 108573 PARAMETER Experiment Name: At_Drought_cDNA_P Parameter: Treatment Value: Drought vs. No Drought
  misc_feature: MA Experiment ID: 108576 Result: Up-regulated in Transcription
  misc_feature: MA Experiment 108576 PARAMETER Experiment Name: At_42deg_Heat_cDNA_P Parameter: Temperature (deg C) Value: 42 vs. 22
  misc_feature: MA Experiment 108576 PARAMETER Experiment Name: At_42deg_Heat_cDNA_P Parameter: Timepoint (hr) Value: 1
  misc_feature: MA Experiment 108576 PARAMETER Experiment Name: At_42deg_Heat_cDNA_P Parameter: Tissue Value: Aerial
  misc_feature: MA Experiment ID: 108577 Result: Up-regulated in Transcription
  misc_feature: MA Experiment 108577 PARAMETER Experiment Name: At_42deg_Heat_cDNA_P Parameter: Temperature (deg C) Value: 42 vs. 22
  misc_feature: MA Experiment 108577 PARAMETER Experiment Name: At_42deg_Heat_cDNA_P Parameter: Timepoint (hr) Value: 6
  misc_feature: MA Experiment 108577 PARAMETER Experiment Name: At_42deg_Heat_cDNA_P Parameter: Tissue Value: Aerial
  misc_feature: MA Experiment ID: 108595 Result: Up-regulated in Transcription
  misc_feature: MA Experiment 108595 PARAMETER Experiment Name: At_Ler-pi_Ovule_cDNA_P Parameter: Plant Line Value: null
  misc_feature: MA Experiment ID: 108668 Result: Up-regulated in Transcription
  misc_feature: MA Experiment 108668 PARAMETER Experiment Name: At_2mM_SA_cDNA_P Parameter: Plant Line Value: WS
  misc_feature: MA Experiment 108668 PARAMETER Experiment Name: At_2mM_SA_cDNA_P Parameter: Timepoint (hr) Value: 6
  misc_feature: MA Experiment 108668 PARAMETER Experiment Name: At_2mM_SA_cDNA_P Parameter: Treatment Value: 2mM SA vs. No Treatment
  misc_feature: MA Experiment ID: 20000086 Result: Up-regulated in Transcription
  misc_feature: MA Experiment 20000086 PARAMETER Experiment Name: At_100uM_ABA_Mutants_cDNA_P Parameter: Plant Line Value: CS22
  misc_feature: MA Experiment 20000086 PARAMETER Experiment Name: At_100uM_ABA_Mutants_cDNA_P Parameter: Timepoint (hr) Value: 6
  misc_feature: MA Experiment 20000086 PARAMETER Experiment Name: At_100uM_ABA_Mutants_cDNA_P Parameter: Tissue Value: Aerial
  misc_feature: MA Experiment 20000086 PARAMETER Experiment Name: At_100uM_ABA_Mutants_cDNA_P Parameter: Treatment Value: 100uM ABA vs. No Treatment
  misc_feature: MA Experiment ID: 20000089 Result: Up-regulated in Transcription
  misc_feature: MA Experiment ID: 20000090 Result: Up-regulated in Transcription
  misc_feature: MA Experiment ID: 20000093 Result: Up-regulated in Transcription
  misc_feature: MA Experiment 20000093 PARAMETER Experiment Name: At_42deg_Heat_cDNA_P Parameter: Temperature (deg C) Value: 42 vs. 22
  misc_feature: MA Experiment 20000093 PARAMETER Experiment Name: At_42deg_Heat_cDNA_P Parameter: Timepoint (hr) Value: 0.5
  misc_feature: MA Experiment 20000093 PARAMETER Experiment Name: At_42deg_Heat_cDNA_P Parameter: Tissue Value: Aerial
  misc_feature: MA Experiment ID: 20000111 Result: Up-regulated in Transcription
  misc_feature: MA Experiment 20000111 PARAMETER Experiment Name: At_42deg_Heat_cDNA_P Parameter: Temperature (deg C) Value: 42 vs. 22
  misc_feature: MA Experiment 20000111 PARAMETER Experiment Name: At_42deg_Heat_cDNA_P Parameter: Timepoint (hr) Value: 6
  misc_feature: MA Experiment 20000111 PARAMETER Experiment Name: At_42deg_Heat_cDNA_P Parameter: Tissue Value: Aerial
  misc_feature: MA Experiment ID: 20000112 Result: Up-regulated in Transcription
  misc_feature: MA Experiment 20000112 PARAMETER Experiment Name: At_42deg_Heat_cDNA_P Parameter: Temperature (deg C) Value: 42 vs. 22
  misc_feature: MA Experiment 20000112 PARAMETER Experiment Name: At_42deg_Heat_cDNA_P Parameter: Timepoint (hr) Value: 2
  misc_feature: MA Experiment 20000112 PARAMETER Experiment Name: At_42deg_Heat_cDNA_P Parameter: Tissue Value: Aerial
  misc_feature: MA Experiment ID: 20000171 Result: Up-regulated in Transcription
  misc_feature: MA Experiment 20000171 PARAMETER Experiment Name: At_42deg_Heat_P Parameter: Age (day) Value: 14
  misc_feature: MA Experiment 20000171 PARAMETER Experiment Name: At_42deg_Heat_P Parameter: Organism Value: A. thaliana
  misc_feature: MA Experiment 20000171 PARAMETER Experiment Name: At_42deg_Heat_P Parameter: Plant Line Value: WS
  misc_feature: MA Experiment 20000171 PARAMETER Experiment Name: At_42deg_Heat_P Parameter: Temperature (deg C) Value: 42 vs. 22
  misc_feature: MA Experiment 20000171 PARAMETER Experiment Name: At_42deg_Heat_P Parameter: Timepoint (hr) Value: 1
  misc_feature: MA Experiment 20000171 PARAMETER Experiment Name: At_42deg_Heat_P Parameter: Tissue Value: Aerial
  misc_feature: MA Experiment ID: 20000173 Result: Up-regulated in Transcription
  misc_feature: MA Experiment 20000173 PARAMETER Experiment Name: At_42deg_Heat_P Parameter: Age (day) Value: 14
  misc_feature: MA Experiment 20000173 PARAMETER Experiment Name: At_42deg_Heat_P Parameter: Organism Value: A. thaliana
  misc_feature: MA Experiment 20000173 PARAMETER Experiment Name: At_42deg_Heat_P Parameter: Plant Line Value: WS
  misc_feature: MA Experiment 20000173 PARAMETER Experiment Name: At_42deg_Heat_P Parameter: Temperature (deg C) Value: 42 vs. 22
  misc_feature: MA Experiment 20000173 PARAMETER Experiment Name: At_42deg_Heat_P Parameter: Timepoint (hr) Value: 6
  misc_feature: MA Experiment 20000173 PARAMETER Experiment Name: At_42deg_Heat_P Parameter: Tissue Value: Aerial
  misc_feature: MA Experiment ID: 20000179 Result: Up-regulated in Transcription
  misc_feature: MA Experiment 20000179 PARAMETER Experiment Name: At_Germinating_Seeds_P Parameter: Age (hr) Value: 6 vs. 0
  misc_feature: MA Experiment 20000179 PARAMETER Experiment Name: At_Germinating_Seeds_P Parameter: Tissue Value: Germinating Seeds
  misc_feature: MA Experiment ID: 20000182 Result: Up-regulated in Transcription
  misc_feature: MA Experiment 20000182 PARAMETER Experiment Name: At_2mM_SA_P Parameter: Age (day) Value: 14
  misc_feature: MA Experiment 20000182 PARAMETER Experiment Name: At_2mM_SA_P Parameter: Organism Value: A. thaliana
  misc_feature: MA Experiment 20000182 PARAMETER Experiment Name: At_2mM_SA_P Parameter: Plant Line Value: WS
  misc_feature: MA Experiment 20000182 PARAMETER Experiment Name: At_2mM_SA_P Parameter: Timepoint (hr) Value: 6
  misc_feature: MA Experiment 20000182 PARAMETER Experiment Name: At_2mM_SA_P Parameter: Tissue Value: Aerial
  misc_feature: MA Experiment 20000182 PARAMETER Experiment Name: At_2mM_SA_P Parameter: Treatment Value: 2mM SA vs. No Treatment
  misc_feature: MA Experiment ID: 20000224 Result: Up-regulated in Transcription
  misc_feature: MA Experiment ID: 20000227 Result: Up-regulated in Transcription
  misc_feature: MA Experiment 20000227 PARAMETER Experiment Name: At_Root-Tips-vs-Tops_P Parameter: Tissue Value: Root Tips vs. Root Tops
  misc_feature: MA Experiment ID: 20000234 Result: Up-regulated in Transcription
  misc_feature: MA Experiment 20000234 PARAMETER Experiment Name: At_Siliques_P Parameter: Age (day) Value: 21
  misc_feature: MA Experiment 20000234 PARAMETER Experiment Name: At_Siliques_P Parameter: Organism Value: A. thaliana
  misc_feature: MA Experiment 20000234 PARAMETER Experiment Name: At_Siliques_P Parameter: Plant Line Value: WS
  misc_feature: MA Experiment 20000234 PARAMETER Experiment Name: At_Siliques_P Parameter: Tissue Value: Less Than 5mm Siliques vs. Whole Plant
  misc_feature: MA Experiment ID: 20000235 Result: Up-regulated in Transcription
  misc_feature: MA Experiment 20000235 PARAMETER Experiment Name: At_Siliques_P Parameter: Age (day) Value: 21
  misc_feature: MA Experiment 20000235 PARAMETER Experiment Name: At_Siliques_P Parameter: Organism Value: A. thaliana
  misc_feature: MA Experiment 20000235 PARAMETER Experiment Name: At_Siliques_P Parameter: Plant Line Value: WS
  misc_feature: MA Experiment 20000235 PARAMETER Experiment Name: At_Siliques_P Parameter: Tissue Value: 5-10mm Siliques vs. Whole Plant
  misc_feature: MA Experiment ID: 20000495 Result: Up-regulated in Transcription
  misc_feature: MA Experiment 20000495 PARAMETER Experiment Name: At_Guard_Cells_P Parameter: Harvest Date Value: 8/2/2002
  misc_feature: MA Experiment 20000495 PARAMETER Experiment Name: At_Guard_Cells_P Parameter: Organism Value: A. thaliana
  misc_feature: MA Experiment 20000495 PARAMETER Experiment Name: At_Guard_Cells_P Parameter: Tissue Value: Guard Cells vs. Leaves
  misc_feature: MA Experiment ID: 20000794 Result: Down-regulated in Transcription
  misc_feature: MA Experiment 20000794 PARAMETER Experiment Name: At_Petals_P Parameter: Age (day) Value: 23-25 days
  misc_feature: MA Experiment 20000794 PARAMETER Experiment Name: At_Petals_P Parameter: Plant Line Value: WS
  misc_feature: MA Experiment 20000794 PARAMETER Experiment Name: At_Petals_P Parameter: Tissue Value: Petals vs. Whole plant
  misc_feature: MA Experiment ID: 20001450 Result: Down-regulated in Transcription
  misc_feature: MA Experiment 20001450 PARAMETER Experiment Name: At_Far-red-induction_P Parameter: Age (day) Value: 7
  misc_feature: MA Experiment 20001450 PARAMETER Experiment Name: At_Far-red-induction_P Parameter: Light Value: Far-red vs. White
  misc_feature: MA Experiment 20001450 PARAMETER Experiment Name: At_Far-red-induction_P Parameter: Organism Value: A. thaliana
  misc_feature: MA Experiment 20001450 PARAMETER Experiment Name: At_Far-red-induction_P Parameter: Plant Line Value: Columbia
  misc_feature: MA Experiment 20001450 PARAMETER Experiment Name: At_Far-red-induction_P Parameter: Timepoint (hr) Value: 8
  misc_feature: MA Experiment 20001450 PARAMETER Experiment Name: At_Far-red-induction_P Parameter: Tissue Value: Whole Plant
  misc_feature: MA Experiment ID: 20001556 Result: Up-regulated in Transcription
  misc_feature: MA Experiment 20001556 PARAMETER Experiment Name: At_Drought_Soil_Dry_P Parameter: Age (day) Value: 26
  misc_feature: MA Experiment 20001556 PARAMETER Experiment Name: At_Drought_Soil_Dry_P Parameter: Organism Value: A. thaliana
  misc_feature: MA Experiment 20001556 PARAMETER Experiment Name: At_Drought_Soil_Dry_P Parameter: Plant Line Value: WS
  misc_feature: MA Experiment 20001556 PARAMETER Experiment Name: At_Drought_Soil_Dry_P Parameter: Post Timepoint (hr) Value: None
  misc_feature: MA Experiment 20001556 PARAMETER Experiment Name: At_Drought_Soil_Dry_P Parameter: Post-Treatment Value: None
  misc_feature: MA Experiment 20001556 PARAMETER Experiment Name: At_Drought_Soil_Dry_P Parameter: Timepoint (day) Value: 12
  misc_feature: MA Experiment 20001556 PARAMETER Experiment Name: At_Drought_Soil_Dry_P Parameter: Treatment Value: Drought vs. No Drought
  misc_feature: MA Experiment ID: 20001558 Result: Up-regulated in Transcription
  misc_feature: MA Experiment 20001558 PARAMETER Experiment Name: At_Drought_Soil_Dry_P Parameter: Age (day) Value: 27
  misc_feature: MA Experiment 20001558 PARAMETER Experiment Name: At_Drought_Soil_Dry_P Parameter: Organism Value: A. thaliana
  misc_feature: MA Experiment 20001558 PARAMETER Experiment Name: At_Drought_Soil_Dry_P Parameter: Plant Line Value: WS
  misc_feature: MA Experiment 20001558 PARAMETER Experiment Name: At_Drought_Soil_Dry_P Parameter: Post Timepoint (hr) Value: 6
  misc_feature: MA Experiment 20001558 PARAMETER Experiment Name: At_Drought_Soil_Dry_P Parameter: Post-Treatment Value: Re-Water vs. No Drought
  misc_feature: MA Experiment 20001558 PARAMETER Experiment Name: At_Drought_Soil_Dry_P Parameter: Timepoint (day) Value: 13
  misc_feature: MA Experiment 20001558 PARAMETER Experiment Name: At_Drought_Soil_Dry_P Parameter: Treatment Value: Drought vs. No Drought
  misc_feature: MA Experiment ID: 20001560 Result: Up-regulated in Transcription
  misc_feature: MA Experiment 20001560 PARAMETER Experiment Name: At_Drought_Soil_Dry_P Parameter: Age (day) Value: 28
  misc_feature: MA Experiment 20001560 PARAMETER Experiment Name: At_Drought_Soil_Dry_P Parameter: Organism Value: A. thaliana
  misc_feature: MA Experiment 20001560 PARAMETER Experiment Name: At_Drought_Soil_Dry_P Parameter: Plant Line Value: WS
  misc_feature: MA Experiment 20001560 PARAMETER Experiment Name: At_Drought_Soil_Dry_P Parameter: Post Timepoint (hr) Value: None
  misc_feature: MA Experiment 20001560 PARAMETER Experiment Name: At_Drought_Soil_Dry_P Parameter: Post-Treatment Value: None
  misc_feature: MA Experiment 20001560 PARAMETER Experiment Name: At_Drought_Soil_Dry_P Parameter: Timepoint (day) Value: 14
  misc_feature: MA Experiment 20001560 PARAMETER Experiment Name: At_Drought_Soil_Dry_P Parameter: Treatment Value: Drought vs. No Drought

SEQ ID NO: 48353 - protein, 669 aa, Arabidopsis thaliana; identical to SEQ ID NO: 25857
  peptide (1)..(669): Ceres Seq. ID no. 15221053
  misc_feature (34)..(655): Homolog of NCBI NO: 14423732 NR Description: Heat shock 70 kDa protein
  misc_feature (35)..(656): Homolog of NCBI NO: 21263753 NR Description: Heat shock cognate 71 kDa protein (Hsc70.1)
  misc_feature (199)..(669): Homolog of NCBI NO: 168424 NR Description: polypeptide chain-binding protein
  misc_feature (15)..(669): Homolog of NCBI NO: 23480384 NR Description: heat shock protein [Plasmodium yoelii yoelii]
  misc_feature (35)..(669): Homolog of NCBI NO: 29539338 NR Description: Heat shock 70 kDa protein [Cyanidioschyzon
  misc_feature (37)..(669): Homolog of NCBI NO: 1037176 NR Description: immunoglobulin heavy chain binding protein
  misc_feature (1)..(664): Homolog of NCBI NO: 13897312 NR Description: luminal binding protein, BiP [Scherffelia dubia]
  misc_feature (34)..(655): Homolog of NCBI NO: 14423732 NR Description: Heat shock 70 kDa protein
  misc_feature (35)..(656): Homolog of NCBI NO: 21263753 NR Description: Heat shock cognate 71 kDa protein (Hsc70.1)
  misc_feature (199)..(669): Homolog of NCBI NO: 168424 NR Description: polypeptide chain-binding protein
  misc_feature (15)..(669): Homolog of NCBI NO: 23480384 NR Description: heat shock protein [Plasmodium yoelii yoelii]
  misc_feature (35)..(669): Homolog of NCBI NO: 29539338 NR Description: Heat shock 70 kDa protein [Cyanidioschyzon
  misc_feature (37)..(669): Homolog of NCBI NO: 1037176 NR Description: immunoglobulin heavy chain binding protein
  misc_feature (1)..(664): Homolog of NCBI NO: 13897312 NR Description: luminal binding protein, BiP [Scherffelia dubia]
  misc_feature (34)..(655): Homolog of NCBI NO: 14423732 NR Description: Heat shock 70 kDa protein
  misc_feature (35)..(656): Homolog of NCBI NO: 21263753 NR Description: Heat shock cognate 71 kDa protein (Hsc70.1)
  misc_feature (199)..(669): Homolog of NCBI NO: 168424 NR Description: polypeptide chain-binding protein
  misc_feature (15)..(669): Homolog of NCBI NO: 23480384 NR Description: heat shock protein [Plasmodium yoelii yoelii]
  misc_feature (35)..(669): Homolog of NCBI NO: 29539338 NR Description: Heat shock 70 kDa protein [Cyanidioschyzon
  misc_feature (37)..(669): Homolog of NCBI NO: 1037176 NR Description: immunoglobulin heavy chain binding protein
  misc_feature (1)..(664): Homolog of NCBI NO: 13897312 NR Description: luminal binding protein, BiP [Scherffelia dubia]
  misc_feature (34)..(655): Homolog of NCBI NO: 14423732 NR Description: Heat shock 70 kDa protein
  misc_feature (35)..(656): Homolog of NCBI NO: 21263753 NR Description: Heat shock cognate 71 kDa protein (Hsc70.1)
  misc_feature (199)..(669): Homolog of NCBI NO: 168424 NR Description: polypeptide chain-binding protein
  misc_feature (15)..(669): Homolog of NCBI NO: 23480384 NR Description: heat shock protein [Plasmodium yoelii yoelii]
  misc_feature (35)..(669): Homolog of NCBI NO: 29539338 NR Description: Heat shock 70 kDa protein [Cyanidioschyzon
  misc_feature (37)..(669): Homolog of NCBI NO: 1037176 NR Description: immunoglobulin heavy chain binding protein
  misc_feature (1)..(664): Homolog of NCBI NO: 13897312 NR Description: luminal binding protein, BiP [Scherffelia dubia]
  misc_feature (34)..(655): Homolog of NCBI NO: 14423732 NR Description: Heat shock 70 kDa protein
  misc_feature (35)..(656): Homolog of NCBI NO: 21263753 NR Description: Heat shock cognate 71 kDa protein (Hsc70.1)
  misc_feature (199)..(669): Homolog of NCBI NO: 168424 NR Description: polypeptide chain-binding protein
  misc_feature (15)..(669): Homolog of NCBI NO: 23480384 NR Description: heat shock protein [Plasmodium yoelii yoelii]
  misc_feature (35)..(669): Homolog of NCBI NO: 29539338 NR Description: Heat shock 70 kDa protein [Cyanidioschyzon
  misc_feature (37)..(669): Homolog of NCBI NO: 1037176 NR Description: immunoglobulin heavy chain binding protein
  misc_feature (1)..(664): Homolog of NCBI NO: 13897312 NR Description: luminal binding protein, BiP [Scherffelia dubia]

SEQ ID NO: 48354 - protein, 516 aa, Arabidopsis thaliana; identical to SEQ ID NO: 25858
  peptide (1)..(516): Ceres Seq. ID no. 15221054
  misc_feature (1)..(502): Homolog of NCBI NO: 14423732 NR Description: Heat shock 70 kDa protein
  misc_feature (1)..(503): Homolog of NCBI NO: 21263753 NR Description: Heat shock cognate 71 kDa protein (Hsc70.1)
  misc_feature (46)..(516): Homolog of NCBI NO: 168424 NR Description: polypeptide chain-binding protein
  misc_feature (1)..(516): Homolog of NCBI NO: 23480384 NR Description: heat shock protein [Plasmodium yoelii yoelii]
  misc_feature (1)..(516): Homolog of NCBI NO: 29539338 NR Description: Heat shock 70 kDa protein [Cyanidioschyzon
  misc_feature (1)..(516): Homolog of NCBI NO: 1037176 NR Description: immunoglobulin heavy chain binding protein
  misc_feature (1)..(511): Homolog of NCBI NO: 13897312 NR Description: luminal binding protein, BiP [Scherffelia dubia]
  misc_feature (1)..(502): Homolog of NCBI NO: 14423732 NR Description: Heat shock 70 kDa protein
  misc_feature (1)..(503): Homolog of NCBI NO: 21263753 NR Description: Heat shock cognate 71 kDa protein (Hsc70.1)
  misc_feature (46)..(516): Homolog of NCBI NO: 168424 NR Description: polypeptide chain-binding protein
  misc_feature (1)..(516): Homolog of NCBI NO: 23480384 NR Description: heat shock protein [Plasmodium yoelii yoelii]
  misc_feature (1)..(516): Homolog of NCBI NO: 29539338 NR Description: Heat shock 70 kDa protein [Cyanidioschyzon
  misc_feature (1)..(516): Homolog of NCBI NO: 1037176 NR Description: immunoglobulin heavy chain binding protein
  misc_feature (1)..(511): Homolog of NCBI NO: 13897312 NR Description: luminal binding protein, BiP [Scherffelia dubia]
  misc_feature (1)..(502): Homolog of NCBI NO: 14423732 NR Description: Heat shock 70 kDa protein
  misc_feature (1)..(503): Homolog of NCBI NO: 21263753 NR Description: Heat shock cognate 71 kDa protein (Hsc70.1)
  misc_feature (46)..(516): Homolog of NCBI NO: 168424 NR Description: polypeptide chain-binding protein
  misc_feature (1)..(516): Homolog of NCBI NO: 23480384 NR Description: heat shock protein [Plasmodium yoelii yoelii]
  misc_feature (1)..(516): Homolog of NCBI NO: 29539338 NR Description: Heat shock 70 kDa protein [Cyanidioschyzon
  misc_feature (1)..(516): Homolog of NCBI NO: 1037176 NR Description: immunoglobulin heavy chain binding protein
  misc_feature (1)..(511): Homolog of NCBI NO: 13897312 NR Description: luminal binding protein, BiP [Scherffelia dubia]
  misc_feature (1)..(502): Homolog of NCBI NO: 14423732 NR Description: Heat shock 70 kDa protein
  misc_feature (1)..(503): Homolog of NCBI NO: 21263753 NR Description: Heat shock cognate 71 kDa protein (Hsc70.1)
  misc_feature (46)..(516): Homolog of NCBI NO: 168424 NR Description: polypeptide chain-binding protein
  misc_feature (1)..(516): Homolog of NCBI NO: 23480384 NR Description: heat shock protein [Plasmodium yoelii yoelii]
  misc_feature (1)..(516): Homolog of NCBI NO: 29539338 NR Description: Heat shock 70 kDa protein [Cyanidioschyzon
  misc_feature (1)..(516): Homolog of NCBI NO: 1037176 NR Description: immunoglobulin heavy chain binding protein
  misc_feature (1)..(511): Homolog of NCBI NO: 13897312 NR Description: luminal binding protein, BiP [Scherffelia dubia]
  misc_feature (1)..(502): Homolog of NCBI NO: 14423732 NR Description: Heat shock 70 kDa protein
  misc_feature (1)..(503): Homolog of NCBI NO: 21263753 NR Description: Heat shock cognate 71 kDa protein (Hsc70.1)
  misc_feature (46)..(516): Homolog of NCBI NO: 168424 NR Description: polypeptide chain-binding protein
  misc_feature (1)..(516): Homolog of NCBI NO: 23480384 NR Description: heat shock protein [Plasmodium yoelii yoelii]
  misc_feature (1)..(516): Homolog of NCBI NO: 29539338 NR Description: Heat shock 70 kDa protein [Cyanidioschyzon
  misc_feature (1)..(516): Homolog of NCBI NO: 1037176 NR Description: immunoglobulin heavy chain binding protein
  misc_feature (1)..(511): Homolog of NCBI NO: 13897312 NR Description: luminal binding protein, BiP [Scherffelia dubia]

SEQ ID NO: 48355 - protein, 511 aa, Arabidopsis thaliana; identical to SEQ ID NO: 43747
  peptide (1)..(511): Ceres Seq. ID no. 15221055
  misc_feature (1)..(497): Homolog of NCBI NO: 14423732 NR Description: Heat shock 70 kDa protein
  misc_feature (1)..(498): Homolog of NCBI NO: 21263753 NR Description: Heat shock cognate 71 kDa protein (Hsc70.1)
  misc_feature (41)..(511): Homolog of NCBI NO: 168424 NR Description: polypeptide chain-binding protein
  misc_feature (1)..(511): Homolog of NCBI NO: 23480384 NR Description: heat shock protein [Plasmodium yoelii yoelii]
  misc_feature (1)..(511): Homolog of NCBI NO: 29539338 NR Description: Heat shock 70 kDa protein [Cyanidioschyzon
  misc_feature (1)..(511): Homolog of NCBI NO: 1037176 NR Description: immunoglobulin heavy chain binding protein
  misc_feature (1)..(506): Homolog of NCBI NO: 13897312 NR Description: luminal binding protein, BiP [Scherffelia dubia]
  misc_feature (1)..(497): Homolog of NCBI NO: 14423732 NR Description: Heat shock 70 kDa protein
  misc_feature (1)..(498): Homolog of NCBI NO: 21263753 NR Description: Heat shock cognate 71 kDa protein (Hsc70.1)
  misc_feature (41)..(511): Homolog of NCBI NO: 168424 NR Description: polypeptide chain-binding protein
  misc_feature (1)..(511): Homolog of NCBI NO: 23480384 NR Description: heat shock protein [Plasmodium yoelii yoelii]
  misc_feature (1)..(511): Homolog of NCBI NO: 29539338 NR Description: Heat shock 70 kDa protein [Cyanidioschyzon
  misc_feature (1)..(511): Homolog of NCBI NO: 1037176 NR Description: immunoglobulin heavy chain binding protein
  misc_feature (1)..(506): Homolog of NCBI NO: 13897312 NR Description: luminal binding protein, BiP [Scherffelia dubia]
  misc_feature (1)..(497): Homolog of NCBI NO: 14423732 NR Description: Heat shock 70 kDa protein
  misc_feature (1)..(498): Homolog of NCBI NO: 21263753 NR Description: Heat shock cognate 71 kDa protein (Hsc70.1)
  misc_feature (41)..(511): Homolog of NCBI NO: 168424 NR Description: polypeptide chain-binding protein
  misc_feature (1)..(511): Homolog of NCBI NO: 23480384 NR Description: heat shock protein [Plasmodium yoelii yoelii]
  misc_feature (1)..(511): Homolog of NCBI NO: 29539338 NR Description: Heat shock 70 kDa protein [Cyanidioschyzon
  misc_feature (1)..(511): Homolog of NCBI NO: 1037176 NR Description: immunoglobulin heavy chain binding protein
  misc_feature (1)..(506): Homolog of NCBI NO: 13897312 NR Description: luminal binding protein, BiP [Scherffelia dubia]
  misc_feature (1)..(497): Homolog of NCBI NO: 14423732 NR Description: Heat shock 70 kDa protein
  misc_feature (1)..(498): Homolog of NCBI NO: 21263753 NR Description: Heat shock cognate 71 kDa protein (Hsc70.1)
  misc_feature (41)..(511): Homolog of NCBI NO: 168424 NR Description: polypeptide chain-binding protein
  misc_feature (1)..(511): Homolog of NCBI NO: 23480384 NR Description: heat shock protein [Plasmodium yoelii yoelii]
  misc_feature (1)..(511): Homolog of NCBI NO: 29539338 NR Description: Heat shock 70 kDa protein [Cyanidioschyzon
  misc_feature (1)..(511): Homolog of NCBI NO: 1037176 NR Description: immunoglobulin heavy chain binding protein
  misc_feature (1)..(506): Homolog of NCBI NO: 13897312 NR Description: luminal binding protein, BiP [Scherffelia dubia]
  misc_feature (1)..(497): Homolog of NCBI NO: 14423732 NR Description: Heat shock 70 kDa protein
  misc_feature (1)..(498): Homolog of NCBI NO: 21263753 NR Description: Heat shock cognate 71 kDa protein (Hsc70.1)
  misc_feature (41)..(511): Homolog of NCBI NO: 168424 NR Description: polypeptide chain-binding protein
  misc_feature (1)..(511): Homolog of NCBI NO: 23480384 NR Description: heat shock protein [Plasmodium yoelii yoelii]
  misc_feature (1)..(511): Homolog of NCBI NO: 29539338 NR Description: Heat shock 70 kDa protein [Cyanidioschyzon
  misc_feature (1)..(511): Homolog of NCBI NO: 1037176 NR Description: immunoglobulin heavy chain binding protein
  misc_feature (1)..(506): Homolog of NCBI NO: 13897312 NR Description: luminal binding protein, BiP [Scherffelia dubia]

SEQ ID NO: 48356 - DNA, 955 bp, Arabidopsis thaliana
  misc_feature (1)..(955): Ceres Seq. ID no. 13650008
  misc_feature: MA Experiment ID: 20000794 Result: Down-regulated in Transcription
  misc_feature: MA Experiment 20000794 PARAMETER Experiment Name: At_Petals_P Parameter: Age (day) Value: 23-25 days
  misc_feature: MA Experiment 20000794 PARAMETER Experiment Name: At_Petals_P Parameter: Plant Line Value: WS
  misc_feature: MA Experiment 20000794 PARAMETER Experiment Name: At_Petals_P Parameter: Tissue Value: Petals vs. Whole plant
  misc_feature: MA Experiment ID: 20001905 Result: Up-regulated in Transcription
  misc_feature: MA Experiment 20001905 PARAMETER Experiment Name: At_Drought_Reproduction_P Parameter: Age (day) Value: 40
  misc_feature: MA Experiment 20001905 PARAMETER Experiment Name: At_Drought_Reproduction_P Parameter: Organism Value: A. thaliana
  misc_feature: MA Experiment 20001905 PARAMETER Experiment Name: At_Drought_Reproduction_P Parameter: Plant Line Value: WS
  misc_feature: MA Experiment 20001905 PARAMETER Experiment Name: At_Drought_Reproduction_P Parameter: Timepoint (day) Value: 10
  misc_feature: MA Experiment 20001905 PARAMETER Experiment Name: At_Drought_Reproduction_P Parameter: Tissue Value: Rosettes
  misc_feature: MA Experiment 20001905 PARAMETER Experiment Name: At_Drought_Reproduction_P Parameter: Treatment Value: Drought vs. No Drought
ggtgagtccaaagggcaaaaaggaagaaatagaaaccaaagccatggagaagatgatagaaccacgggacaacacaagagaatcagaagatgaggatgcgttaaagcttccagggtttaggtttcatccgacggatgaggagcttgtagggtattatctctctaaaaaagtgcttctcaaaaaaacgagcaagatcgatgagatcgtgagtcaaatcgatatctataaatttgatccgtgggatcttccaaggtcgaggaatacagagaaggagagctacttcttttgtaagagaggaaggaaatacagaaacagcataagaccgaaccgagtgactggttccggtttctggaaagccacagggatagacaagcctgtctattccgatggatccaacaaagccgtgatcggtctaaagaagacactcgtttattacctaggaagcgccgggaaaggaaacaagacggattggatgatgcacgagtttcgtctccctacagccaatgacacaatccccggtggccctacacactctaaccctactccaacttccttgctacacgcggaagtatggacgttatgccggatatttaagagaactgtgtctagtcgaaaatacactccggactggagagaattagcaaatggcaaacgtgtgaagcagcaacaatctaattaccaagaagcttatataaattttggggacaatgaaagtagtagtagtaccaacgtgatgaacgttagggaaggcaaagggaactacgagagaagcgttttccagcttcagcaaacgccttatcaacatcaaaaccagccaattctcatggacaccacacacgttgattcgtttcaacatttctccaacgataacattcaccatgaaacctacgagacttggccggacgagcttcgatcggttgtggaatttgctttcccaccttcttttcttagttag

SEQ ID NO: 48357 - protein, 317 aa, Arabidopsis thaliana
  peptide (1)..(317): Ceres Seq. ID no. 13650009
  misc_feature (35)..(165): Pfam Name: No apical meristem (NAM) protein Pfam Description: No apical meristem (NAM) protein
  misc_feature (37)..(241): Homolog of NCBI NO: 25352286 NR Description: hypothetical protein F11P17.16 [imported] -
  misc_feature (37)..(241): Homolog of NCBI NO: 18407026 NR Description: No apical meristem (NAM) protein family
  misc_feature (23)..(210): Homolog of NCBI NO: 15242479 NR Description: No apical meristem (NAM) protein family
  misc_feature (23)..(210): Homolog of NCBI NO: 10177980 NR Description: NAM (no apical meristem)-like protein
  misc_feature (22)..(200): Homolog of NCBI NO: 25518578 NR Description: hypothetical protein T2P11.6 - Arabidopsis
  misc_feature (22)..(200): Homolog of NCBI NO: 15223376 NR Description: No apical meristem (NAM) protein family
  misc_feature (27)..(205): Homolog of NCBI NO: 27260923 NR Description: OJ1417_E01.2 [Oryza sativa (japonica
  misc_feature (27)..(293): Homolog of NCBI NO: 34897020 NR Description: putative NAM (no apical meristem) protein
  misc_feature (26)..(207): Homolog of NCBI NO: 15224202 NR Description: No apical meristem (NAM) protein family
  misc_feature (158)..(317): Homolog of NCBI NO: 15230629 NR Description: expressed protein [Arabidopsis thaliana]
VSPKGKKEEIETKAMEKMIEPRDNTRESEDEDALKLPGFRFHPTDEELVGYYLSKKVLLKKTSKIDEIVSQIDIYKFDPWDLPRSRNTEKESYFFCKRGRKYRNSIRPNRVTGSGFWKATGIDKPVYSDGSNKAVIGLKKTLVYYLGSAGKGNKTDWMMHEFRLPTANDTIPGGPTHSNPTPTSLLHAEVWTLCRIFKRTVSSRKYTPDWRELANGKRVKQQQSNYQEAYINFGDNESSSSTNVMNVREGKGNYERSVFQLQQTPYQHQNQPILMDTTHVDSFQHFSNDNIHHETYETWPDELRSVVEFAFPPSFLS

SEQ ID NO: 48358 - protein, 303 aa, Arabidopsis thaliana
  peptide (1)..(303): Ceres Seq. ID no. 13650010
  misc_feature (21)..(151): Pfam Name: No apical meristem (NAM) protein Pfam Description: No apical meristem (NAM) protein
  misc_feature (23)..(227): Homolog of NCBI NO: 25352286 NR Description: hypothetical protein F11P17.16 [imported] -
  misc_feature (23)..(227): Homolog of NCBI NO: 18407026 NR Description: No apical meristem (NAM) protein family
  misc_feature (9)..(196): Homolog of NCBI NO: 15242479 NR Description: No apical meristem (NAM) protein family
  misc_feature (9)..(196): Homolog of NCBI NO: 10177980 NR Description: NAM (no apical meristem)-like protein
  misc_feature (8)..(186): Homolog of NCBI NO: 25518578 NR Description: hypothetical protein T2P11.6 - Arabidopsis
  misc_feature (8)..(186): Homolog of NCBI NO: 15223376 NR Description: No apical meristem (NAM) protein family
  misc_feature (13)..(191): Homolog of NCBI NO: 27260923 NR Description: OJ1417_E01.2 [Oryza sativa (japonica
  misc_feature (13)..(279): Homolog of NCBI NO: 34897020 NR Description: putative NAM (no apical meristem) protein
  misc_feature (12)..(193): Homolog of NCBI NO: 15224202 NR Description: No apical meristem (NAM) protein family
  misc_feature (144)..(303): Homolog of NCBI NO: 15230629 NR Description: expressed protein [Arabidopsis thaliana]
MEKMIEPRDNTRESEDEDALKLPGFRFHPTDEELVGYYLSKKVLLKKTSKIDEIVSQIDIYKFDPWDLPRSRNTEKESYFFCKRGRKYRNSIRPNRVTGSGFWKATGIDKPVYSDGSNKAVIGLKKTLVYYLGSAGKGNKTDWMMHEFRLPTANDTIPGGPTHSNPTPTSLLHAEVWTLCRIFKRTVSSRKYTPDWRELANGKRVKQQQSNYQEAYINFGDNESSSSTNVMNVREGKGNYERSVFQLQQTPYQHQNQPILMDTTHVDSFQHFSNDNIHHETYETWPDELRSVVEFAFPPSFLS

SEQ ID NO: 48359 - protein, 300 aa, Arabidopsis thaliana
  peptide (1)..(300): Ceres Seq. ID no. 13650011
  misc_feature (18)..(148): Pfam Name: No apical meristem (NAM) protein Pfam Description: No apical meristem (NAM) protein
  misc_feature (20)..(224): Homolog of NCBI NO: 25352286 NR Description: hypothetical protein F11P17.16 [imported] -
  misc_feature (20)..(224): Homolog of NCBI NO: 18407026 NR Description: No apical meristem (NAM) protein family
  misc_feature (6)..(193): Homolog of NCBI NO: 15242479 NR Description: No apical meristem (NAM) protein family
  misc_feature (6)..(193): Homolog of NCBI NO: 10177980 NR Description: NAM (no apical meristem)-like protein
  misc_feature (5)..(183): Homolog of NCBI NO: 25518578 NR Description: hypothetical protein T2P11.6 - Arabidopsis
  misc_feature (5)..(183): Homolog of NCBI NO: 15223376 NR Description: No apical meristem (NAM) protein family
  misc_feature (10)..(188): Homolog of NCBI NO: 27260923 NR Description: OJ1417_E01.2 [Oryza sativa (japonica
  misc_feature (10)..(276): Homolog of NCBI NO: 34897020 NR Description: putative NAM (no apical meristem) protein
  misc_feature (9)..(190): Homolog of NCBI NO: 15224202 NR Description: No apical meristem (NAM) protein family
  misc_feature (141)..(300): Homolog of NCBI NO: 15230629 NR Description: expressed protein [Arabidopsis thaliana]
MIEPRDNTRESEDEDALKLPGFRFHPTDEELVGYYLSKKVLLKKTSKIDEIVSQIDIYKFDPWDLPRSRNTEKESYFFCKRGRKYRNSIRPNRVTGSGFWKATGIDKPVYSDGSNKAVIGLKKTLVYYLGSAGKGNKTDWMMHEFRLPTANDTIPGGPTHSNPTPTSLLHAEVWTLCRIFKRTVSSRKYTPDWRELANGKRVKQQQSNYQEAYINFGDNESSSSTNVMNVREGKGNYERSVFQLQQTPYQHQNQPILMDTTHVDSFQHFSNDNIHHETYETWPDELRSVVEFAFPPSFLS

SEQ ID NO: 48360 - DNA, 1401 bp, Arabidopsis thaliana
  misc_feature (1)..(1401): Ceres Seq. ID no. 13649216
  misc_feature: MA Experiment ID: 20000227 Result: Down-regulated in Transcription
  misc_feature: MA Experiment 20000227 PARAMETER Experiment Name: At_Root-Tips-vs-Tops_P Parameter: Tissue Value: Root Tips vs. Root Tops
  misc_feature: MA Experiment ID: 20000234 Result: Down-regulated in Transcription
  misc_feature: MA Experiment 20000234 PARAMETER Experiment Name: At_Siliques_P Parameter: Age (day) Value: 21
  misc_feature: MA Experiment 20000234 PARAMETER Experiment Name: At_Siliques_P Parameter: Organism Value: A. thaliana
  misc_feature: MA Experiment 20000234 PARAMETER Experiment Name: At_Siliques_P Parameter: Plant Line Value: WS
  misc_feature: MA Experiment 20000234 PARAMETER Experiment Name: At_Siliques_P Parameter: Tissue Value: Less Than 5mm Siliques vs. Whole Plant
  misc_feature: MA Experiment ID: 20000235 Result: Down-regulated in Transcription
  misc_feature: MA Experiment 20000235 PARAMETER Experiment Name: At_Siliques_P Parameter: Age (day) Value: 21
  misc_feature: MA Experiment 20000235 PARAMETER Experiment Name: At_Siliques_P Parameter: Organism Value: A. thaliana
  misc_feature: MA Experiment 20000235 PARAMETER Experiment Name: At_Siliques_P Parameter: Plant Line Value: WS
  misc_feature: MA Experiment 20000235 PARAMETER Experiment Name: At_Siliques_P Parameter: Tissue Value: 5-10mm Siliques vs. Whole Plant
  misc_feature: MA Experiment ID: 20000264 Result: Down-regulated in Transcription
  misc_feature: MA Experiment 20000264 PARAMETER Experiment Name: At_Open_Flower_P Parameter: Age (day) Value: 21
  misc_feature: MA Experiment 20000264 PARAMETER Experiment Name: At_Open_Flower_P Parameter: Plant Line Value: WS
  misc_feature: MA Experiment 20000264 PARAMETER Experiment Name: At_Open_Flower_P Parameter: Tissue Value: Open Flower vs. Whole Plant
  misc_feature: MA Experiment ID: 20000265 Result: Down-regulated in Transcription
  misc_feature: MA Experiment 20000265 PARAMETER Experiment Name: At_Open_Flower_P Parameter: Age (day) Value: 21
  misc_feature: MA Experiment 20000265 PARAMETER Experiment Name: At_Open_Flower_P Parameter: Plant Line Value: WS
  misc_feature: MA Experiment 20000265 PARAMETER Experiment Name: At_Open_Flower_P Parameter: Tissue Value: Closed Flower vs. Whole Plant
  misc_feature: MA Experiment ID: 20000286 Result: Down-regulated in Transcription
  misc_feature: MA Experiment 20000286 PARAMETER Experiment Name: At_Open_Flower_P Parameter: Age (day) Value: 21
  misc_feature: MA Experiment 20000286 PARAMETER Experiment Name: At_Open_Flower_P Parameter: Plant Line Value: WS
  misc_feature: MA Experiment 20000286 PARAMETER Experiment Name: At_Open_Flower_P Parameter: Tissue Value: Half Open vs. Whole Plant
  misc_feature: MA Experiment ID: 20000441 Result: Up-regulated in Transcription
  misc_feature: MA Experiment 20000441 PARAMETER Experiment Name: At_1uM_BR-BRZ__P Parameter: Tissue Value: Shoot Apices
  misc_feature: MA Experiment 20000441 PARAMETER Experiment Name: At_1uM_BR-BRZ__P Parameter: Treatment Value: 1uM BR vs. No Treatment
  misc_feature: MA Experiment ID: 20000573 Result: Up-regulated in Transcription
  misc_feature: MA Experiment 20000573 PARAMETER Experiment Name: At_100uM_ABA_Mutants__P Parameter: Organism Value: A. thaliana
  misc_feature: MA Experiment 20000573 PARAMETER Experiment Name: At_100uM_ABA_Mutants__P Parameter: Plant Line Value: CS22 vs. Ler wt
  misc_feature: MA Experiment 20000573 PARAMETER Experiment Name: At_100uM_ABA_Mutants__P Parameter: Timepoint (hr) Value: N/A
  misc_feature: MA Experiment 20000573 PARAMETER Experiment Name: At_100uM_ABA_Mutants__P Parameter: Tissue Value: Whole Plant
  misc_feature: MA Experiment 20000573 PARAMETER Experiment Name: At_100uM_ABA_Mutants__P Parameter: Treatment Value: None
  misc_feature: MA Experiment ID: 20001247 Result: Up-regulated in Transcription
  misc_feature: MA Experiment 20001247 PARAMETER Experiment Name: At_Far-red-induction_P Parameter: Age (day) Value: 7
  misc_feature: MA Experiment 20001247 PARAMETER Experiment Name: At_Far-red-induction_P Parameter: Light Value: Far-red vs. White
  misc_feature: MA Experiment 20001247 PARAMETER Experiment Name: At_Far-red-induction_P Parameter: Organism Value: A. thaliana
  misc_feature: MA Experiment 20001247 PARAMETER Experiment Name: At_Far-red-induction_P Parameter: Plant Line Value: Columbia
  misc_feature: MA Experiment 20001247 PARAMETER Experiment Name: At_Far-red-induction_P Parameter: Timepoint (hr) Value: 1
  misc_feature: MA Experiment 20001247 PARAMETER Experiment Name: At_Far-red-induction_P Parameter: Tissue Value: Whole Plant
  misc_feature: MA Experiment ID: 20001248 Result: Up-regulated in Transcription
  misc_feature: MA Experiment 20001248 PARAMETER Experiment Name: At_Far-red-induction_P Parameter: Age (day) Value: 7
  misc_feature: MA Experiment 20001248 PARAMETER Experiment Name: At_Far-red-induction_P Parameter: Light Value: Far-red vs. White
  misc_feature: MA Experiment 20001248 PARAMETER Experiment Name: At_Far-red-induction_P Parameter: Organism Value: A. thaliana
  misc_feature: MA Experiment 20001248 PARAMETER Experiment Name: At_Far-red-induction_P Parameter: Plant Line Value: Columbia
  misc_feature: MA Experiment 20001248 PARAMETER Experiment Name: At_Far-red-induction_P Parameter: Timepoint (hr) Value: 4
  misc_feature: MA Experiment 20001248 PARAMETER Experiment Name: At_Far-red-induction_P Parameter: Tissue Value: Whole Plant
  misc_feature: MA Experiment ID: 20001450 Result: Up-regulated in Transcription
  misc_feature: MA Experiment 20001450 PARAMETER Experiment Name: At_Far-red-induction_P Parameter: Age (day) Value: 7
  misc_feature: MA Experiment 20001450 PARAMETER Experiment Name: At_Far-red-induction_P Parameter: Light Value: Far-red vs. White
  misc_feature: MA Experiment 20001450 PARAMETER Experiment Name: At_Far-red-induction_P Parameter: Organism Value: A. thaliana
  misc_feature: MA Experiment 20001450 PARAMETER Experiment Name: At_Far-red-induction_P Parameter: Plant Line Value: Columbia
  misc_feature: MA Experiment 20001450 PARAMETER Experiment Name: At_Far-red-induction_P Parameter: Timepoint (hr) Value: 8
  misc_feature: MA Experiment 20001450 PARAMETER Experiment Name: At_Far-red-induction_P Parameter: Tissue Value: Whole Plant
  misc_feature: MA Experiment ID: 20001557 Result: Down-regulated in Transcription
  misc_feature: MA Experiment 20001557 PARAMETER Experiment Name: At_Drought_Soil_Dry_P Parameter: Age (day) Value: 27
  misc_feature: MA Experiment 20001557 PARAMETER Experiment Name: At_Drought_Soil_Dry_P Parameter: Organism Value: A. thaliana
  misc_feature: MA Experiment 20001557 PARAMETER Experiment Name: At_Drought_Soil_Dry_P Parameter: Plant Line Value: WS
  misc_feature: MA Experiment 20001557 PARAMETER Experiment Name: At_Drought_Soil_Dry_P Parameter: Post Timepoint (hr) Value: 3
  misc_feature: MA Experiment 20001557 PARAMETER Experiment Name: At_Drought_Soil_Dry_P Parameter: Post-Treatment Value: Re-Water vs. No Drought
  misc_feature: MA Experiment 20001557 PARAMETER Experiment Name: At_Drought_Soil_Dry_P Parameter: Timepoint (day) Value: 13
  misc_feature: MA Experiment 20001557 PARAMETER Experiment Name: At_Drought_Soil_Dry_P Parameter: Treatment Value: Drought vs. No Drought
  misc_feature: MA Experiment ID: 20001558 Result: Down-regulated in Transcription
  misc_feature: MA Experiment 20001558 PARAMETER Experiment Name: At_Drought_Soil_Dry_P Parameter: Age (day) Value: 27
  misc_feature: MA Experiment 20001558 PARAMETER Experiment Name: At_Drought_Soil_Dry_P Parameter: Organism Value: A. thaliana
  misc_feature: MA Experiment 20001558 PARAMETER Experiment Name: At_Drought_Soil_Dry_P Parameter: Plant Line Value: WS
  misc_feature: MA Experiment 20001558 PARAMETER Experiment Name: At_Drought_Soil_Dry_P Parameter: Post Timepoint (hr) Value: 6
  misc_feature: MA Experiment 20001558 PARAMETER Experiment Name: At_Drought_Soil_Dry_P Parameter: Post-Treatment Value: Re-Water vs. No Drought
  misc_feature: MA Experiment 20001558 PARAMETER Experiment Name: At_Drought_Soil_Dry_P Parameter: Timepoint (day) Value: 13
  misc_feature: MA Experiment 20001558 PARAMETER Experiment Name: At_Drought_Soil_Dry_P Parameter: Treatment Value: Drought vs. No Drought
  misc_feature: MA Experiment ID: 20001560 Result: Down-regulated in Transcription
  misc_feature: MA Experiment 20001560 PARAMETER Experiment Name: At_Drought_Soil_Dry_P Parameter: Age (day) Value: 28
  misc_feature: MA Experiment 20001560 PARAMETER Experiment Name: At_Drought_Soil_Dry_P Parameter: Organism Value: A. thaliana
  misc_feature: MA Experiment 20001560 PARAMETER Experiment Name: At_Drought_Soil_Dry_P Parameter: Plant Line Value: WS
  misc_feature: MA Experiment 20001560 PARAMETER Experiment Name: At_Drought_Soil_Dry_P Parameter: Post Timepoint (hr) Value: None
  misc_feature: MA Experiment 20001560 PARAMETER Experiment Name: At_Drought_Soil_Dry_P Parameter: Post-Treatment Value: None
  misc_feature: MA Experiment 20001560 PARAMETER Experiment Name: At_Drought_Soil_Dry_P Parameter: Timepoint (day) Value: 14
  misc_feature: MA Experiment 20001560 PARAMETER Experiment Name: At_Drought_Soil_Dry_P Parameter: Treatment Value: Drought vs. No Drought
gaattttcagttttcattaccatttcctcttcaccggggaaaattctgttagtttctttcgccggtagttgaaagaaaatgtctcctgcgatcaaagcaccgctcttaccaaaccaagagccttcatcatcatcatcggagaaccatggatcattcgccggagctgtgtttaacatctcgacaagcatcgtcggagctggaattatggcgattccggcggctttcaaagtcctaggtgtaatcccatctctatcgataatcgtaatcatagcttggctctccaatgtatcagctgggtttttaatgaaatccagtctcgccggagaatcaacaacttacgccggcgtgatgaaggaatcgttcggaaaatctggtgccgttgctgttacggttgttacaatggttgtgacttttgggtctatgattattttctcgattatcattggtgatgttatttcgggtaatgagaaagatggaatcatacatttaggtcttcttcaagaatggtttggttctcattggtggaatacgagattctttggtttgttgttcatctttgtcttcctcttccttcctttagtcttatgcagacgtgtagaaagattggcatttagttctgcaatttcgtttctgcttgcgttactctttgttgtcataagctcggtgttagcgattattgctctcgtgcaagggaagacaaagcctccgagactcttccctgaactcaatgatggtggattatcgtttttcagtctcttcactgcttcccctgtcattgtaacagccttcacctttcatttcaatgtccatccagtagcattcgaactcaaagatccattaaatgtgctttcagcaacaaggatctctgtgattctgtgtgctacgatctactcagctactggtctcttttgttaccttctgtttggggattccactatgacagatgttctaatgaactttgatcaaagcaccagttcttcggttggttcattactaaatgatattgttagactcagctacgcgattcacctcatgctcgtgtttcctctgctcaacttctcgcttagagccaacctcgacgaactcttgttccctatgaagctttctttagtggaagacaacaaaagattcttcgcactcacttttccattactgatatcttgtttcttgggtgcaattgccataccagacatttggtacttctttcagttcttgggatcaacttctacagtctctatagcattcatctttccagctgcaattgtcctacggaatgtaaatggtttctcgactttaagagagaagattgtagcttcagtaatgcttgttcttgctgttgccacaagtatcatcgctatttcgacaaatatatacactttcacagcaacagaagaaacatga

SEQ ID NO: 48361 - protein, 440 aa, Arabidopsis thaliana
  peptide (1)..(440): Ceres Seq. ID no. 13649217
  misc_feature (28)..(197): Pfam Name: Tryptophan/tyrosine permease family Pfam Description: Tryptophan/tyrosine permease family
  misc_feature (15)..(311): Homolog of NCBI NO: 24461850 NR Description: CTV.3 [Poncirus trifoliata]
  misc_feature (20)..(439): Homolog of NCBI NO: 18412864 NR Description: amino acid transporter family [Arabidopsis
  misc_feature (2)..(398): Homolog of NCBI NO: 34907894 NR Description: P0439E11.11 [Oryza sativa (japonica
  misc_feature (7)..(432): Homolog of NCBI NO: 15241555 NR Description: amino acid transporter family [Arabidopsis
  misc_feature (7)..(432): Homolog of NCBI NO: 9758059 NR Description: amino acid transporter-like protein [Arabidopsis
  misc_feature (5)..(432): Homolog of NCBI NO: 18406463 NR Description: amino acid transporter family [Arabidopsis
  misc_feature (8)..(433): Homolog of NCBI NO: 34898706 NR Description: hypothetical protein [Oryza sativa (japonica
  misc_feature (47)..(440): Homolog of NCBI NO: 25408697 NR Description: hypothetical protein At2g40420 [imported] -
  misc_feature (1)..(436): Homolog of NCBI NO: 15228851 NR Description: amino acid transporter family [Arabidopsis
  misc_feature (1)..(440): Homolog of NCBI NO: 30688270 NR Description: amino acid transporter family [Arabidopsis
MSPAIKAPLLPNQEPSSSSSENHGSFAGAVFNISTSIVGAGIMAIPAAFKVLGVIPSLSIIVIIAWLSNVSAGFLMKSSLAGESTTYAGVMKESFGKSGAVAVTVVTMVVTFGSMIIFSIIIGDVISGNEKDGIIHLGLLQEWFGSHWWNTRFFGLLFIFVFLFLPLVLCRRVERLAFSSAISFLLALLFVVISSVLAIIALVQGKTKPPRLFPELNDGGLSFFSLFTASPVIVTAFTFHFNVHPVAFELKDPLNVLSATRISVILCATIYSATGLFCYLLFGDSTMTDVLMNFDQSTSSSVGSLLNDIVRLSYAIHLMLVFPLLNFSLRANLDELLFPMKLSLVEDNKRFFALTFPLLISCFLGAIAIPDIWYFFQFLGSTSTVSIAFIFPAAIVLRNVNGFSTLREKIVASVMLVLAVATSIIAISTNIYTFTATEET

SEQ ID NO: 48362 - protein, 398 aa, Arabidopsis thaliana
  peptide (1)..(398): Ceres Seq. ID no. 13649218
  misc_feature (1)..(155): Pfam Name: Tryptophan/tyrosine permease family Pfam Description: Tryptophan/tyrosine permease family
  misc_feature (1)..(269): Homolog of NCBI NO: 24461850 NR Description: CTV.3 [Poncirus trifoliata]
  misc_feature (1)..(397): Homolog of NCBI NO: 18412864 NR Description: amino acid transporter family [Arabidopsis
  misc_feature (1)..(356): Homolog of NCBI NO: 34907894 NR Description: P0439E11.11 [Oryza sativa (japonica
  misc_feature (1)..(390): Homolog of NCBI NO: 15241555 NR Description: amino acid transporter family [Arabidopsis
  misc_feature (1)..(390): Homolog of NCBI NO: 9758059 NR Description: amino acid transporter-like protein [Arabidopsis
  misc_feature (1)..(390): Homolog of NCBI NO: 18406463 NR Description: amino acid transporter family [Arabidopsis
  misc_feature (1)..(391): Homolog of NCBI NO: 34898706 NR Description: hypothetical protein [Oryza sativa (japonica
  misc_feature (5)..(398): Homolog of NCBI NO: 25408697 NR Description: hypothetical protein At2g40420 [imported] -
  misc_feature (1)..(394): Homolog of NCBI NO: 15228851 NR Description: amino acid transporter family [Arabidopsis
  misc_feature (1)..(398): Homolog of NCBI NO: 30688270 NR Description: amino acid transporter family [Arabidopsis
MAIPAAFKVLGVIPSLSIIVIIAWLSNVSAGFLMKSSLAGESTTYAGVMKESFGKSGAVAVTVVTMVVTFGSMIIFSIIIGDVISGNEKDGIIHLGLLQEWFGSHWWNTRFFGLLFIFVFLFLPLVLCRRVERLAFSSAISFLLALLFVVISSVLAIIALVQGKTKPPRLFPELNDGGLSFFSLFTASPVIVTAFTFHFNVHPVAFELKDPLNVLSATRISVILCATIYSATGLFCYLLFGDSTMTDVLMNFDQSTSSSVGSLLNDIVRLSYAIHLMLVFPLLNFSLRANLDELLFPMKLSLVEDNKRFFALTFPLLISCFLGAIAIPDIWYFFQFLGSTSTVSIAFIFPAAIVLRNVNGFSTLREKIVASVMLVLAVATSIIAISTNIYTFTATEET

SEQ ID NO: 48363 - protein, 365 aa, Arabidopsis thaliana
  peptide (1)..(365): Ceres Seq. ID no. 13649219
  misc_feature (1)..(122): Pfam Name: Tryptophan/tyrosine permease family Pfam Description: Tryptophan/tyrosine permease family
  misc_feature (1)..(236): Homolog of NCBI NO: 24461850 NR Description: CTV.3 [Poncirus trifoliata]
  misc_feature (1)..(364): Homolog of NCBI NO: 18412864 NR Description: amino acid transporter family [Arabidopsis
  misc_feature (1)..(323): Homolog of NCBI NO: 34907894 NR Description: P0439E11.11 [Oryza sativa (japonica
  misc_feature (1)..(357): Homolog of NCBI NO: 15241555 NR Description: amino acid transporter family [Arabidopsis
  misc_feature (1)..(357): Homolog of NCBI NO: 9758059 NR Description: amino acid transporter-like protein [Arabidopsis
  misc_feature (1)..(357): Homolog of NCBI NO: 18406463 NR Description: amino acid transporter family [Arabidopsis
  misc_feature (1)..(358): Homolog of NCBI NO: 34898706 NR Description: hypothetical protein [Oryza sativa (japonica
  misc_feature (1)..(365): Homolog of NCBI NO: 25408697 NR Description: hypothetical protein At2g40420 [imported] -
  misc_feature (1)..(361): Homolog of NCBI NO: 15228851 NR Description: amino acid transporter family [Arabidopsis
  misc_feature (1)..(365): Homolog of NCBI NO: 30688270 NR Description: amino acid transporter family [Arabidopsis
MKSSLAGESTTYAGVMKESFGKSGAVAVTVVTMVVTFGSMIIFSIIIGDVISGNEKDGIIHLGLLQEWFGSHWWNTRFFGLLFIFVFLFLPLVLCRRVERLAFSSAISFLLALLFVVISSVLAIIALVQGKTKPPRLFPELNDGGLSFFSLFTASPVIVTAFTFHFNVHPVAFELKDPLNVLSATRISVILCATIYSATGLFCYLLFGDSTMTDVLMNFDQSTSSSVGSLLNDIVRLSYAIHLMLVFPLLNFSLRANLDELLFPMKLSLVEDNKRFFALTFPLLISCFLGAIAIPDIWYFFQFLGSTSTVSIAFIFPAAIVLRNVNGFSTLREKIVASVMLVLAVATSIIAISTNIYTFTATEET

SEQ ID NO: 48364 - DNA, 1322 bp, Arabidopsis thaliana
  misc_feature (1)..(1322): Ceres Seq. ID no. 13649220
  misc_feature: MA Experiment ID: 20000184 Result: Down-regulated in Transcription
  misc_feature: MA Experiment 20000184 PARAMETER Experiment Name: At_Shoots__P Parameter: Age (day) Value: 7
  misc_feature: MA Experiment 20000184 PARAMETER Experiment Name: At_Shoots__P Parameter: Tissue Value: Shoots vs. Whole Plant
  misc_feature: MA Experiment ID: 20000436 Result: Up-regulated in Transcription
  misc_feature: MA Experiment 20000436 PARAMETER Experiment Name: At_Drought_P Parameter: Age (day) Value: 7
  misc_feature: MA Experiment 20000436 PARAMETER Experiment Name: At_Drought_P Parameter: Organism Value: A. thaliana
  misc_feature: MA Experiment 20000436 PARAMETER Experiment Name: At_Drought_P Parameter: Plant Line Value: WS
  misc_feature: MA Experiment 20000436 PARAMETER Experiment Name: At_Drought_P Parameter: Timepoint (hr) Value: 12
  misc_feature: MA Experiment 20000436 PARAMETER Experiment Name: At_Drought_P Parameter: Tissue Value: Whole Plant
  misc_feature: MA Experiment 20000436 PARAMETER Experiment Name: At_Drought_P Parameter: Treatment Value: Drought vs. No Drought
  misc_feature: MA Experiment ID: 20000437 Result: Up-regulated in Transcription
  misc_feature: MA Experiment 20000437 PARAMETER Experiment Name: At_Drought_P Parameter: Age (day) Value: 8
  misc_feature: MA Experiment 20000437 PARAMETER Experiment Name: At_Drought_P Parameter: Organism Value: A. thaliana
  misc_feature: MA Experiment 20000437 PARAMETER Experiment Name: At_Drought_P Parameter: Plant Line Value: WS
  misc_feature: MA Experiment 20000437 PARAMETER Experiment Name: At_Drought_P Parameter: Timepoint (hr) Value: 24
  misc_feature: MA Experiment 20000437 PARAMETER Experiment Name: At_Drought_P Parameter: Tissue Value: Whole Plant
  misc_feature: MA Experiment 20000437 PARAMETER Experiment Name: At_Drought_P Parameter: Treatment Value: Drought vs. No Drought
  misc_feature: MA Experiment ID: 20001904 Result: Up-regulated in Transcription
  misc_feature: MA Experiment 20001904 PARAMETER Experiment Name: At_Drought_Reproduction_P Parameter: Age (day) Value: 37
  misc_feature: MA Experiment 20001904 PARAMETER Experiment Name: At_Drought_Reproduction_P Parameter: Organism Value: A. thaliana
  misc_feature: MA Experiment 20001904 PARAMETER Experiment Name: At_Drought_Reproduction_P Parameter: Plant Line Value: WS
  misc_feature: MA Experiment 20001904 PARAMETER Experiment Name: At_Drought_Reproduction_P Parameter: Timepoint (day) Value: 7
  misc_feature: MA Experiment 20001904 PARAMETER Experiment Name: At_Drought_Reproduction_P Parameter: Tissue Value: Rosettes
  misc_feature: MA Experiment 20001904 PARAMETER Experiment Name: At_Drought_Reproduction_P Parameter: Treatment Value: Drought vs. No Drought
  misc_feature: MA Experiment ID: 20001905 Result: Up-regulated in Transcription
  misc_feature: MA Experiment 20001905 PARAMETER Experiment Name: At_Drought_Reproduction_P Parameter: Age (day) Value: 40
  misc_feature: MA Experiment 20001905 PARAMETER Experiment Name: At_Drought_Reproduction_P Parameter: Organism Value: A. thaliana
  misc_feature: MA Experiment 20001905 PARAMETER Experiment Name: At_Drought_Reproduction_P Parameter: Plant Line Value: WS
  misc_feature: MA Experiment 20001905 PARAMETER Experiment Name: At_Drought_Reproduction_P Parameter: Timepoint (day) Value: 10
  misc_feature: MA Experiment 20001905 PARAMETER Experiment Name: At_Drought_Reproduction_P Parameter: Tissue Value: Rosettes
  misc_feature: MA Experiment 20001905 PARAMETER Experiment Name: At_Drought_Reproduction_P Parameter: Treatment Value: Drought vs. No Drought
  misc_feature: MA Experiment ID: 20001906 Result: Up-regulated in Transcription
  misc_feature: MA Experiment 20001906 PARAMETER Experiment Name: At_Drought_Reproduction_P Parameter: Age (day) Value: 35
  misc_feature: MA Experiment 20001906 PARAMETER Experiment Name: At_Drought_Reproduction_P Parameter: Organism Value: A. thaliana
  misc_feature: MA Experiment 20001906 PARAMETER Experiment Name: At_Drought_Reproduction_P Parameter: Plant Line Value: WS
  misc_feature: MA Experiment 20001906 PARAMETER Experiment Name: At_Drought_Reproduction_P Parameter: Timepoint (day) Value: 5
  misc_feature: MA Experiment 20001906 PARAMETER Experiment Name: At_Drought_Reproduction_P Parameter: Tissue Value: Siliques
  misc_feature: MA Experiment 20001906 PARAMETER Experiment Name: At_Drought_Reproduction_P Parameter: Treatment Value: Drought vs. No Drought
  misc_feature: MA Experiment ID: 20001911 Result: Up-regulated in Transcription
  misc_feature: MA Experiment 20001911 PARAMETER Experiment Name: At_Drought_Reproduction_P Parameter: Age (day) Value: 40
  misc_feature: MA Experiment 20001911 PARAMETER Experiment Name: At_Drought_Reproduction_P Parameter: Organism Value: A. thaliana
  misc_feature: MA Experiment 20001911 PARAMETER Experiment Name: At_Drought_Reproduction_P Parameter: Plant Line Value: WS
  misc_feature: MA Experiment 20001911 PARAMETER Experiment Name: At_Drought_Reproduction_P Parameter: Timepoint (day) Value: 10
  misc_feature: MA Experiment 20001911 PARAMETER Experiment Name: At_Drought_Reproduction_P Parameter: Tissue Value: Flowers
  misc_feature: MA Experiment 20001911 PARAMETER Experiment Name: At_Drought_Reproduction_P Parameter: Treatment Value: Drought vs. No Drought
gacgacacgagatcatcgaatttggaccgtaaaagagacaagcagcttcataatcaaaccatcatcattatcatcatgttgacgaacacgatctaatttttccttttacatatacaattcccaaactccagatttcttccttattcgtcctgtttcatttctacggttcatgttctctactttcaaccctcgctaacgttttcgacttctccacatctcgattcagcttctccttcgtccaaattcgattagattttgaattgggaagctgacaagtttgaagatttctcatttgatggattgatctgatttcgcaattttcattttcccgtttcgggttcaattgatttcgatcagattgaacccaatccaaatccaatcagggctacttcgatttgatctgtttcctcaaaaaaggattcgactttctctgagatggtatatttccagaactcaatctccctcgtagaccaatctccaatcatggctcactcaccagattttcatcatcattcaaaacaatcaagaaccagcagcagcaacagaaagtcatcatcgtcaagctgttcttcaaatttctctgtttgctgtgacggatctagatcagctgctatcgatgttgtgatcttaatcgctgtgatcacatcctccgggtttttaatcttcccttacatcaaattcatcactatcaaatctgttgaaatcttctctgagctctcttgtttagtgaaagaagagattttgcgtaaccctgatccaattgtctacggtttaatagctttgagtatctcgtgtactgcgttatctgcttggatgattgttatactactgtgtagtcgtcatcgatgtgggaaaccgaactgtaaagggcttaggaaagctaatgctgagtttgatattcagttagagactgaggattgtgttaagagctctaatagtggcaagagtgttagtaagaagggtttgtttgagttgcctcgtgatcatcaccgtgagttagaggcggagttgaagaagatggctccacctaatgggcgagccgtgcttgtttttcgggctaaatgtgggtgttcggttgggagattagaggttcctggacctaagaagcagcaactgcagcaaaggaaggttaagaaatgaagtataaaggttcaatctttttgaggtaaaggttattatgatgatgatgatgattactttgattagtttataaacaacctttttttcttttgggtttagttattttcagaagaacttcttacagaaactaatactatgttaaatctccatgtgtttaaataaaagctttacaaggatattgc

SEQ ID NO: 48365 - protein, 234 aa, Arabidopsis thaliana
  peptide (1)..(234): Ceres Seq. ID no. 13649221
  misc_feature (35)..(92): Homolog of NCBI NO: 15239636 NR Description: pentatricopeptide (PPR) repeat-containing protein
  misc_feature (106)..(234): Homolog of NCBI NO: 15239636 NR Description: pentatricopeptide (PPR) repeat-containing protein
  misc_feature (27)..(234): Homolog of NCBI NO: 15230653 NR Description: expressed protein [Arabidopsis thaliana]
  misc_feature (1)..(209): Homolog of NCBI NO: 6714471 NR Description: unknown protein [Arabidopsis thaliana]
  misc_feature (1)..(234): Homolog of NCBI NO: 18395728 NR Description: expressed protein [Arabidopsis thaliana]
  misc_feature (17)..(231): Homolog of NCBI NO: 11288897 NR Description: hypothetical protein F8M21.150 - Arabidopsis
  misc_feature (1)..(234): Homolog of NCBI NO: 22326823 NR Description: expressed protein [Arabidopsis thaliana]
MVYFQNSISLVDQSPIMAHSPDFHHHSKQSRTSSSNRKSSSSSCSSNFSVCCDGSRSAAIDVVILIAVITSSGFLIFPYIKFITIKSVEIFSELSCLVKEEILRNPDPIVYGLIALSISCTALSAWMIVILLCSRHRCGKPNCKGLRKANAEFDIQLETEDCVKSSNSGKSVSKKGLFELPRDHHRELEAELKKMAPPNGRAVLVFRAKCGCSVGRLEVPGPKKQQLQQRKVKK

SEQ ID NO: 48366 - protein, 218 aa, Arabidopsis thaliana
  peptide (1)..(218): Ceres Seq. ID no. 13649222
  misc_feature (19)..(76): Homolog of NCBI NO: 15239636 NR Description: pentatricopeptide (PPR) repeat-containing protein
  misc_feature (90)..(218): Homolog of NCBI NO: 15239636 NR Description: pentatricopeptide (PPR) repeat-containing protein
  misc_feature (11)..(218): Homolog of NCBI NO: 15230653 NR Description: expressed protein [Arabidopsis thaliana]
  misc_feature (1)..(193): Homolog of NCBI NO: 6714471 NR Description: unknown protein [Arabidopsis thaliana]
  misc_feature (1)..(218): Homolog of NCBI NO: 18395728 NR Description: expressed protein [Arabidopsis thaliana]
  misc_feature (1)..(215): Homolog of NCBI NO: 11288897 NR Description: hypothetical protein F8M21.150 - Arabidopsis
  misc_feature (1)..(218): Homolog of NCBI NO: 22326823 NR Description: expressed protein [Arabidopsis thaliana]
MAHSPDFHHHSKQSRTSSSNRKSSSSSCSSNFSVCCDGSRSAAIDVVILIAVITSSGFLIFPYIKFITIKSVEIFSELSCLVKEEILRNPDPIVYGLIALSISCTALSAWMIVILLCSRHRCGKPNCKGLRKANAEFDIQLETEDCVKSSNSGKSVSKKGLFELPRDHHRELEAELKKMAPPNGRAVLVFRAKCGCSVGRLEVPGPKKQQLQQRKVKK

SEQ ID NO: 48367 - DNA, 1049 bp, Arabidopsis thaliana
  misc_feature (1)..(1049): Ceres Seq. ID no. 13649223
  misc_feature: MA Experiment ID: 20000173 Result: Down-regulated in Transcription
  misc_feature: MA Experiment 20000173 PARAMETER Experiment Name: At_42deg_Heat_P Parameter: Age (day) Value: 14
  misc_feature: MA Experiment 20000173 PARAMETER Experiment Name: At_42deg_Heat_P Parameter: Organism Value: A. thaliana
  misc_feature: MA Experiment 20000173 PARAMETER Experiment Name: At_42deg_Heat_P Parameter: Plant Line Value: WS
  misc_feature: MA Experiment 20000173 PARAMETER Experiment Name: At_42deg_Heat_P Parameter: Temperature (deg C) Value: 42 vs. 22
  misc_feature: MA Experiment 20000173 PARAMETER Experiment Name: At_42deg_Heat_P Parameter: Timepoint (hr) Value: 6
  misc_feature: MA Experiment 20000173 PARAMETER Experiment Name: At_42deg_Heat_P Parameter: Tissue Value: Aerial
  misc_feature: MA Experiment ID: 20000438 Result: Down-regulated in Transcription
  misc_feature: MA Experiment 20000438 PARAMETER Experiment Name: At_Shoots__P Parameter: Age (day) Value: 14
  misc_feature: MA Experiment 20000438 PARAMETER Experiment Name: At_Shoots__P Parameter: Tissue Value: Shoots vs. Whole Plant
  misc_feature: MA Experiment ID: 20000439 Result: Up-regulated in Transcription
  misc_feature: MA Experiment 20000439 PARAMETER Experiment Name: At_Roots__P Parameter: Age (day) Value: 14 vs. 21
  misc_feature: MA Experiment 20000439 PARAMETER Experiment Name: At_Roots__P Parameter: Organism Value: A. thaliana
  misc_feature: MA Experiment 20000439 PARAMETER Experiment Name: At_Roots__P Parameter: Tissue Value: Roots vs. Whole Plant
  misc_feature: MA Experiment ID: 20000794 Result: Up-regulated in Transcription
  misc_feature: MA Experiment 20000794 PARAMETER Experiment Name: At_Petals_P Parameter: Age (day) Value: 23-25 days
  misc_feature: MA Experiment 20000794 PARAMETER Experiment Name: At_Petals_P Parameter: Plant Line Value: WS
  misc_feature: MA Experiment 20000794 PARAMETER Experiment Name: At_Petals_P Parameter: Tissue Value: Petals vs. Whole plant
ggcaatcaaaacaacttttccaatttttcagttccgatctgctgccattgactaggaagatcttcaagcttcaaaactctataatcggatcttttattccttgtggagatatggatggagatggttctagctttgagcagtgttaccgttgttatcctgtcacattcattgacaaggcacatcttgagaagggtgacaaaattatcatgcctccttccgctctcgatcgtcttgcttctttgcatattgaatacccaatgctgtttcaactgagtaatgtttctgttgagaagacctcacattgtggtgtactagaattcactgcagacgaaggcctagtttacttgccatattggatgatgcaaaacatgtctcttgaagagggagacgttatgcaagttaagaatatcagcttggtaaaagggacttacatcaagctgcagcctcacactcaagatttcttggatatttccaacccaaaaaatgtcttggagactacgcttaggagttactcttgcttaaccacgggtgatacaattatggttccgtataacaacaagcaatattacatcaatgtggttgaggcaaaaccttcttcagctgtgagtattatcgaaacggattgtgaggttgattttgctcctcctcttgattacaaagaacctgagaagccacagaagttgactccttcaaacaaacgacctctccaagttaaagaagaagaagaacctgcaagcaaagttcccaaattcacgccgttcactggatcaggaaaacgtttagatggaaaagcacaaacacaaactgaaccagaagatacaaaacagcaagaaaagccgactgagaatgggaaagacgatgagaagttgtcagtcactacaccaaggcaaatatcaggaaagctcgtctttggttcaaacagcaaatcagctgcaaaagaaacagcgaaagttgatgatccaaagaacattgtgcaagagagctcaacaaaatccgatgaagctaagttcaaagtgttcacagggaagaaatactcactcaatggttaa

SEQ ID NO: 48368 - protein, 348 aa, Arabidopsis thaliana
  peptide (1)..(348): Ceres Seq. ID no. 13649224
  misc_feature (65)..(215): Pfam Name: Ubiquitin fusion degradation protein UFD1 Pfam Description: Ubiquitin fusion degradation protein UFD1
  misc_feature (44)..(313): Homolog of NCBI NO: 16758158 NR Description: ubiquitin fusion degradation 1-like [Rattus
  misc_feature (44)..(318): Homolog of NCBI NO: 38540890 NR Description: Ubiquitin fusion degradation 1-like protein
  misc_feature (41)..(346): Homolog of NCBI NO: 38345534 NR Description: OSJNBa0020J04.9 [Oryza sativa (japonica
  misc_feature (41)..(348): Homolog of NCBI NO: 7488221 NR Description: probable ubiquitin-dependent proteolytic protein
  misc_feature (41)..(348): Homolog of NCBI NO: 18420341 NR Description: ubiquitin fusion degradation protein UFD1 family
  misc_feature (41)..(348): Homolog of NCBI NO: 25347017 NR Description: probable ubiquitin fusion-degradation protein
  misc_feature (41)..(348): Homolog of NCBI NO: 18399646 NR Description: ubiquitin fusion degradation (UFD) protein,
  misc_feature (41)..(348): Homolog of NCBI NO: 21592947 NR Description: putative ubiquitin fusion-degradation protein
  misc_feature (69)..(348): Homolog of NCBI NO: 30684115 NR Description: ubiquitin fusion degradation (UFD) protein,
  misc_feature (65)..(348): Homolog of NCBI NO: 7488408 NR Description: probable ubiquitin fusion-degradation protein
QSKQLFQFFSSDLLPLTRKIFKLQNSIIGSFIPCGDMDGDGSSFEQCYRCYPVTFIDKAHLEKGDKIIMPPSALDRLASLHIEYPMLFQLSNVSVEKTSHCGVLEFTADEGLVYLPYWMMQNMSLEEGDVMQVKNISLVKGTYIKLQPHTQDFLDISNPKNVLETTLRSYSCLTTGDTIMVPYNNKQYYINVVEAKPSSAVSIIETDCEVDFAPPLDYKEPEKPQKLTPSNKRPLQVKEEEEPASKVPKFTPFTGSGKRLDGKAQTQTEPEDTKQQEKPTENGKDDEKLSVTTPRQISGKLVFGSNSKSAAKETAKVDDPKNIVQESSTKSDEAKFKVFTGKKYSLNG

SEQ ID NO: 48369 - protein, 312 aa, Arabidopsis thaliana
  peptide (1)..(312): Ceres Seq. ID no. 13649225
  misc_feature (29)..(179): Pfam Name: Ubiquitin fusion degradation protein UFD1 Pfam Description: Ubiquitin fusion degradation protein UFD1
  misc_feature (8)..(277): Homolog of NCBI NO: 16758158 NR Description: ubiquitin fusion degradation 1-like [Rattus
  misc_feature (8)..(282): Homolog of NCBI NO: 38540890 NR Description: Ubiquitin fusion degradation 1-like protein
  misc_feature (5)..(310): Homolog of NCBI NO: 38345534 NR Description: OSJNBa0020J04.9 [Oryza sativa (japonica
  misc_feature (5)..(312): Homolog of NCBI NO: 7488221 NR Description: probable ubiquitin-dependent proteolytic protein
  misc_feature (5)..(312): Homolog of NCBI NO: 18420341 NR Description: ubiquitin fusion degradation protein UFD1 family
  misc_feature (5)..(312): Homolog of NCBI NO: 25347017 NR Description: probable ubiquitin fusion-degradation protein
  misc_feature (5)..(312): Homolog of NCBI NO: 18399646 NR Description: ubiquitin fusion degradation (UFD) protein,
  misc_feature (5)..(312): Homolog of NCBI NO: 21592947 NR Description: putative ubiquitin fusion-degradation protein
  misc_feature (33)..(312): Homolog of NCBI NO: 30684115 NR Description: ubiquitin fusion degradation (UFD) protein,
  misc_feature (29)..(312): Homolog of NCBI NO: 7488408 NR Description: probable ubiquitin fusion-degradation protein
MDGDGSSFEQCYRCYPVTFIDKAHLEKGDKIIMPPSALDRLASLHIEYPMLFQLSNVSVEKTSHCGVLEFTADEGLVYLPYWMMQNMSLEEGDVMQVKNISLVKGTYIKLQPHTQDFLDISNPKNVLETTLRSYSCLTTGDTIMVPYNNKQYYINVVEAKPSSAVSIIETDCEVDFAPPLDYKEPEKPQKLTPSNKRPLQVKEEEEPASKVPKFTPFTGSGKRLDGKAQTQTEPEDTKQQEKPTENGKDDEKLSVTTPRQISGKLVFGSNSKSAAKETAKVDDPKNIVQESSTKSDEAKFKVFTGKKYSLNG

SEQ ID NO: 48370 - protein, 280 aa, Arabidopsis thaliana
  peptide (1)..(280): Ceres Seq. ID no. 13649226
  misc_feature (1)..(147): Pfam Name: Ubiquitin fusion degradation protein UFD1 Pfam Description: Ubiquitin fusion degradation protein UFD1
  misc_feature (1)..(245): Homolog of NCBI NO: 16758158 NR Description: ubiquitin fusion degradation 1-like [Rattus
  misc_feature (1)..(250): Homolog of NCBI NO: 38540890 NR Description: Ubiquitin fusion degradation 1-like protein
  misc_feature (1)..(278): Homolog of NCBI NO: 38345534 NR Description: OSJNBa0020J04.9 [Oryza sativa (japonica
  misc_feature (1)..(280): Homolog of NCBI NO: 7488221 NR Description: probable ubiquitin-dependent proteolytic protein
  misc_feature (1)..(280): Homolog of NCBI NO: 18420341 NR Description: ubiquitin fusion degradation protein UFD1 family
  misc_feature (1)..(280): Homolog of NCBI NO: 25347017 NR Description: probable ubiquitin fusion-degradation protein
  misc_feature (1)..(280): Homolog of NCBI NO: 18399646 NR Description: ubiquitin fusion degradation (UFD) protein,
  misc_feature (1)..(280): Homolog of NCBI NO: 21592947 NR Description: putative ubiquitin fusion-degradation protein
  misc_feature (1)..(280): Homolog of NCBI NO: 30684115 NR Description: ubiquitin fusion degradation (UFD) protein,
  misc_feature (1)..(280): Homolog of NCBI NO: 7488408 NR Description: probable ubiquitin fusion-degradation protein
MPPSALDRLASLHIEYPMLFQLSNVSVEKTSHCGVLEFTADEGLVYLPYWMMQNMSLEEGDVMQVKNISLVKGTYIKLQPHTQDFLDISNPKNVLETTLRSYSCLTTGDTIMVPYNNKQYYINVVEAKPSSAVSIIETDCEVDFAPPLDYKEPEKPQKLTPSNKRPLQVKEEEEPASKVPKFTPFTGSGKRLDGKAQTQTEPEDTKQQEKPTENGKDDEKLSVTTPRQISGKLVFGSNSKSAAKETAKVDDPKNIVQESSTKSDEAKFKVFTGKKYSLNG

SEQ ID NO: 48371 - DNA, 1037 bp, Arabidopsis thaliana; identical to SEQ ID NO: 48268
  misc_feature (1)..(1037): Ceres Seq. ID no. 13649313
  misc_feature: MA Experiment ID: 20000166 Result: Up-regulated in Transcription
  misc_feature: MA Experiment 20000166 PARAMETER Experiment Name: At_100uM_ABA_P Parameter: Age (day) Value: 14
  misc_feature: MA Experiment 20000166 PARAMETER Experiment Name: At_100uM_ABA_P Parameter: Organism Value: A. thaliana
  misc_feature: MA Experiment 20000166 PARAMETER Experiment Name: At_100uM_ABA_P Parameter: Plant Line Value: WS
  misc_feature: MA Experiment 20000166 PARAMETER Experiment Name: At_100uM_ABA_P Parameter: Timepoint (hr) Value: 1
  misc_feature: MA Experiment 20000166 PARAMETER Experiment Name: At_100uM_ABA_P Parameter: Tissue Value: Aerial
  misc_feature: MA Experiment 20000166 PARAMETER Experiment Name: At_100uM_ABA_P Parameter: Treatment Value: 100uM ABA vs. No Treatment
  misc_feature: MA Experiment ID: 20000169 Result: Up-regulated in Transcription
  misc_feature: MA Experiment 20000169 PARAMETER Experiment Name: At_100uM_ABA_P Parameter: Age (day) Value: 14
  misc_feature: MA Experiment 20000169 PARAMETER Experiment Name: At_100uM_ABA_P Parameter: Organism Value: A. thaliana
  misc_feature: MA Experiment 20000169 PARAMETER Experiment Name: At_100uM_ABA_P Parameter: Plant Line Value: WS
  misc_feature: MA Experiment 20000169 PARAMETER Experiment Name: At_100uM_ABA_P Parameter: Timepoint (hr) Value: 6
  misc_feature: MA Experiment 20000169 PARAMETER Experiment Name: At_100uM_ABA_P Parameter: Tissue Value: Aerial
  misc_feature: MA Experiment 20000169 PARAMETER Experiment Name: At_100uM_ABA_P Parameter: Treatment Value: 100uM ABA vs. No Treatment
  misc_feature: MA Experiment ID: 20000171 Result: Down-regulated in Transcription
  misc_feature: MA Experiment 20000171 PARAMETER Experiment Name: At_42deg_Heat_P Parameter: Age (day) Value: 14
  misc_feature: MA Experiment 20000171 PARAMETER Experiment Name: At_42deg_Heat_P Parameter: Organism Value: A. thaliana
  misc_feature: MA Experiment 20000171 PARAMETER Experiment Name: At_42deg_Heat_P Parameter: Plant Line Value: WS
  misc_feature: MA Experiment 20000171 PARAMETER Experiment Name: At_42deg_Heat_P Parameter: Temperature (deg C) Value: 42 vs. 22
  misc_feature: MA Experiment 20000171 PARAMETER Experiment Name: At_42deg_Heat_P Parameter: Timepoint (hr) Value: 1
  misc_feature: MA Experiment 20000171 PARAMETER Experiment Name: At_42deg_Heat_P Parameter: Tissue Value: Aerial
  misc_feature: MA Experiment ID: 20000173 Result: Down-regulated in Transcription
  misc_feature: MA Experiment 20000173 PARAMETER Experiment Name: At_42deg_Heat_P Parameter: Age (day) Value: 14
  misc_feature: MA Experiment 20000173 PARAMETER Experiment Name: At_42deg_Heat_P Parameter: Organism Value: A. thaliana
  misc_feature: MA Experiment 20000173 PARAMETER Experiment Name: At_42deg_Heat_P Parameter: Plant Line Value: WS
  misc_feature: MA Experiment 20000173 PARAMETER Experiment Name: At_42deg_Heat_P Parameter: Temperature (deg C) Value: 42 vs. 22
  misc_feature: MA Experiment 20000173 PARAMETER Experiment Name: At_42deg_Heat_P Parameter: Timepoint (hr) Value: 6
  misc_feature: MA Experiment 20000173 PARAMETER Experiment Name: At_42deg_Heat_P Parameter: Tissue Value: Aerial
  misc_feature: MA Experiment ID: 20000213 Result: Down-regulated in Transcription
  misc_feature: MA Experiment 20000213 PARAMETER Experiment Name: At_4deg_Cold_P Parameter: Timepoint (hr) Value: 2
  misc_feature: MA Experiment ID: 20000268 Result: Up-regulated in Transcription
  misc_feature: MA Experiment 20000268 PARAMETER Experiment Name: At_100mM_NaCl__P Parameter: Age (day) Value: 14
  misc_feature: MA Experiment 20000268 PARAMETER Experiment Name: At_100mM_NaCl__P Parameter: Organism Value: A. thaliana
  misc_feature: MA Experiment 20000268 PARAMETER Experiment Name: At_100mM_NaCl__P Parameter: Plant Line Value: WS
  misc_feature: MA Experiment 20000268 PARAMETER Experiment Name: At_100mM_NaCl__P Parameter: Timepoint (hr) Value: 6
  misc_feature: MA Experiment 20000268 PARAMETER Experiment Name: At_100mM_NaCl__P Parameter: Tissue Value: Whole Plant
  misc_feature: MA Experiment 20000268 PARAMETER Experiment Name: At_100mM_NaCl__P Parameter: Treatment Value: 100mM NaCl vs. No Treatment
  misc_feature: MA Experiment ID: 20000286 Result: Up-regulated in Transcription
  misc_feature: MA Experiment 20000286 PARAMETER Experiment Name: At_Open_Flower_P Parameter: Age (day) Value: 21
  misc_feature: MA Experiment 20000286 PARAMETER Experiment Name: At_Open_Flower_P Parameter: Plant Line Value: WS
  misc_feature: MA Experiment 20000286 PARAMETER Experiment Name: At_Open_Flower_P Parameter: Tissue Value: Half Open vs. Whole Plant
  misc_feature: MA Experiment ID: 20000436 Result: Up-regulated in Transcription
  misc_feature: MA Experiment 20000436 PARAMETER Experiment Name: At_Drought_P Parameter: Age (day) Value: 7
  misc_feature: MA Experiment 20000436 PARAMETER Experiment Name: At_Drought_P Parameter: Organism Value: A. thaliana
  misc_feature: MA Experiment 20000436 PARAMETER Experiment Name: At_Drought_P Parameter: Plant Line Value: WS
  misc_feature: MA Experiment 20000436 PARAMETER Experiment Name: At_Drought_P Parameter: Timepoint (hr) Value: 12
  misc_feature: MA Experiment 20000436 PARAMETER Experiment Name: At_Drought_P Parameter: Tissue Value: Whole Plant
  misc_feature: MA Experiment 20000436 PARAMETER Experiment Name: At_Drought_P Parameter: Treatment Value: Drought vs. No Drought
  misc_feature: MA Experiment ID: 20000437 Result: Up-regulated in Transcription
  misc_feature: MA Experiment 20000437 PARAMETER Experiment Name: At_Drought_P Parameter: Age (day) Value: 8
  misc_feature: MA Experiment 20000437 PARAMETER Experiment Name: At_Drought_P Parameter: Organism Value: A. thaliana
  misc_feature: MA Experiment 20000437 PARAMETER Experiment Name: At_Drought_P Parameter: Plant Line Value: WS
  misc_feature: MA Experiment 20000437 PARAMETER Experiment Name: At_Drought_P Parameter: Timepoint (hr) Value: 24
  misc_feature: MA Experiment 20000437 PARAMETER Experiment Name: At_Drought_P Parameter: Tissue Value: Whole Plant
  misc_feature: MA Experiment 20000437 PARAMETER Experiment Name: At_Drought_P Parameter: Treatment Value: Drought vs. No Drought
  misc_feature: MA Experiment ID: 20000438 Result: Up-regulated in Transcription
  misc_feature: MA Experiment 20000438 PARAMETER Experiment Name: At_Shoots__P Parameter: Age (day) Value: 14
  misc_feature: MA Experiment 20000438 PARAMETER Experiment Name: At_Shoots__P Parameter: Tissue Value: Shoots vs. Whole Plant
  misc_feature: MA Experiment ID: 20000453 Result: Up-regulated in Transcription
  misc_feature: MA Experiment 20000453 PARAMETER Experiment Name: At_100uM_ABA_P Parameter: Age (day) Value: 15
  misc_feature: MA Experiment 20000453 PARAMETER Experiment Name: At_100uM_ABA_P Parameter: Organism Value: A. thaliana
  misc_feature: MA Experiment 20000453 PARAMETER Experiment Name: At_100uM_ABA_P Parameter: Plant Line Value: WS
  misc_feature: MA Experiment 20000453 PARAMETER Experiment Name: At_100uM_ABA_P Parameter: Timepoint (hr) Value: 24
  misc_feature: MA Experiment 20000453 PARAMETER Experiment Name: At_100uM_ABA_P Parameter: Tissue Value: Aerial
  misc_feature: MA Experiment 20000453 PARAMETER Experiment Name: At_100uM_ABA_P Parameter: Treatment Value: 100uM ABA vs. No Treatment
  misc_feature: MA Experiment ID: 20000496 Result: Up-regulated in Transcription
  misc_feature: MA Experiment 20000496 PARAMETER Experiment Name: At_Guard_Cells_P Parameter: Harvest Date Value: 7/19/2002
  misc_feature: MA Experiment 20000496 PARAMETER Experiment Name: At_Guard_Cells_P Parameter: Organism Value: Canola
  misc_feature: MA Experiment 20000496 PARAMETER Experiment Name: At_Guard_Cells_P Parameter: Tissue Value: Guard Cells vs. Leaves
  misc_feature: MA Experiment ID: 20000573 Result: Down-regulated in Transcription
  misc_feature: MA Experiment 20000573 PARAMETER Experiment Name: At_100uM_ABA_Mutants__P Parameter: Organism Value: A. thaliana
  misc_feature: MA Experiment 20000573 PARAMETER Experiment Name: At_100uM_ABA_Mutants__P Parameter: Plant Line Value: CS22 vs. Ler wt
  misc_feature: MA Experiment 20000573 PARAMETER Experiment Name: At_100uM_ABA_Mutants__P Parameter: Timepoint (hr) Value: N/A
  misc_feature: MA Experiment 20000573 PARAMETER Experiment Name: At_100uM_ABA_Mutants__P Parameter: Tissue Value: Whole Plant
  misc_feature: MA Experiment 20000573 PARAMETER Experiment Name: At_100uM_ABA_Mutants__P Parameter: Treatment Value: None
  misc_feature: MA Experiment ID: 20000574 Result: Down-regulated in Transcription
  misc_feature: MA Experiment 20000574 PARAMETER Experiment Name: At_100uM_ABA_Mutants__P Parameter: Organism Value: A. thaliana
  misc_feature: MA Experiment 20000574 PARAMETER Experiment Name: At_100uM_ABA_Mutants__P Parameter: Plant Line Value: CS23 vs. Ler wt
  misc_feature: MA Experiment 20000574 PARAMETER Experiment Name: At_100uM_ABA_Mutants__P Parameter: Timepoint (hr) Value: N/A
  misc_feature: MA Experiment 20000574 PARAMETER Experiment Name: At_100uM_ABA_Mutants__P Parameter: Tissue Value: Whole Plant
  misc_feature: MA Experiment 20000574 PARAMETER Experiment Name: At_100uM_ABA_Mutants__P Parameter: Treatment Value: None
  misc_feature: MA Experiment ID: 20000794 Result: Up-regulated in Transcription
  misc_feature: MA Experiment 20000794 PARAMETER Experiment Name: At_Petals_P Parameter: Age (day) Value: 23-25 days
  misc_feature: MA Experiment 20000794 PARAMETER Experiment Name: At_Petals_P Parameter: Plant Line Value: WS
  misc_feature: MA Experiment 20000794 PARAMETER Experiment Name: At_Petals_P Parameter: Tissue Value: Petals vs. Whole plant
  misc_feature: MA Experiment ID: 20001450 Result: Up-regulated in Transcription
  misc_feature: MA Experiment 20001450 PARAMETER Experiment Name: At_Far-red-induction_P Parameter: Age (day) Value: 7
  misc_feature: MA Experiment 20001450 PARAMETER Experiment Name: At_Far-red-induction_P Parameter: Light Value: Far-red vs. White
  misc_feature: MA Experiment 20001450 PARAMETER Experiment Name: At_Far-red-induction_P Parameter: Organism Value: A. thaliana
  misc_feature: MA Experiment 20001450 PARAMETER Experiment Name: At_Far-red-induction_P Parameter: Plant Line Value: Columbia
  misc_feature: MA Experiment 20001450 PARAMETER Experiment Name: At_Far-red-induction_P Parameter: Timepoint (hr) Value: 8
  misc_feature: MA Experiment 20001450 PARAMETER Experiment Name: At_Far-red-induction_P Parameter: Tissue Value: Whole Plant
  misc_feature: MA Experiment ID: 20001451 Result: Up-regulated in Transcription
  misc_feature: MA Experiment 20001451 PARAMETER Experiment Name: At_Far-red-induction_P Parameter: Age (day) Value: 7
  misc_feature: MA Experiment 20001451 PARAMETER Experiment Name: At_Far-red-induction_P Parameter: Light Value: Far-red vs. White
  misc_feature: MA Experiment 20001451 PARAMETER Experiment Name: At_Far-red-induction_P Parameter: Organism Value: A. thaliana
  misc_feature: MA Experiment 20001451 PARAMETER Experiment Name: At_Far-red-induction_P Parameter: Plant Line Value: Columbia
  misc_feature: MA Experiment 20001451 PARAMETER Experiment Name: At_Far-red-induction_P Parameter: Timepoint (hr) Value: 24
  misc_feature: MA Experiment 20001451 PARAMETER Experiment Name: At_Far-red-induction_P Parameter: Tissue Value: Whole Plant
  misc_feature: MA Experiment ID: 20001554 Result: Up-regulated in Transcription
  misc_feature: MA Experiment 20001554 PARAMETER Experiment Name: At_Drought_Soil_Dry_P Parameter: Age (day) Value: 21
  misc_feature: MA Experiment 20001554 PARAMETER Experiment Name: At_Drought_Soil_Dry_P Parameter: Organism Value: A. thaliana
  misc_feature: MA Experiment 20001554 PARAMETER Experiment Name: At_Drought_Soil_Dry_P Parameter: Plant Line Value: WS
  misc_feature: MA Experiment 20001554 PARAMETER Experiment Name: At_Drought_Soil_Dry_P Parameter: Post Timepoint (hr) Value: None
  misc_feature: MA Experiment 20001554 PARAMETER Experiment Name: At_Drought_Soil_Dry_P Parameter: Post-Treatment Value: None
  misc_feature: MA Experiment 20001554 PARAMETER Experiment Name: At_Drought_Soil_Dry_P Parameter: Timepoint (day) Value: 7
  misc_feature: MA Experiment 20001554 PARAMETER Experiment Name: At_Drought_Soil_Dry_P Parameter: Treatment Value: Drought vs. No Drought
  misc_feature: MA Experiment ID: 20001557 Result: Down-regulated in Transcription
  misc_feature: MA Experiment 20001557 PARAMETER Experiment Name: At_Drought_Soil_Dry_P Parameter: Age (day) Value: 27
  misc_feature: MA Experiment 20001557 PARAMETER Experiment Name: At_Drought_Soil_Dry_P Parameter: Organism Value: A. thaliana
  misc_feature: MA Experiment 20001557 PARAMETER Experiment Name: At_Drought_Soil_Dry_P Parameter: Plant Line Value: WS
  misc_feature: MA Experiment 20001557 PARAMETER Experiment Name: At_Drought_Soil_Dry_P Parameter: Post Timepoint (hr) Value: 3
  misc_feature: MA Experiment 20001557 PARAMETER Experiment Name: At_Drought_Soil_Dry_P Parameter: Post-Treatment Value: Re-Water vs. No Drought
  misc_feature: MA Experiment 20001557 PARAMETER Experiment Name: At_Drought_Soil_Dry_P Parameter: Timepoint (day) Value: 13
  misc_feature: MA Experiment 20001557 PARAMETER Experiment Name: At_Drought_Soil_Dry_P Parameter: Treatment Value: Drought vs. No Drought

SEQ ID NO: 48372 - protein, 257 aa, Arabidopsis thaliana; identical to SEQ ID NO: 48269
  peptide (1)..(257): Ceres Seq. ID no. 15219587
  misc_feature (14)..(61): Pfam Name: Myb-like DNA-binding domain Pfam Description: Myb-like DNA-binding domain
  misc_feature (14)..(61): Pfam Name: Myb-like DNA-binding domain Pfam Description: Myb-like DNA-binding domain
  misc_feature (1)..(208): Homolog of NCBI NO: 15227288 NR Description: myb DNA-binding protein [Arabidopsis thaliana]
  misc_feature (1)..(217): Homolog of NCBI NO: 7438345 NR Description: myb-related protein A - upland cotton
  misc_feature (1)..(197): Homolog of NCBI NO: 39725415 NR Description: MYB transcription factor [Eucalyptus gunnii]
  misc_feature (1)..(250): Homolog of NCBI NO: 82310 NR Description: myb-related protein 330 - garden snapdragon
  misc_feature (1)..(208): Homolog of NCBI NO: 13346194 NR Description: GHMYB9 [Gossypium hirsutum]
  misc_feature (1)..(208): Homolog of NCBI NO: 15227288 NR Description: myb DNA-binding protein [Arabidopsis thaliana]
  misc_feature (1)..(197): Homolog of NCBI NO: 39725415 NR Description: MYB transcription factor [Eucalyptus gunnii]
  misc_feature (1)..(208): Homolog of NCBI NO: 13346194 NR Description: GHMYB9 [Gossypium hirsutum]
  misc_feature (1)..(257): Homolog of NCBI NO: 30687964 NR Description: myb family transcription factor [Arabidopsis
  misc_feature (12)..(257): Homolog of NCBI NO: 11273984 NR Description: probable transcription factor MYB3
  misc_feature (1)..(219): Homolog of NCBI NO: 15233894 NR Description: myb family transcription factor [Arabidopsis
  misc_feature (1)..(195): Homolog of NCBI NO: 15233968 NR Description: transcription factor (MYB4) -related [Arabidopsis
  misc_feature (1)..(195): Homolog of NCBI NO: 11273985 NR Description: myb-related transcription factor MYB4
  misc_feature (1)..(250): Homolog of NCBI NO: 82310 NR Description: myb-related protein 330 - garden snapdragon
  misc_feature (1)..(217): Homolog of NCBI NO: 7438345 NR Description: myb-related protein A - upland cotton
  misc_feature (1)..(195): Homolog of NCBI NO: 11273985 NR Description: myb-related transcription factor MYB4
  misc_feature (1)..(195): Homolog of NCBI NO: 15233968 NR Description: transcription factor (MYB4) -related [Arabidopsis
  misc_feature (1)..(219): Homolog of NCBI NO: 15233894 NR Description: myb family transcription factor [Arabidopsis
  misc_feature (12)..(257): Homolog of NCBI NO: 11273984 NR Description: probable transcription factor MYB3
  misc_feature (1)..(257): Homolog of NCBI NO: 30687964 NR Description: myb family transcription factor [Arabidopsis

SEQ ID NO: 48373 - protein, 246 aa, Arabidopsis thaliana; identical to SEQ ID NO: 48270
  peptide (1)..(246): Ceres Seq. ID no. 15219588
  misc_feature (3)..(50): Pfam Name: Myb-like DNA-binding domain Pfam Description: Myb-like DNA-binding domain
  misc_feature (3)..(50): Pfam Name: Myb-like DNA-binding domain Pfam Description: Myb-like DNA-binding domain
  misc_feature (1)..(197): Homolog of NCBI NO: 15227288 NR Description: myb DNA-binding protein [Arabidopsis thaliana]
  misc_feature (1)..(206): Homolog of NCBI NO: 7438345 NR Description: myb-related protein A - upland cotton
  misc_feature (1)..(186): Homolog of NCBI NO: 39725415 NR Description: MYB transcription factor [Eucalyptus gunnii]
  misc_feature (1)..(239): Homolog of NCBI NO: 82310 NR Description: myb-related protein 330 - garden snapdragon
  misc_feature (1)..(197): Homolog of NCBI NO: 13346194 NR Description: GHMYB9 [Gossypium hirsutum]
  misc_feature (1)..(197): Homolog of NCBI NO: 15227288 NR Description: myb DNA-binding protein [Arabidopsis thaliana]
  misc_feature (1)..(186): Homolog of NCBI NO: 39725415 NR Description: MYB transcription factor [Eucalyptus gunnii]
  misc_feature (1)..(197): Homolog of NCBI NO: 13346194 NR Description: GHMYB9 [Gossypium hirsutum]
  misc_feature (1)..(246): Homolog of NCBI NO: 30687964 NR Description: myb family transcription factor [Arabidopsis
  misc_feature (1)..(246): Homolog of NCBI NO: 11273984 NR Description: probable transcription factor MYB3
  misc_feature (1)..(208): Homolog of NCBI NO: 15233894 NR Description: myb family transcription factor [Arabidopsis
  misc_feature (1)..(184): Homolog of NCBI NO: 15233968 NR Description: transcription factor (MYB4) -related [Arabidopsis
  misc_feature (1)..(184): Homolog of NCBI NO: 11273985 NR Description: myb-related transcription factor MYB4
  misc_feature (1)..(239): Homolog of NCBI NO: 82310 NR Description: myb-related protein 330 - garden snapdragon
  misc_feature (1)..(206): Homolog of NCBI NO: 7438345 NR Description: myb-related protein A - upland cotton
  misc_feature (1)..(184): Homolog of NCBI NO: 11273985 NR Description: myb-related transcription factor MYB4
  misc_feature (1)..(184): Homolog of NCBI NO: 15233968 NR Description: transcription factor (MYB4) -related [Arabidopsis
  misc_feature (1)..(208): Homolog of NCBI NO: 15233894 NR Description: myb family transcription factor [Arabidopsis
  misc_feature (1)..(246): Homolog of NCBI NO: 11273984 NR Description: probable transcription factor MYB3
  misc_feature (1)..(246): Homolog of NCBI NO: 30687964 NR Description: myb family transcription factor [Arabidopsis

SEQ ID NO: 48374 - protein, 200 aa, Arabidopsis thaliana; identical to SEQ ID NO: 48271
  peptide (1)..(200): Ceres Seq. ID no. 15219589
  misc_feature (1)..(151): Homolog of NCBI NO: 15227288 NR Description: myb DNA-binding protein [Arabidopsis thaliana]
  misc_feature (1)..(160): Homolog of NCBI NO: 7438345 NR Description: myb-related protein A - upland cotton
  misc_feature (1)..(140): Homolog of NCBI NO: 39725415 NR Description: MYB transcription factor [Eucalyptus gunnii]
  misc_feature (1)..(193): Homolog of NCBI NO: 82310 NR Description: myb-related protein 330 - garden snapdragon
  misc_feature (1)..(151): Homolog of NCBI NO: 13346194 NR Description: GHMYB9 [Gossypium hirsutum]
  misc_feature (1)..(138): Homolog of NCBI NO: 11273985 NR Description: myb-related transcription factor MYB4
  misc_feature (1)..(138): Homolog of NCBI NO: 15233968 NR Description: transcription factor (MYB4) -related [Arabidopsis
  misc_feature (1)..(162): Homolog of NCBI NO: 15233894 NR Description: myb family transcription factor [Arabidopsis
  misc_feature (1)..(200): Homolog of NCBI NO: 11273984 NR Description: probable transcription factor MYB3
  misc_feature (1)..(200): Homolog of NCBI NO: 30687964 NR Description: myb family transcription factor [Arabidopsis
  misc_feature (1)..(151): Homolog of NCBI NO: 15227288 NR Description: myb DNA-binding protein [Arabidopsis thaliana]
  misc_feature (1)..(160): Homolog of NCBI NO: 7438345 NR Description: myb-related protein A - upland cotton
  misc_feature (1)..(140): Homolog of NCBI NO: 39725415 NR Description: MYB transcription factor [Eucalyptus gunnii]
  misc_feature (1)..(193): Homolog of NCBI NO: 82310 NR Description: myb-related protein 330 - garden snapdragon
  misc_feature (1)..(151): Homolog of NCBI NO: 13346194 NR Description: GHMYB9 [Gossypium hirsutum]
  misc_feature (1)..(138): Homolog of NCBI NO: 11273985 NR Description: myb-related transcription factor MYB4
  misc_feature (1)..(138): Homolog of NCBI NO: 15233968 NR Description: transcription factor (MYB4) -related [Arabidopsis
  misc_feature (1)..(162): Homolog of NCBI NO: 15233894 NR Description: myb family transcription factor [Arabidopsis
  misc_feature (1)..(200): Homolog of NCBI NO: 11273984 NR Description: probable transcription factor MYB3
  misc_feature (1)..(200): Homolog of NCBI NO: 30687964 NR Description: myb family transcription factor [Arabidopsis

SEQ ID NO: 48375 - DNA, 1331 bp, Arabidopsis thaliana
  misc_feature (1)..(1331): Ceres Seq. ID no. 13649303
  misc_feature: MA Experiment ID: 20000185 Result: Down-regulated in Transcription
  misc_feature: MA Experiment 20000185 PARAMETER Experiment Name: At_Roots__P Parameter: Age (day) Value: 7 vs. 21
  misc_feature: MA Experiment 20000185 PARAMETER Experiment Name: At_Roots__P Parameter: Organism Value: A. thaliana
  misc_feature: MA Experiment 20000185 PARAMETER Experiment Name: At_Roots__P Parameter: Tissue Value: Roots vs. Whole Plant
  misc_feature: MA Experiment ID: 20000227 Result: Up-regulated in Transcription
  misc_feature: MA Experiment 20000227 PARAMETER Experiment Name: At_Root-Tips-vs-Tops_P Parameter: Tissue Value: Root Tips vs. Root Tops
  misc_feature: MA Experiment ID: 20000438 Result: Down-regulated in Transcription
  misc_feature: MA Experiment 20000438 PARAMETER Experiment Name: At_Shoots__P Parameter: Age (day) Value: 14
  misc_feature: MA Experiment 20000438 PARAMETER Experiment Name: At_Shoots__P Parameter: Tissue Value: Shoots vs. Whole Plant
  misc_feature: MA Experiment ID: 20000439 Result: Down-regulated in Transcription
  misc_feature: MA Experiment 20000439 PARAMETER Experiment Name: At_Roots__P Parameter: Age (day) Value: 14 vs. 21
  misc_feature: MA Experiment 20000439 PARAMETER Experiment Name: At_Roots__P Parameter: Organism Value: A. thaliana
  misc_feature: MA Experiment 20000439 PARAMETER Experiment Name: At_Roots__P Parameter: Tissue Value: Roots vs. Whole Plant
  misc_feature: MA Experiment ID: 20000794 Result: Up-regulated in Transcription
  misc_feature: MA Experiment 20000794 PARAMETER Experiment Name: At_Petals_P Parameter: Age (day) Value: 23-25 days
  misc_feature: MA Experiment 20000794 PARAMETER Experiment Name: At_Petals_P Parameter: Plant Line Value: WS
  misc_feature: MA Experiment 20000794 PARAMETER Experiment Name: At_Petals_P Parameter: Tissue Value: Petals vs. Whole plant
  misc_feature: MA Experiment ID: 20001247 Result: Down-regulated in Transcription
  misc_feature: MA Experiment 20001247 PARAMETER Experiment Name: At_Far-red-induction_P Parameter: Age (day) Value: 7
  misc_feature: MA Experiment 20001247 PARAMETER Experiment Name: At_Far-red-induction_P Parameter: Light Value: Far-red vs. White
  misc_feature: MA Experiment 20001247 PARAMETER Experiment Name: At_Far-red-induction_P Parameter: Organism Value: A. thaliana
  misc_feature: MA Experiment 20001247 PARAMETER Experiment Name: At_Far-red-induction_P Parameter: Plant Line Value: Columbia
  misc_feature: MA Experiment 20001247 PARAMETER Experiment Name: At_Far-red-induction_P Parameter: Timepoint (hr) Value: 1
  misc_feature: MA Experiment 20001247 PARAMETER Experiment Name: At_Far-red-induction_P Parameter: Tissue Value: Whole Plant
  misc_feature: MA Experiment ID: 20001248 Result: Down-regulated in Transcription
  misc_feature: MA Experiment 20001248 PARAMETER Experiment Name: At_Far-red-induction_P Parameter: Age (day) Value: 7
  misc_feature: MA Experiment 20001248 PARAMETER Experiment Name: At_Far-red-induction_P Parameter: Light Value: Far-red vs. White
  misc_feature: MA Experiment 20001248 PARAMETER Experiment Name: At_Far-red-induction_P Parameter: Organism Value: A. thaliana
  misc_feature: MA Experiment 20001248 PARAMETER Experiment Name: At_Far-red-induction_P Parameter: Plant Line Value: Columbia
  misc_feature: MA Experiment 20001248 PARAMETER Experiment Name: At_Far-red-induction_P Parameter: Timepoint (hr) Value: 4
  misc_feature: MA Experiment 20001248 PARAMETER Experiment Name: At_Far-red-induction_P Parameter: Tissue Value: Whole Plant
  misc_feature: MA Experiment ID: 20001450 Result: Down-regulated in Transcription
  misc_feature: MA Experiment 20001450 PARAMETER Experiment Name: At_Far-red-induction_P Parameter: Age (day) Value: 7
  misc_feature: MA Experiment 20001450 PARAMETER Experiment Name: At_Far-red-induction_P Parameter: Light Value: Far-red vs. White
  misc_feature: MA Experiment 20001450 PARAMETER Experiment Name: At_Far-red-induction_P Parameter: Organism Value: A. thaliana
  misc_feature: MA Experiment 20001450 PARAMETER Experiment Name: At_Far-red-induction_P Parameter: Plant Line Value: Columbia
  misc_feature: MA Experiment 20001450 PARAMETER Experiment Name: At_Far-red-induction_P Parameter: Timepoint (hr) Value: 8
  misc_feature: MA Experiment 20001450 PARAMETER Experiment Name: At_Far-red-induction_P Parameter: Tissue Value: Whole Plant
  misc_feature: MA Experiment ID: 20001904 Result: Up-regulated in Transcription
  misc_feature: MA Experiment 20001904 PARAMETER Experiment Name: At_Drought_Reproduction_P Parameter: Age (day) Value: 37
  misc_feature: MA Experiment 20001904 PARAMETER Experiment Name: At_Drought_Reproduction_P Parameter: Organism Value: A. thaliana
  misc_feature: MA Experiment 20001904 PARAMETER Experiment Name: At_Drought_Reproduction_P Parameter: Plant Line Value: WS
  misc_feature: MA Experiment 20001904 PARAMETER Experiment Name: At_Drought_Reproduction_P Parameter: Timepoint (day) Value: 7
  misc_feature: MA Experiment 20001904 PARAMETER Experiment Name: At_Drought_Reproduction_P Parameter: Tissue Value: Rosettes
  misc_feature: MA Experiment 20001904 PARAMETER Experiment Name: At_Drought_Reproduction_P Parameter: Treatment Value: Drought vs. No Drought
  misc_feature: MA Experiment ID: 20001905 Result: Up-regulated in Transcription
  misc_feature: MA Experiment 20001905 PARAMETER Experiment Name: At_Drought_Reproduction_P Parameter: Age (day) Value: 40
  misc_feature: MA Experiment 20001905 PARAMETER Experiment Name: At_Drought_Reproduction_P Parameter: Organism Value: A. thaliana
  misc_feature: MA Experiment 20001905 PARAMETER Experiment Name: At_Drought_Reproduction_P Parameter: Plant Line Value: WS
  misc_feature: MA Experiment 20001905 PARAMETER Experiment Name: At_Drought_Reproduction_P Parameter: Timepoint (day) Value: 10
  misc_feature: MA Experiment 20001905 PARAMETER Experiment Name: At_Drought_Reproduction_P Parameter: Tissue Value: Rosettes
  misc_feature: MA Experiment 20001905 PARAMETER Experiment Name: At_Drought_Reproduction_P Parameter: Treatment Value: Drought vs. No Drought
ggtgaacatagaaacactcaaaacttcaaaccaaaaaaaataaatgggagaggaagagaagaaaccagaagcagcagaggaaaagaaaatggaagagaagaaaccagaagagaaaaaagaaggagaagacaagaaagtggatgctgagaaaaaaggagaagattctgacaagaagcctcaagaaggagaatctaacaaagattccaaagaagattctgctccggcggcgcctgaggctccagcaccgcctcctccgccgcaagaggttgttcttaaggtttacatgcactgtgaaggatgtgctagaaaagtccgccgttgtctcaaaggcttcgaaggagtggaagatgtgatgactgattgtaaaacggggaaagtggtggtgaaaggtgagaaagctgatccattgaaagtattagctagagttcagaggaagacccaccgtcaagttcagcttctgtctccgattcctcctccgcctccgccgccggagaagaaagcagaggaggataaacccattgtggaagagaagaaagtggagcctccggtggttgtgacggtggttcttaaggttcacatgcactgtgaagcttgtgcgacagagatcaagaaacggatcatgagaatgaaaggagtggaatctgctgaatccgacttaaagagttctcaagtgacggtgaaaggagtttttgaaccacaaaagcttgtagaatacgtttataagcgaaccggaaaacatgctgcgatcatgaaaatcgacccaccgcctccaccaccacctgaggaggcggctgcggcagcggaaggagagaagaaggaagaagaaaagggagaaggagaatccaaaggcgaagaagggaaggatgataaggcgaagacggacgaagaaaagaaagaaggggatggtggtaaaggggaaggcgaagcagcggataatggcggtggggaggaagaaggcaaagttgtggaggtgagaaagatagagaatccttattactactactattaccaaccaccgcgtgtggcgattccgcctatggaaatgccgccacacgcttatccgcctcaattgttcagcgacgagaatccaaatgcatgtactgtaatgtaacaaagaaaaacgcaaatgctataaagggtataatggggaatattttgaacaattttgatgaagtgggtacatggcatttgctgtctctcatagcatgtggtttctttctaatgtgtttgtgcagctcttttcttttaactgtaatttacattttaaaaaactcgcaacacgagttatttttaatggctatatataaacaataaaataataaatttactct

SEQ ID NO: 48376 - protein, 355 aa, Arabidopsis thaliana
  peptide (1)..(355): Ceres Seq. ID no. 13649304
  misc_feature (1)..(56): Pfam Name: Dehydrin Pfam Description: Dehydrin
  misc_feature (27)..(304): Homolog of NCBI NO: 31193908 NR Description: putative heavy-metal-associated protein
  misc_feature (17)..(354): Homolog of NCBI NO: 21594005 NR Description: unknown [Arabidopsis thaliana]
  misc_feature (17)..(354): Homolog of NCBI NO: 18420811 NR Description: copper-binding protein family [Arabidopsis
  misc_feature (276)..(354): Homolog of NCBI NO: 37532382 NR Description: putative ATFP3 [Oryza sativa (japonica
  misc_feature (49)..(265): Homolog of NCBI NO: 37532382 NR Description: putative ATFP3 [Oryza sativa (japonica
  misc_feature (1)..(341): Homolog of NCBI NO: 38344582 NR Description: OSJNBa0053B21.14 [Oryza sativa (japonica
  misc_feature (1)..(179): Homolog of NCBI NO: 24417342 NR Description: unknown [Arabidopsis thaliana]
  misc_feature (64)..(355): Homolog of NCBI NO: 4097547 NR Description: ATFP3 [Arabidopsis thaliana]
  misc_feature (16)..(355): Homolog of NCBI NO: 9758294 NR Description: contains similarity to ATFP3~gene_id:MLE2.16
  misc_feature (1)..(355): Homolog of NCBI NO: 18424719 NR Description: copper chaperone (CCH)-related [Arabidopsis
MGEEEKKPEAAEEKKMEEKKPEEKKEGEDKKVDAEKKGEDSDKKPQEGESNKDSKEDSAPAAPEAPAPPPPPQEVVLKVYMHCEGCARKVRRCLKGFEGVEDVMTDCKTGKVVVKGEKADPLKVLARVQRKTHRQVQLLSPIPPPPPPPEKKAEEDKPIVEEKKVEPPVVVTVVLKVHMHCEACATEIKKRIMRMKGVESAESDLKSSQVTVKGVFEPQKLVEYVYKRTGKHAAIMKIDPPPPPPPEEAAAAAEGEKKEEEKGEGESKGEEGKDDKAKTDEEKKEGDGGKGEGEAADNGGGEEEGKVVEVRKIENPYYYYYYQPPRVAIPPMEMPPHAYPPQLFSDENPNACTVM

SEQ ID NO: 48377 - protein, 340 aa, Arabidopsis thaliana
  peptide (1)..(340): Ceres Seq. ID no. 13649305
  misc_feature (174)..(274): Pfam Name: Dehydrin Pfam Description: Dehydrin
  misc_feature (12)..(289): Homolog of NCBI NO: 31193908 NR Description: putative heavy-metal-associated protein
  misc_feature (2)..(339): Homolog of NCBI NO: 21594005 NR Description: unknown [Arabidopsis thaliana]
  misc_feature (2)..(339): Homolog of NCBI NO: 18420811 NR Description: copper-binding protein family [Arabidopsis
  misc_feature (261)..(339): Homolog of NCBI NO: 37532382 NR Description: putative ATFP3 [Oryza sativa (japonica
  misc_feature (34)..(250): Homolog of NCBI NO: 37532382 NR Description: putative ATFP3 [Oryza sativa (japonica
  misc_feature (1)..(326): Homolog of NCBI NO: 38344582 NR Description: OSJNBa0053B21.14 [Oryza sativa (japonica
  misc_feature (1)..(164): Homolog of NCBI NO: 24417342 NR Description: unknown [Arabidopsis thaliana]
  misc_feature (49)..(340): Homolog of NCBI NO: 4097547 NR Description: ATFP3 [Arabidopsis thaliana]
  misc_feature (1)..(340): Homolog of NCBI NO: 9758294 NR Description: contains similarity to ATFP3~gene_id:MLE2.16
  misc_feature (1)..(340): Homolog of NCBI NO: 18424719 NR Description: copper chaperone (CCH)-related [Arabidopsis
MEEKKPEEKKEGEDKKVDAEKKGEDSDKKPQEGESNKDSKEDSAPAAPEAPAPPPPPQEVVLKVYMHCEGCARKVRRCLKGFEGVEDVMTDCKTGKVVVKGEKADPLKVLARVQRKTHRQVQLLSPIPPPPPPPEKKAEEDKPIVEEKKVEPPVVVTVVLKVHMHCEACATEIKKRIMRMKGVESAESDLKSSQVTVKGVFEPQKLVEYVYKRTGKHAAIMKIDPPPPPPPEEAAAAAEGEKKEEEKGEGESKGEEGKDDKAKTDEEKKEGDGGKGEGEAADNGGGEEEGKVVEVRKIENPYYYYYYQPPRVAIPPMEMPPHAYPPQLFSDENPNACTVM

SEQ ID NO: 48378 - protein, 275 aa, Arabidopsis thaliana
  peptide (1)..(275): Ceres Seq. ID no. 13649306
  misc_feature (109)..(209): Pfam Name: Dehydrin Pfam Description: Dehydrin
  misc_feature (1)..(224): Homolog of NCBI NO: 31193908 NR Description: putative heavy-metal-associated protein
  misc_feature (1)..(274): Homolog of NCBI NO: 21594005 NR Description: unknown [Arabidopsis thaliana]
  misc_feature (1)..(274): Homolog of NCBI NO: 18420811 NR Description: copper-binding protein family [Arabidopsis
  misc_feature (196)..(274): Homolog of NCBI NO: 37532382 NR Description: putative ATFP3 [Oryza sativa (japonica
  misc_feature (1)..(185): Homolog of NCBI NO: 37532382 NR Description: putative ATFP3 [Oryza sativa (japonica
  misc_feature (1)..(261): Homolog of NCBI NO: 38344582 NR Description: OSJNBa0053B21.14 [Oryza sativa (japonica
  misc_feature (1)..(99): Homolog of NCBI NO: 24417342 NR Description: unknown [Arabidopsis thaliana]
  misc_feature (1)..(275): Homolog of NCBI NO: 4097547 NR Description: ATFP3 [Arabidopsis thaliana]
  misc_feature (1)..(275): Homolog of NCBI NO: 9758294 NR Description: contains similarity to ATFP3~gene_id:MLE2.16
  misc_feature (1)..(275): Homolog of NCBI NO: 18424719 NR Description: copper chaperone (CCH)-related [Arabidopsis
MHCEGCARKVRRCLKGFEGVEDVMTDCKTGKVVVKGEKADPLKVLARVQRKTHRQVQLLSPIPPPPPPPEKKAEEDKPIVEEKKVEPPVVVTVVLKVHMHCEACATEIKKRIMRMKGVESAESDLKSSQVTVKGVFEPQKLVEYVYKRTGKHAAIMKIDPPPPPPPEEAAAAAEGEKKEEEKGEGESKGEEGKDDKAKTDEEKKEGDGGKGEGEAADNGGGEEEGKVVEVRKIENPYYYYYYQPPRVAIPPMEMPPHAYPPQLFSDENPNACTVM

SEQ ID NO: 48379 - DNA, 1419 bp, Arabidopsis thaliana
  misc_feature (1)..(1419): Ceres Seq. ID no. 13649083
  misc_feature: MA Experiment ID: 20000182 Result: Up-regulated in Transcription
  misc_feature: MA Experiment 20000182 PARAMETER Experiment Name: At_2mM_SA_P Parameter: Age (day) Value: 14
  misc_feature: MA Experiment 20000182 PARAMETER Experiment Name: At_2mM_SA_P Parameter: Organism Value: A. thaliana
  misc_feature: MA Experiment 20000182 PARAMETER Experiment Name: At_2mM_SA_P Parameter: Plant Line Value: WS
  misc_feature: MA Experiment 20000182 PARAMETER Experiment Name: At_2mM_SA_P Parameter: Timepoint (hr) Value: 6
  misc_feature: MA Experiment 20000182 PARAMETER Experiment Name: At_2mM_SA_P Parameter: Tissue Value: Aerial
  misc_feature: MA Experiment 20000182 PARAMETER Experiment Name: At_2mM_SA_P Parameter: Treatment Value: 2mM SA vs. No Treatment
  misc_feature: MA Experiment ID: 20000264 Result: Down-regulated in Transcription
  misc_feature: MA Experiment 20000264 PARAMETER Experiment Name: At_Open_Flower_P Parameter: Age (day) Value: 21
  misc_feature: MA Experiment 20000264 PARAMETER Experiment Name: At_Open_Flower_P Parameter: Plant Line Value: WS
  misc_feature: MA Experiment 20000264 PARAMETER Experiment Name: At_Open_Flower_P Parameter: Tissue Value: Open Flower vs. Whole Plant
  misc_feature: MA Experiment ID: 20000265 Result: Down-regulated in Transcription
  misc_feature: MA Experiment 20000265 PARAMETER Experiment Name: At_Open_Flower_P Parameter: Age (day) Value: 21
  misc_feature: MA Experiment 20000265 PARAMETER Experiment Name: At_Open_Flower_P Parameter: Plant Line Value: WS
  misc_feature: MA Experiment 20000265 PARAMETER Experiment Name: At_Open_Flower_P Parameter: Tissue Value: Closed Flower vs. Whole Plant
  misc_feature: MA Experiment ID: 20000286 Result: Down-regulated in Transcription
  misc_feature: MA Experiment 20000286 PARAMETER Experiment Name: At_Open_Flower_P Parameter: Age (day) Value: 21
  misc_feature: MA Experiment 20000286 PARAMETER Experiment Name: At_Open_Flower_P Parameter: Plant Line Value: WS
  misc_feature: MA Experiment 20000286 PARAMETER Experiment Name: At_Open_Flower_P Parameter: Tissue Value: Half Open vs. Whole Plant
  misc_feature: MA Experiment ID: 20000451 Result: Up-regulated in Transcription
  misc_feature: MA Experiment 20000451 PARAMETER Experiment Name: At_CS6879_Shoots-Roots_P Parameter: Age (day) Value: 14
  misc_feature: MA Experiment 20000451 PARAMETER Experiment Name: At_CS6879_Shoots-Roots_P Parameter: Organism Value: A. thaliana
  misc_feature: MA Experiment 20000451 PARAMETER Experiment Name: At_CS6879_Shoots-Roots_P Parameter: Plant Line Value: CS6879 vs. WS
  misc_feature: MA Experiment 20000451 PARAMETER Experiment Name: At_CS6879_Shoots-Roots_P Parameter: Tissue Value: Roots
  misc_feature: MA Experiment ID: 20000794 Result: Down-regulated in Transcription
  misc_feature: MA Experiment 20000794 PARAMETER Experiment Name: At_Petals_P Parameter: Age (day) Value: 23-25 days
  misc_feature: MA Experiment 20000794 PARAMETER Experiment Name: At_Petals_P Parameter: Plant Line Value: WS
  misc_feature: MA Experiment 20000794 PARAMETER Experiment Name: At_Petals_P Parameter: Tissue Value: Petals vs. Whole plant
tctttctctctctcgaataataatttttcatttgctgcgtccttttggtgcttgaagcgatgaccatggcagcaaatctagcgcgacggctgatcggaaaccgatcgactcagatccttggagccgtgaactctagctcaggtgcggctagttctgtcgctagggctttctgctcctccaccactccgatcaccgcaactctcttccctggcgatgggatcggtcccgagatcgccgaatctgtcaaaaaggtgtttacaacagctggtgtaccaattgagtgggaagaacactatgttgggactgagatagatccgagaacacagagtttcttgacatgggaaagtctcgaatctgtgcgtagaaacaaagttggtttgaaaggtccaatggctactccaattgggaaaggtcaccgttctttgaacctgactcttaggaaagagcttaatctatatgccaatgttagaccttgttacagtcttcctggttacaaaactcgttacgatgatgttgatctcattaccatcagagaaaacacggaaggagaatacagtggccttgaacatcaggttgttagaggtgtggtggaaagtcttaaaatcattacccgtcaggcgagtttgagagttgcagagtatgcttttctctatgccaagactcatggaagagagagagtttctgctatccacaaagccaacattatgcagaaaactgacggtctctttctcaagtgttgtcgtgaggttgctgagaagtatcctgagatcacttacgaggaggtcgttattgacaactgctgtatgatgcttgtgaaaaacccagcactttttgatgtcttggtgatgccaaacctgtacggtgacattattagcgatctgtgtgccggattggttggaggactaggattgactccaagttgtaatattggagaagatggtgtagcccttgctgaagcagttcacggttctgcacctgatatcgctggaaagaacttggcgaacccaaccgcgttgcttctgagtggagtgatgatgttgcgtcacctgaagttcaacgaacaagcagaacaaatccacagtgcaatcatcaacaccatagcagagggcaaatacagaaccgcggatcttggaggtagttcgaccaccacggaattcacaaaggcaatctgtgatcatctctgaacatcgtaaaatccaattctttatcgaatcttcttttgggagccttttttatagcctcgaattcttcttgttttcttgttttacgattagaataaaagaaaaagcaaaaaaacggctcttcatgagttttgaagttattgtttctgccttaaaatttctctgccgtaaggcaagaagattcataacactggaaaaagtgatgttctttctgaatcgatcagaagaattttgtttt

SEQ ID NO: 48380 - protein, 374 aa, Arabidopsis thaliana
  peptide (1)..(374): Ceres Seq. ID no. 13649084
  misc_feature (45)..(370): Pfam Name: Isocitrate/isopropylmalate dehydrogenase Pfam Description: Isocitrate/isopropylmalate dehydrogenase
  misc_feature (21)..(374): Homolog of NCBI NO: 24661184 NR Description: CG32026-PA [Drosophila melanogaster]
  misc_feature (3)..(351): Homolog of NCBI NO: 7427677 NR Description: 3-isopropylmalate dehydrogenase (EC 1.1.1.85)
  misc_feature (3)..(351): Homolog of NCBI NO: 266463 NR Description: 3-isopropylmalate dehydrogenase, chloroplast
  misc_feature (27)..(374): Homolog of NCBI NO: 34903262 NR Description: unnamed protein product [Oryza sativa (japonica
  misc_feature (3)..(374): Homolog of NCBI NO: 7431333 NR Description: probable isocitrate dehydrogenase (NAD) (EC
  misc_feature (46)..(374): Homolog of NCBI NO: 28974492 NR Description: NAD-dependent isocitrate dehydrogenase alpha
  misc_feature (1)..(374): Homolog of NCBI NO: 21536667 NR Description: putative (NAD+) isocitrate dehydrogenase
  misc_feature (1)..(374): Homolog of NCBI NO: 30681023 NR Description: isocitrate dehydrogenase [NAD+], putative
  misc_feature (3)..(374): Homolog of NCBI NO: 11251553 NR Description: 3-isopropylmalate dehydrogenase-like protein -
  misc_feature (1)..(374): Homolog of NCBI NO: 18414179 NR Description: isocitrate dehydrogenase [NAD+], putative
MTMAANLARRLIGNRSTQILGAVNSSSGAASSVARAFCSSTTPITATLFPGDGIGPEIAESVKKVFTTAGVPIEWEEHYVGTEIDPRTQSFLTWESLESVRRNKVGLKGPMATPIGKGHRSLNLTLRKELNLYANVRPCYSLPGYKTRYDDVDLITIRENTEGEYSGLEHQVVRGVVESLKIITRQASLRVAEYAFLYAKTHGRERVSAIHKANIMQKTDGLFLKCCREVAEKYPEITYEEVVIDNCCMMLVKNPALFDVLVMPNLYGDIISDLCAGLVGGLGLTPSCNIGEDGVALAEAVHGSAPDIAGKNLANPTALLLSGVMMLRHLKFNEQAEQIHSAIINTIAEGKYRTADLGGSSTTTEFTKAICDHL

SEQ ID NO: 48381 - protein, 372 aa, Arabidopsis thaliana
  peptide (1)..(372): Ceres Seq. ID no. 13649085
  misc_feature (43)..(368): Pfam Name: Isocitrate/isopropylmalate dehydrogenase Pfam Description: Isocitrate/isopropylmalate dehydrogenase
  misc_feature (19)..(372): Homolog of NCBI NO: 24661184 NR Description: CG32026-PA [Drosophila melanogaster]
  misc_feature (1)..(349): Homolog of NCBI NO: 7427677 NR Description: 3-isopropylmalate dehydrogenase (EC 1.1.1.85)
  misc_feature (1)..(349): Homolog of NCBI NO: 266463 NR Description: 3-isopropylmalate dehydrogenase, chloroplast
  misc_feature (25)..(372): Homolog of NCBI NO: 34903262 NR Description: unnamed protein product [Oryza sativa (japonica
  misc_feature (1)..(372): Homolog of NCBI NO: 7431333 NR Description: probable isocitrate dehydrogenase (NAD) (EC
  misc_feature (44)..(372): Homolog of NCBI NO: 28974492 NR Description: NAD-dependent isocitrate dehydrogenase alpha
  misc_feature (1)..(372): Homolog of NCBI NO: 21536667 NR Description: putative (NAD+) isocitrate dehydrogenase
  misc_feature (1)..(372): Homolog of NCBI NO: 30681023 NR Description: isocitrate dehydrogenase [NAD+], putative
  misc_feature (1)..(372): Homolog of NCBI NO: 11251553 NR Description: 3-isopropylmalate dehydrogenase-like protein -
  misc_feature (1)..(372): Homolog of NCBI NO: 18414179 NR Description: isocitrate dehydrogenase [NAD+], putative
MAANLARRLIGNRSTQILGAVNSSSGAASSVARAFCSSTTPITATLFPGDGIGPEIAESVKKVFTTAGVPIEWEEHYVGTEIDPRTQSFLTWESLESVRRNKVGLKGPMATPIGKGHRSLNLTLRKELNLYANVRPCYSLPGYKTRYDDVDLITIRENTEGEYSGLEHQVVRGVVESLKIITRQASLRVAEYAFLYAKTHGRERVSAIHKANIMQKTDGLFLKCCREVAEKYPEITYEEVVIDNCCMMLVKNPALFDVLVMPNLYGDIISDLCAGLVGGLGLTPSCNIGEDGVALAEAVHGSAPDIAGKNLANPTALLLSGVMMLRHLKFNEQAEQIHSAIINTIAEGKYRTADLGGSSTTTEFTKAICDHL

SEQ ID NO: 48382 - protein, 264 aa, Arabidopsis thaliana
  peptide (1)..(264): Ceres Seq. ID no. 13649086
  misc_feature (1)..(260): Pfam Name: Isocitrate/isopropylmalate dehydrogenase Pfam Description: Isocitrate/isopropylmalate dehydrogenase
  misc_feature (1)..(264): Homolog of NCBI NO: 24661184 NR Description: CG32026-PA [Drosophila melanogaster]
  misc_feature (1)..(241): Homolog of NCBI NO: 7427677 NR Description: 3-isopropylmalate dehydrogenase (EC 1.1.1.85)
  misc_feature (1)..(241): Homolog of NCBI NO: 266463 NR Description: 3-isopropylmalate dehydrogenase, chloroplast
  misc_feature (1)..(264): Homolog of NCBI NO: 34903262 NR Description: unnamed protein product [Oryza sativa (japonica
  misc_feature (1)..(264): Homolog of NCBI NO: 7431333 NR Description: probable isocitrate dehydrogenase (NAD) (EC
  misc_feature (1)..(264): Homolog of NCBI NO: 28974492 NR Description: NAD-dependent isocitrate dehydrogenase alpha
  misc_feature (1)..(264): Homolog of NCBI NO: 21536667 NR Description: putative (NAD+) isocitrate dehydrogenase
  misc_feature (1)..(264): Homolog of NCBI NO: 30681023 NR Description: isocitrate dehydrogenase [NAD+], putative
  misc_feature (1)..(264): Homolog of NCBI NO: 11251553 NR Description: 3-isopropylmalate dehydrogenase-like protein -
  misc_feature (1)..(264): Homolog of NCBI NO: 18414179 NR Description: isocitrate dehydrogenase [NAD+], putative
MATPIGKGHRSLNLTLRKELNLYANVRPCYSLPGYKTRYDDVDLITIRENTEGEYSGLEHQVVRGVVESLKIITRQASLRVAEYAFLYAKTHGRERVSAIHKANIMQKTDGLFLKCCREVAEKYPEITYEEVVIDNCCMMLVKNPALFDVLVMPNLYGDIISDLCAGLVGGLGLTPSCNIGEDGVALAEAVHGSAPDIAGKNLANPTALLLSGVMMLRHLKFNEQAEQIHSAIINTIAEGKYRTADLGGSSTTTEFTKAICDHL

SEQ ID NO: 48383 - DNA, 2720 bp, Arabidopsis thaliana
  misc_feature (1)..(2720): Ceres Seq. ID no. 12575670
  misc_feature: MA Experiment ID: 20000315 Result: Down-regulated in Transcription
  misc_feature: MA Experiment 20000315 PARAMETER Experiment Name: At_14day_Shoots-Roots_Sub_P Parameter: Age (day) Value: 14
  misc_feature: MA Experiment 20000315 PARAMETER Experiment Name: At_14day_Shoots-Roots_Sub_P Parameter: Organism Value: A. thaliana
  misc_feature: MA Experiment 20000315 PARAMETER Experiment Name: At_14day_Shoots-Roots_Sub_P Parameter: Plant Line Value: WS
  misc_feature: MA Experiment 20000315 PARAMETER Experiment Name: At_14day_Shoots-Roots_Sub_P Parameter: Tissue Value: Shoots vs. Whole Plant
gaattagttcttatctttcgtctgcttcatcttctctctagtctctctctctctcttcaccgcgtacacagtaacacagaccctttttccctcttactcaaggttcttctttgtcatcttgttgccgaatccacaaagaggagaataaagattcgacctttattagatattaacgactctggatttttgggtttttggagttggatccacatgggttcttatccggatggattccctggatccatggacgagttggatttcaataaggactttgatttgcctccctcctcaaaccaaaccttaggtttagctaatgggttctatttagatgacttagatttctcatccttggatcctccagaggcatatccctcccagaacaacaacaacaacaacatcaacaacaaagctgtagcaggagatctgttatcatcttcatctgatgacgctgatttctctgattctgttttgaagtatataagccaagttcttatggaagaggatatggaagagaagccttgtatgtttcatgacgctttggctcttcaagctgctgagaaatctctctatgaggctcttggtgagaaatacccttcttcgtcttctgcttcttctgtggatcatcctgagagattggctagtgatagccctgacggttcttgttcaggtggtgcttttagtgattacgctagcaccactaccactacttcctctgattctcactggagtgttgatggtttggagaatagaccttcttggttacatacacctatgccgagtaattttgttttccagtctacttctaggtccaacagtgtcaccggtggtggtggtggtggtaatagtgcggtttacggttcaggttttggcgatgatttggtttcgaatatgtttaaagatgatgaattggctatgcagttcaagaaaggggttgaggaagctagtaagttccttcctaagtcttctcagctctttattgatgtggatagttacatccctatgaattctggttccaaggaaaatggttctgaggtttttgttaagacggagaagaaagatgagacagagcatcatcatcatcatagctatgctcctcctcccaacagattaactggtaagaaaagccattggcgcgacgaagatgaagatttcgttgaagaaagaagtaacaagcaatcagctgtttatgttgaggaaagcgagctttctgaaatgtttgataagatcttggtatgtggccctgggaaacctgtatgcattcttaaccagaactttcctacagaatccgctaaagtcgtgaccgcacagtcaaatggagcaaagattcgtgggaagaaatcaacttctactagtcatagtaacgattctaagaaagaaactgctgatttgaggactcttttggtgttatgtgcacaagctgtatcagtggatgatcgtagaaccgccaacgaaatgctaaggcagatacgagagcattcttcgcctctaggcaatggttcagagcggttggctcattattttgcaaatagtcttgaagcacgcttagctgggaccggtacacagatctacaccgctttatcttcgaagaaaacgtctgcagcagacatgttgaaggcttaccagacatacatgtcggtctgccctttcaagaaagctgctatcatatttgctaaccacagcatgatgcgtttcactgcaaacgccaacacgatccacataatagatttcggaatatcttacggttttcagtggcctgctctgattcatcgcctctcgctcagcagacctggtggttcgcctaagcttcgaattaccggtatagagcttcctcagcgcggttttagaccagcggaaggagttcaggagacaggtcatcgcttggctcgatactgtcagcgacacaatgttccgtttgagtacaacgcaattgctcagaaatgggaaacgatccaagtcgaagacttaaagcttcgacaaggagagtatgtggttgtgaactctttgttccgtttcaggaaccttctagatgagaccgttctggtaaacagcccgagagatgcagttttgaagctgataagaaaaataaacccgaatgtcttcattccagcgatcttaagcgggaattacaacgcgccattctttgtcacgaggttcagagaagcgttgtttcattactcggctgtgtttgatatgtgtgactcgaagctagctagggaagacgagatgaggctgatgtatgagaaagagttttatgggagagagattgtgaatgttgtggcttgtgaaggaacagagagagtggagagaccagagacatataagcagtggcaggcgagactgatccgagccggatttagacagcttccgcttgagaaggaactgatgcagaatctgaagttgaaaatcgaaaacgggtacgataaaaacttcgatgttgatcaaaacggtaactggttacttcaagggtggaaaggtagaatcgtgtatgcttcatctctatgggttccttcgtcttcatagatgttgtttcttacgttctaagcgactgggatttatgtagggcttttctgttgatagtctctcgccaacacgagtggattaagttcagagttagggttcttgaacactagaatgttgttatattatgcttgtgacatagcgtgtgtaagagtgtagcctaagagatatagtactcattgcatgatcttttgctatatgtt

SEQ ID NO: 48384 - protein, 839 aa, Arabidopsis thaliana
  peptide (1)..(839): Ceres Seq. ID no. 12575671
  misc_feature (437)..(744): Pfam Name: GRAS family transcription factor Pfam Description: GRAS family transcription factor
  misc_feature (186)..(358): Homolog of NCBI NO: 8778540 NR Description: F22G5.9 [Arabidopsis thaliana]
  misc_feature (371)..(837): Homolog of NCBI NO: 15222432 NR Description: transcription factor scarecrow-like 14, putative
  misc_feature (371)..(837): Homolog of NCBI NO: 8778540 NR Description: F22G5.9 [Arabidopsis thaliana]
  misc_feature (226)..(838): Homolog of NCBI NO: 34908186 NR Description: P0406G08.7 [Oryza sativa (japonica
  misc_feature (147)..(224): Homolog of NCBI NO: 15224338 NR Description: putative SCARECROW gene regulator; protein id:
  misc_feature (255)..(838): Homolog of NCBI NO: 15224338 NR Description: putative SCARECROW gene regulator; protein id:
  misc_feature (105)..(838): Homolog of NCBI NO: 32813435 NR Description: SCARECROW-like protein [Lilium longiflorum]
  misc_feature (291)..(837): Homolog of NCBI NO: 15227022 NR Description: putative SCARECROW gene regulator; protein id:
  misc_feature (102)..(356): Homolog of NCBI NO: 15227022 NR Description: putative SCARECROW gene regulator; protein id:
  misc_feature (367)..(836): Homolog of NCBI NO: 15227022 NR Description: putative SCARECROW gene regulator; protein id:
ELVLIFRLLHLLSSLSLSLHRVHSNTDPFSLLLKVLLCHLVAESTKRRIKIRPLLDINDSGFLGFWSWIHMGSYPDGFPGSMDELDFNKDFDLPPSSNQTLGLANGFYLDDLDFSSLDPPEAYPSQNNNNNNINNKAVAGDLLSSSSDDADFSDSVLKYISQVLMEEDMEEKPCMFHDALALQAAEKSLYEALGEKYPSSSSASSVDHPERLASDSPDGSCSGGAFSDYASTTTTTSSDSHWSVDGLENRPSWLHTPMPSNFVFQSTSRSNSVTGGGGGGNSAVYGSGFGDDLVSNMFKDDELAMQFKKGVEEASKFLPKSSQLFIDVDSYIPMNSGSKENGSEVFVKTEKKDETEHHHHHSYAPPPNRLTGKKSHWRDEDEDFVEERSNKQSAVYVEESELSEMFDKILVCGPGKPVCILNQNFPTESAKVVTAQSNGAKIRGKKSTSTSHSNDSKKETADLRTLLVLCAQAVSVDDRRTANEMLRQIREHSSPLGNGSERLAHYFANSLEARLAGTGTQIYTALSSKKTSAADMLKAYQTYMSVCPFKKAAIIFANHSMMRFTANANTIHIIDFGISYGFQWPALIHRLSLSRPGGSPKLRITGIELPQRGFRPAEGVQETGHRLARYCQRHNVPFEYNAIAQKWETIQVEDLKLRQGEYVVVNSLFRFRNLLDETVLVNSPRDAVLKLIRKINPNVFIPAILSGNYNAPFFVTRFREALFHYSAVFDMCDSKLAREDEMRLMYEKEFYGREIVNVVACEGTERVERPETYKQWQARLIRAGFRQLPLEKELMQNLKLKIENGYDKNFDVDQNGNWLLQGWKGRIVYASSLWVPSSS

SEQ ID NO: 48385 - protein, 769 aa, Arabidopsis thaliana
  peptide (1)..(769): Ceres Seq. ID no. 12575672
  misc_feature (367)..(674): Pfam Name: GRAS family transcription factor Pfam Description: GRAS family transcription factor
  misc_feature (116)..(288): Homolog of NCBI NO: 8778540 NR Description: F22G5.9 [Arabidopsis thaliana]
  misc_feature (301)..(767): Homolog of NCBI NO: 15222432 NR Description: transcription factor scarecrow-like 14, putative
  misc_feature (301)..(767): Homolog of NCBI NO: 8778540 NR Description: F22G5.9 [Arabidopsis thaliana]
  misc_feature (156)..(768): Homolog of NCBI NO: 34908186 NR Description: P0406G08.7 [Oryza sativa (japonica
  misc_feature (77)..(154): Homolog of NCBI NO: 15224338 NR Description: putative SCARECROW gene regulator; protein id:
  misc_feature (185)..(768): Homolog of NCBI NO: 15224338 NR Description: putative SCARECROW gene regulator; protein id:
  misc_feature (35)..(768): Homolog of NCBI NO: 32813435 NR Description: SCARECROW-like protein [Lilium longiflorum]
  misc_feature (221)..(767): Homolog of NCBI NO: 15227022 NR Description: putative SCARECROW gene regulator; protein id:
  misc_feature (32)..(286): Homolog of NCBI NO: 15227022 NR Description: putative SCARECROW gene regulator; protein id:
  misc_feature (297)..(766): Homolog of NCBI NO: 15227022 NR Description: putative SCARECROW gene regulator; protein id:
MGSYPDGFPGSMDELDFNKDFDLPPSSNQTLGLANGFYLDDLDFSSLDPPEAYPSQNNNNNNINNKAVAGDLLSSSSDDADFSDSVLKYISQVLMEEDMEEKPCMFHDALALQAAEKSLYEALGEKYPSSSSASSVDHPERLASDSPDGSCSGGAFSDYASTTTTTSSDSHWSVDGLENRPSWLHTPMPSNFVFQSTSRSNSVTGGGGGGNSAVYGSGFGDDLVSNMFKDDELAMQFKKGVEEASKFLPKSSQLFIDVDSYIPMNSGSKENGSEVFVKTEKKDETEHHHHHSYAPPPNRLTGKKSHWRDEDEDFVEERSNKQSAVYVEESELSEMFDKILVCGPGKPVCILNQNFPTESAKVVTAQSNGAKIRGKKSTSTSHSNDSKKETADLRTLLVLCAQAVSVDDRRTANEMLRQIREHSSPLGNGSERLAHYFANSLEARLAGTGTQIYTALSSKKTSAADMLKAYQTYMSVCPFKKAAIIFANHSMMRFTANANTIHIIDFGISYGFQWPALIHRLSLSRPGGSPKLRITGIELPQRGFRPAEGVQETGHRLARYCQRHNVPFEYNAIAQKWETIQVEDLKLRQGEYVVVNSLFRFRNLLDETVLVNSPRDAVLKLIRKINPNVFIPAILSGNYNAPFFVTRFREALFHYSAVFDMCDSKLAREDEMRLMYEKEFYGREIVNVVACEGTERVERPETYKQWQARLIRAGFRQLPLEKELMQNLKLKIENGYDKNFDVDQNGNWLLQGWKGRIVYASSLWVPSSS

SEQ ID NO: 48386 - protein, 758 aa, Arabidopsis thaliana
  peptide (1)..(758): Ceres Seq. ID no. 12575673
  misc_feature (356)..(663): Pfam Name: GRAS family transcription factor Pfam Description: GRAS family transcription factor
  misc_feature (105)..(277): Homolog of NCBI NO: 8778540 NR Description: F22G5.9 [Arabidopsis thaliana]
  misc_feature (290)..(756): Homolog of NCBI NO: 15222432 NR Description: transcription factor scarecrow-like 14, putative
  misc_feature (290)..(756): Homolog of NCBI NO: 8778540 NR Description: F22G5.9 [Arabidopsis thaliana]
  misc_feature (145)..(757): Homolog of NCBI NO: 34908186 NR Description: P0406G08.7 [Oryza sativa (japonica
  misc_feature (66)..(143): Homolog of NCBI NO: 15224338 NR Description: putative SCARECROW gene regulator; protein id:
  misc_feature (174)..(757): Homolog of NCBI NO: 15224338 NR Description: putative SCARECROW gene regulator; protein id:
  misc_feature (24)..(757): Homolog of NCBI NO: 32813435 NR Description: SCARECROW-like protein [Lilium longiflorum]
  misc_feature (210)..(756): Homolog of NCBI NO: 15227022 NR Description: putative SCARECROW gene regulator; protein id:
  misc_feature (21)..(275): Homolog of NCBI NO: 15227022 NR Description: putative SCARECROW gene regulator; protein id:
  misc_feature (286)..(755): Homolog of NCBI NO: 15227022 NR Description: putative SCARECROW gene regulator; protein id:
MDELDFNKDFDLPPSSNQTLGLANGFYLDDLDFSSLDPPEAYPSQNNNNNNINNKAVAGDLLSSSSDDADFSDSVLKYISQVLMEEDMEEKPCMFHDALALQAAEKSLYEALGEKYPSSSSASSVDHPERLASDSPDGSCSGGAFSDYASTTTTTSSDSHWSVDGLENRPSWLHTPMPSNFVFQSTSRSNSVTGGGGGGNSAVYGSGFGDDLVSNMFKDDELAMQFKKGVEEASKFLPKSSQLFIDVDSYIPMNSGSKENGSEVFVKTEKKDETEHHHHHSYAPPPNRLTGKKSHWRDEDEDFVEERSNKQSAVYVEESELSEMFDKILVCGPGKPVCILNQNFPTESAKVVTAQSNGAKIRGKKSTSTSHSNDSKKETADLRTLLVLCAQAVSVDDRRTANEMLRQIREHSSPLGNGSERLAHYFANSLEARLAGTGTQIYTALSSKKTSAADMLKAYQTYMSVCPFKKAAIIFANHSMMRFTANANTIHIIDFGISYGFQWPALIHRLSLSRPGGSPKLRITGIELPQRGFRPAEGVQETGHRLARYCQRHNVPFEYNAIAQKWETIQVEDLKLRQGEYVVVNSLFRFRNLLDETVLVNSPRDAVLKLIRKINPNVFIPAILSGNYNAPFFVTRFREALFHYSAVFDMCDSKLAREDEMRLMYEKEFYGREIVNVVACEGTERVERPETYKQWQARLIRAGFRQLPLEKELMQNLKLKIENGYDKNFDVDQNGNWLLQGWKGRIVYASSLWVPSSS

SEQ ID NO: 48387 - DNA, 3085 bp, Arabidopsis thaliana; identical to SEQ ID NO: 45153
  misc_feature (1)..(3085): Ceres Seq. ID no. 13592143
  misc_feature: MA Experiment ID: 20000182 Result: Up-regulated in Transcription
  misc_feature: MA Experiment 20000182 PARAMETER Experiment Name: At_2mM_SA_P Parameter: Age (day) Value: 14
  misc_feature: MA Experiment 20000182 PARAMETER Experiment Name: At_2mM_SA_P Parameter: Organism Value: A. thaliana
  misc_feature: MA Experiment 20000182 PARAMETER Experiment Name: At_2mM_SA_P Parameter: Plant Line Value: WS
  misc_feature: MA Experiment 20000182 PARAMETER Experiment Name: At_2mM_SA_P Parameter: Timepoint (hr) Value: 6
  misc_feature: MA Experiment 20000182 PARAMETER Experiment Name: At_2mM_SA_P Parameter: Tissue Value: Aerial
  misc_feature: MA Experiment 20000182 PARAMETER Experiment Name: At_2mM_SA_P Parameter: Treatment Value: 2mM SA vs. No Treatment
  misc_feature: MA Experiment ID: 20000184 Result: Up-regulated in Transcription
  misc_feature: MA Experiment 20000184 PARAMETER Experiment Name: At_Shoots__P Parameter: Age (day) Value: 7
  misc_feature: MA Experiment 20000184 PARAMETER Experiment Name: At_Shoots__P Parameter: Tissue Value: Shoots vs. Whole Plant
  misc_feature: MA Experiment ID: 20000185 Result: Down-regulated in Transcription
  misc_feature: MA Experiment 20000185 PARAMETER Experiment Name: At_Roots__P Parameter: Age (day) Value: 7 vs. 21
  misc_feature: MA Experiment 20000185 PARAMETER Experiment Name: At_Roots__P Parameter: Organism Value: A. thaliana
  misc_feature: MA Experiment 20000185 PARAMETER Experiment Name: At_Roots__P Parameter: Tissue Value: Roots vs. Whole Plant
  misc_feature: MA Experiment ID: 20000213 Result: Up-regulated in Transcription
  misc_feature: MA Experiment 20000213 PARAMETER Experiment Name: At_4deg_Cold_P Parameter: Timepoint (hr) Value: 2
  misc_feature: MA Experiment ID: 20000234 Result: Down-regulated in Transcription
  misc_feature: MA Experiment 20000234 PARAMETER Experiment Name: At_Siliques_P Parameter: Age (day) Value: 21
  misc_feature: MA Experiment 20000234 PARAMETER Experiment Name: At_Siliques_P Parameter: Organism Value: A. thaliana
  misc_feature: MA Experiment 20000234 PARAMETER Experiment Name: At_Siliques_P Parameter: Plant Line Value: WS
  misc_feature: MA Experiment 20000234 PARAMETER Experiment Name: At_Siliques_P Parameter: Tissue Value: Less Than 5mm Siliques vs. Whole Plant
  misc_feature: MA Experiment ID: 20000264 Result: Down-regulated in Transcription
  misc_feature: MA Experiment 20000264 PARAMETER Experiment Name: At_Open_Flower_P Parameter: Age (day) Value: 21
  misc_feature: MA Experiment 20000264 PARAMETER Experiment Name: At_Open_Flower_P Parameter: Plant Line Value: WS
  misc_feature: MA Experiment 20000264 PARAMETER Experiment Name: At_Open_Flower_P Parameter: Tissue Value: Open Flower vs. Whole Plant
  misc_feature: MA Experiment ID: 20000265 Result: Down-regulated in Transcription
  misc_feature: MA Experiment 20000265 PARAMETER Experiment Name: At_Open_Flower_P Parameter: Age (day) Value: 21
  misc_feature: MA Experiment 20000265 PARAMETER Experiment Name: At_Open_Flower_P Parameter: Plant Line Value: WS
  misc_feature: MA Experiment 20000265 PARAMETER Experiment Name: At_Open_Flower_P Parameter: Tissue Value: Closed Flower vs. Whole Plant
  misc_feature: MA Experiment ID: 20000267 Result: Down-regulated in Transcription
  misc_feature: MA Experiment 20000267 PARAMETER Experiment Name: At_Drought_P Parameter: Age (day) Value: 7
  misc_feature: MA Experiment 20000267 PARAMETER Experiment Name: At_Drought_P Parameter: Organism Value: A. thaliana
  misc_feature: MA Experiment 20000267 PARAMETER Experiment Name: At_Drought_P Parameter: Plant Line Value: WS
  misc_feature: MA Experiment 20000267 PARAMETER Experiment Name: At_Drought_P Parameter: Timepoint (hr) Value: 6
  misc_feature: MA Experiment 20000267 PARAMETER Experiment Name: At_Drought_P Parameter: Tissue Value: Whole Plant
  misc_feature: MA Experiment 20000267 PARAMETER Experiment Name: At_Drought_P Parameter: Treatment Value: Drought vs. No Drought
  misc_feature: MA Experiment ID: 20000269 Result: Up-regulated in Transcription
  misc_feature: MA Experiment 20000269 PARAMETER Experiment Name: At_1mM_KNO3_L-vs-H_Roots_P Parameter: Age (day) Value: 7,10,12
  misc_feature: MA Experiment 20000269 PARAMETER Experiment Name: At_1mM_KNO3_L-vs-H_Roots_P Parameter: Organism Value: A. thaliana
  misc_feature: MA Experiment 20000269 PARAMETER Experiment Name: At_1mM_KNO3_L-vs-H_Roots_P Parameter: Plant Line Value: WS
  misc_feature: MA Experiment 20000269 PARAMETER Experiment Name: At_1mM_KNO3_L-vs-H_Roots_P Parameter: Timepoint (day) Value: 7,10,12
  misc_feature: MA Experiment 20000269 PARAMETER Experiment Name: At_1mM_KNO3_L-vs-H_Roots_P Parameter: Tissue Value: Roots
  misc_feature: MA Experiment 20000269 PARAMETER Experiment Name: At_1mM_KNO3_L-vs-H_Roots_P Parameter: Treatment Value: 1mM KNO3 vs. 50mM KNO3
  misc_feature: MA Experiment ID: 20000286 Result: Down-regulated in Transcription
  misc_feature: MA Experiment 20000286 PARAMETER Experiment Name: At_Open_Flower_P Parameter: Age (day) Value: 21
  misc_feature: MA Experiment 20000286 PARAMETER Experiment Name: At_Open_Flower_P Parameter: Plant Line Value: WS
  misc_feature: MA Experiment 20000286 PARAMETER Experiment Name: At_Open_Flower_P Parameter: Tissue Value: Half Open vs. Whole Plant
  misc_feature: MA Experiment ID: 20000308 Result: Down-regulated in Transcription
  misc_feature: MA Experiment 20000308 PARAMETER Experiment Name: At_100mM_NaCl__P Parameter: Age (day) Value: 17
  misc_feature: MA Experiment 20000308 PARAMETER Experiment Name: At_100mM_NaCl__P Parameter: Organism Value: A. thaliana
  misc_feature: MA Experiment 20000308 PARAMETER Experiment Name: At_100mM_NaCl__P Parameter: Plant Line Value: WS
  misc_feature: MA Experiment 20000308 PARAMETER Experiment Name: At_100mM_NaCl__P Parameter: Timepoint (hr) Value: 72
  misc_feature: MA Experiment 20000308 PARAMETER Experiment Name: At_100mM_NaCl__P Parameter: Tissue Value: Whole Plant
  misc_feature: MA Experiment 20000308 PARAMETER Experiment Name: At_100mM_NaCl__P Parameter: Treatment Value: 100mM NaCl vs. No Treatment
  misc_feature: MA Experiment ID: 20000437 Result: Down-regulated in Transcription
  misc_feature: MA Experiment 20000437 PARAMETER Experiment Name: At_Drought_P Parameter: Age (day) Value: 8
  misc_feature: MA Experiment 20000437 PARAMETER Experiment Name: At_Drought_P Parameter: Organism Value: A. thaliana
  misc_feature: MA Experiment 20000437 PARAMETER Experiment Name: At_Drought_P Parameter: Plant Line Value: WS
  misc_feature: MA Experiment 20000437 PARAMETER Experiment Name: At_Drought_P Parameter: Timepoint (hr) Value: 24
  misc_feature: MA Experiment 20000437 PARAMETER Experiment Name: At_Drought_P Parameter: Tissue Value: Whole Plant
  misc_feature: MA Experiment 20000437 PARAMETER Experiment Name: At_Drought_P Parameter: Treatment Value: Drought vs. No Drought
  misc_feature: MA Experiment ID: 20000441 Result: Up-regulated in Transcription
  misc_feature: MA Experiment 20000441 PARAMETER Experiment Name: At_1uM_BR-BRZ__P Parameter: Tissue Value: Shoot Apices
  misc_feature: MA Experiment 20000441 PARAMETER Experiment Name: At_1uM_BR-BRZ__P Parameter: Treatment Value: 1uM BR vs. No Treatment
  misc_feature: MA Experiment ID: 20000443 Result: Up-regulated in Transcription
  misc_feature: MA Experiment 20000443 PARAMETER Experiment Name: At_1uM_BR-BRZ__P Parameter: Tissue Value: Shoot Apices
  misc_feature: MA Experiment 20000443 PARAMETER Experiment Name: At_1uM_BR-BRZ__P Parameter: Treatment Value: 1uM BRZ vs. No Treatment
  misc_feature: MA Experiment ID: 20000495 Result: Down-regulated in Transcription
  misc_feature: MA Experiment 20000495 PARAMETER Experiment Name: At_Guard_Cells_P Parameter: Harvest Date Value: 8/2/2002
  misc_feature: MA Experiment 20000495 PARAMETER Experiment Name: At_Guard_Cells_P Parameter: Organism Value: A. thaliana
  misc_feature: MA Experiment 20000495 PARAMETER Experiment Name: At_Guard_Cells_P Parameter: Tissue Value: Guard Cells vs. Leaves
  misc_feature: MA Experiment ID: 20000709 Result: Up-regulated in Transcription
  misc_feature: MA Experiment 20000709 PARAMETER Experiment Name: At_15mM_NH4NO3_L-to-H_P Parameter: Age (hr) Value: 14
  misc_feature: MA Experiment 20000709 PARAMETER Experiment Name: At_15mM_NH4NO3_L-to-H_P Parameter: Organism Value: A. thaliana
  misc_feature: MA Experiment 20000709 PARAMETER Experiment Name: At_15mM_NH4NO3_L-to-H_P Parameter: Plant Line Value: WS
  misc_feature: MA Experiment 20000709 PARAMETER Experiment Name: At_15mM_NH4NO3_L-to-H_P Parameter: Timepoint (hr) Value: 4
  misc_feature: MA Experiment 20000709 PARAMETER Experiment Name: At_15mM_NH4NO3_L-to-H_P Parameter: Tissue Value: Aerial
  misc_feature: MA Experiment 20000709 PARAMETER Experiment Name: At_15mM_NH4NO3_L-to-H_P Parameter: Treatment Value: 15mM NH4NO3 vs. 30mM Mannitol
  misc_feature: MA Experiment ID: 20000794 Result: Down-regulated in Transcription
  misc_feature: MA Experiment 20000794 PARAMETER Experiment Name: At_Petals_P Parameter: Age (day) Value: 23-25 days
  misc_feature: MA Experiment 20000794 PARAMETER Experiment Name: At_Petals_P Parameter: Plant Line Value: WS
  misc_feature: MA Experiment 20000794 PARAMETER Experiment Name: At_Petals_P Parameter: Tissue Value: Petals vs. Whole plant
  misc_feature: MA Experiment ID: 20001457 Result: Up-regulated in Transcription
  misc_feature: MA Experiment 20001457 PARAMETER Experiment Name: At_50mM_NH4NO3_L-to-H_P Parameter: Age (day) Value: Undefined
  misc_feature: MA Experiment 20001457 PARAMETER Experiment Name: At_50mM_NH4NO3_L-to-H_P Parameter: Organism Value: Undefined
  misc_feature: MA Experiment 20001457 PARAMETER Experiment Name: At_50mM_NH4NO3_L-to-H_P Parameter: Plant Line Value: Undefined
  misc_feature: MA Experiment 20001457 PARAMETER Experiment Name: At_50mM_NH4NO3_L-to-H_P Parameter: Timepoint (hr) Value: 0.5
  misc_feature: MA Experiment 20001457 PARAMETER Experiment Name: At_50mM_NH4NO3_L-to-H_P Parameter: Tissue Value: Siliques
  misc_feature: MA Experiment 20001457 PARAMETER Experiment Name: At_50mM_NH4NO3_L-to-H_P Parameter: Treatment Value: 50mM NH4NO3 vs. 100mM Manitol
  misc_feature: MA Experiment ID: 20001458 Result: Up-regulated in Transcription
  misc_feature: MA Experiment 20001458 PARAMETER Experiment Name: At_50mM_NH4NO3_L-to-H_P Parameter: Age (day) Value: Undefined
  misc_feature: MA Experiment 20001458 PARAMETER Experiment Name: At_50mM_NH4NO3_L-to-H_P Parameter: Organism Value: Undefined
  misc_feature: MA Experiment 20001458 PARAMETER Experiment Name: At_50mM_NH4NO3_L-to-H_P Parameter: Plant Line Value: Undefined
  misc_feature: MA Experiment 20001458 PARAMETER Experiment Name: At_50mM_NH4NO3_L-to-H_P Parameter: Timepoint (hr) Value: 2
  misc_feature: MA Experiment 20001458 PARAMETER Experiment Name: At_50mM_NH4NO3_L-to-H_P Parameter: Tissue Value: Siliques
  misc_feature: MA Experiment 20001458 PARAMETER Experiment Name: At_50mM_NH4NO3_L-to-H_P Parameter: Treatment Value: 50mM NH4NO3 vs. 100mM Manitol
  misc_feature: MA Experiment ID: 20001459 Result: Up-regulated in Transcription
  misc_feature: MA Experiment 20001459 PARAMETER Experiment Name: At_50mM_NH4NO3_L-to-H_P Parameter: Age (day) Value: Undefined
  misc_feature: MA Experiment 20001459 PARAMETER Experiment Name: At_50mM_NH4NO3_L-to-H_P Parameter: Organism Value: Undefined
  misc_feature: MA Experiment 20001459 PARAMETER Experiment Name: At_50mM_NH4NO3_L-to-H_P Parameter: Plant Line Value: Undefined
  misc_feature: MA Experiment 20001459 PARAMETER Experiment Name: At_50mM_NH4NO3_L-to-H_P Parameter: Timepoint (hr) Value: 4
  misc_feature: MA Experiment 20001459 PARAMETER Experiment Name: At_50mM_NH4NO3_L-to-H_P Parameter: Tissue Value: Siliques
  misc_feature: MA Experiment 20001459 PARAMETER Experiment Name: At_50mM_NH4NO3_L-to-H_P Parameter: Treatment Value: 50mM NH4NO3 vs. 100mM Manitol
  misc_feature: MA Experiment ID: 20001557 Result: Up-regulated in Transcription
  misc_feature: MA Experiment 20001557 PARAMETER Experiment Name: At_Drought_Soil_Dry_P Parameter: Age (day) Value: 27
  misc_feature: MA Experiment 20001557 PARAMETER Experiment Name: At_Drought_Soil_Dry_P Parameter: Organism Value: A. thaliana
  misc_feature: MA Experiment 20001557 PARAMETER Experiment Name: At_Drought_Soil_Dry_P Parameter: Plant Line Value: WS
  misc_feature: MA Experiment 20001557 PARAMETER Experiment Name: At_Drought_Soil_Dry_P Parameter: Post Timepoint (hr) Value: 3
  misc_feature: MA Experiment 20001557 PARAMETER Experiment Name: At_Drought_Soil_Dry_P Parameter: Post-Treatment Value: Re-Water vs. No Drought
  misc_feature: MA Experiment 20001557 PARAMETER Experiment Name: At_Drought_Soil_Dry_P Parameter: Timepoint (day) Value: 13
  misc_feature: MA Experiment 20001557 PARAMETER Experiment Name: At_Drought_Soil_Dry_P Parameter: Treatment Value: Drought vs. No Drought
  misc_feature: MA Experiment ID: 20001755 Result: Up-regulated in Transcription
  misc_feature: MA Experiment 20001755 PARAMETER Experiment Name: At_50mM_NH4NO3_L-to-H_P Parameter: Timepoint (hr) Value: 2
  misc_feature: MA Experiment 20001755 PARAMETER Experiment Name: At_50mM_NH4NO3_L-to-H_P Parameter: Tissue Value: Leaf
  misc_feature: MA Experiment 20001755 PARAMETER Experiment Name: At_50mM_NH4NO3_L-to-H_P Parameter: Treatment Value: 50mM NH4NO3 vs 100mM Mannitol
  misc_feature: MA Experiment ID: 20001757 Result: Up-regulated in Transcription
  misc_feature: MA Experiment 20001757 PARAMETER Experiment Name: At_50mM_NH4NO3_L-to-H_P Parameter: Timepoint (hr) Value: 6
  misc_feature: MA Experiment 20001757 PARAMETER Experiment Name: At_50mM_NH4NO3_L-to-H_P Parameter: Tissue Value: Leaf
  misc_feature: MA Experiment 20001757 PARAMETER Experiment Name: At_50mM_NH4NO3_L-to-H_P Parameter: Treatment Value: 50mM NH4NO3 vs 100mM Mannitol
  misc_feature: MA Experiment ID: 20001759 Result: Up-regulated in Transcription
  misc_feature: MA Experiment 20001759 PARAMETER Experiment Name: At_50mM_NH4NO3_L-to-H_P Parameter: Timepoint (hr) Value: 1
  misc_feature: MA Experiment 20001759 PARAMETER Experiment Name: At_50mM_NH4NO3_L-to-H_P Parameter: Tissue Value: Siliques
  misc_feature: MA Experiment 20001759 PARAMETER Experiment Name: At_50mM_NH4NO3_L-to-H_P Parameter: Treatment Value: 50mM NH4NO3 vs 100mM Mannitol
  misc_feature: MA Experiment ID: 20001760 Result: Up-regulated in Transcription
  misc_feature: MA Experiment 20001760 PARAMETER Experiment Name: At_50mM_NH4NO3_L-to-H_P Parameter: Timepoint (hr) Value: 2
  misc_feature: MA Experiment 20001760 PARAMETER Experiment Name: At_50mM_NH4NO3_L-to-H_P Parameter: Tissue Value: Siliques
  misc_feature: MA Experiment 20001760 PARAMETER Experiment Name: At_50mM_NH4NO3_L-to-H_P Parameter: Treatment Value: 50mM NH4NO3 vs 100mM Mannitol
  misc_feature: MA Experiment ID: 20001906 Result: Down-regulated in Transcription
  misc_feature: MA Experiment 20001906 PARAMETER Experiment Name: At_Drought_Reproduction_P Parameter: Age (day) Value: 35
  misc_feature: MA Experiment 20001906 PARAMETER Experiment Name: At_Drought_Reproduction_P Parameter: Organism Value: A. thaliana
  misc_feature: MA Experiment 20001906 PARAMETER Experiment Name: At_Drought_Reproduction_P Parameter: Plant Line Value: WS
  misc_feature: MA Experiment 20001906 PARAMETER Experiment Name: At_Drought_Reproduction_P Parameter: Timepoint (day) Value: 5
  misc_feature: MA Experiment 20001906 PARAMETER Experiment Name: At_Drought_Reproduction_P Parameter: Tissue Value: Siliques
  misc_feature: MA Experiment 20001906 PARAMETER Experiment Name: At_Drought_Reproduction_P Parameter: Treatment Value: Drought vs. No Drought
  misc_feature: MA Experiment ID: 20001910 Result: Down-regulated in Transcription
  misc_feature: MA Experiment 20001910 PARAMETER Experiment Name: At_Drought_Reproduction_P Parameter: Age (day) Value: 37
  misc_feature: MA Experiment 20001910 PARAMETER Experiment Name: At_Drought_Reproduction_P Parameter: Organism Value: A. thaliana
  misc_feature: MA Experiment 20001910 PARAMETER Experiment Name: At_Drought_Reproduction_P Parameter: Plant Line Value: WS
  misc_feature: MA Experiment 20001910 PARAMETER Experiment Name: At_Drought_Reproduction_P Parameter: Timepoint (day) Value: 7
  misc_feature: MA Experiment 20001910 PARAMETER Experiment Name: At_Drought_Reproduction_P Parameter: Tissue Value: Flowers
  misc_feature: MA Experiment 20001910 PARAMETER Experiment Name: At_Drought_Reproduction_P Parameter: Treatment Value: Drought vs. No Drought

SEQ ID NO: 48388 - protein, 949 aa, Arabidopsis thaliana; identical to SEQ ID NO: 45154
  peptide (1)..(949): Ceres Seq. ID no. 15221079
  misc_feature (129)..(361): Pfam Name: Oxidoreductase molybdopterin binding domain Pfam Description: Oxidoreductase molybdopterin binding domain
  misc_feature (129)..(361): Pfam Name: Oxidoreductase molybdopterin binding domain Pfam Description: Oxidoreductase molybdopterin binding domain
  misc_feature (592)..(909): Homolog of NCBI NO: 14456133 NR Description: putative nitrate reductase [Ustilago maydis]
  misc_feature (29)..(453): Homolog of NCBI NO: 14456133 NR Description: putative nitrate reductase [Ustilago maydis]
  misc_feature (122)..(949): Homolog of NCBI NO: 1171706 NR Description: Nitrate reductase [NADPH] (NR)
  misc_feature (118)..(949): Homolog of NCBI NO: 730145 NR Description: Nitrate reductase [NADPH] (NR)
  misc_feature (127)..(455): Homolog of NCBI NO: 1071816 NR Description: nitrate reductase (NADPH) (EC 1.6.6.3) -
  misc_feature (592)..(909): Homolog of NCBI NO: 14456133 NR Description: putative nitrate reductase [Ustilago maydis]
  misc_feature (122)..(949): Homolog of NCBI NO: 1171706 NR Description: Nitrate reductase [NADPH] (NR)
  misc_feature (127)..(455): Homolog of NCBI NO: 1071816 NR Description: nitrate reductase (NADPH) (EC 1.6.6.3) -
  misc_feature (124)..(940): Homolog of NCBI NO: 7432652 NR Description: nitrate reductase (NADH) (EC 1.7.1.1)
  misc_feature (125)..(949): Homolog of NCBI NO: 730148 NR Description: Nitrate reductase [NADPH] (NR)
  misc_feature (375)..(949): Homolog of NCBI NO: 548358 NR Description: Nitrate reductase [NADPH] (NR)
  misc_feature (375)..(949): Homolog of NCBI NO: 1071816 NR Description: nitrate reductase (NADPH) (EC 1.6.6.3) -
  misc_feature (127)..(455): Homolog of NCBI NO: 548358 NR Description: Nitrate reductase [NADPH] (NR)
  misc_feature (118)..(949): Homolog of NCBI NO: 730145 NR Description: Nitrate reductase [NADPH] (NR)
  misc_feature (29)..(453): Homolog of NCBI NO: 14456133 NR Description: putative nitrate reductase [Ustilago maydis]
  misc_feature (127)..(455): Homolog of NCBI NO: 548358 NR Description: Nitrate reductase [NADPH] (NR)
  misc_feature (375)..(949): Homolog of NCBI NO: 1071816 NR Description: nitrate reductase (NADPH) (EC 1.6.6.3) -
  misc_feature (375)..(949): Homolog of NCBI NO: 548358 NR Description: Nitrate reductase [NADPH] (NR)
  misc_feature (125)..(949): Homolog of NCBI NO: 730148 NR Description: Nitrate reductase [NADPH] (NR)
  misc_feature (124)..(940): Homolog of NCBI NO: 7432652 NR Description: nitrate reductase (NADH) (EC 1.7.1.1)
  misc_feature (1)..(1): Xaa is any aa, unknown or other

SEQ ID NO: 48389 - protein, 917 aa, Arabidopsis thaliana; identical to SEQ ID NO: 45155
  peptide (1)..(917): Ceres Seq. ID no. 15221080
  misc_feature (97)..(329): Pfam Name: Oxidoreductase molybdopterin binding domain Pfam Description: Oxidoreductase molybdopterin binding domain
  misc_feature (97)..(329): Pfam Name: Oxidoreductase molybdopterin binding domain Pfam Description: Oxidoreductase molybdopterin binding domain
  misc_feature (560)..(877): Homolog of NCBI NO: 14456133 NR Description: putative nitrate reductase [Ustilago maydis]
  misc_feature (1)..(421): Homolog of NCBI NO: 14456133 NR Description: putative nitrate reductase [Ustilago maydis]
  misc_feature (90)..(917): Homolog of NCBI NO: 1171706 NR Description: Nitrate reductase [NADPH] (NR)
  misc_feature (86)..(917): Homolog of NCBI NO: 730145 NR Description: Nitrate reductase [NADPH] (NR)
  misc_feature (95)..(423): Homolog of NCBI NO: 1071816 NR Description: nitrate reductase (NADPH) (EC 1.6.6.3) -
  misc_feature (560)..(877): Homolog of NCBI NO: 14456133 NR Description: putative nitrate reductase [Ustilago maydis]
  misc_feature (90)..(917): Homolog of NCBI NO: 1171706 NR Description: Nitrate reductase [NADPH] (NR)
  misc_feature (95)..(423): Homolog of NCBI NO: 1071816 NR Description: nitrate reductase (NADPH) (EC 1.6.6.3) -
  misc_feature (92)..(908): Homolog of NCBI NO: 7432652 NR Description: nitrate reductase (NADH) (EC 1.7.1.1)
  misc_feature (93)..(917): Homolog of NCBI NO: 730148 NR Description: Nitrate reductase [NADPH] (NR)
  misc_feature (343)..(917): Homolog of NCBI NO: 548358 NR Description: Nitrate reductase [NADPH] (NR)
  misc_feature (343)..(917): Homolog of NCBI NO: 1071816 NR Description: nitrate reductase (NADPH) (EC 1.6.6.3) -
  misc_feature (95)..(423): Homolog of NCBI NO: 548358 NR Description: Nitrate reductase [NADPH] (NR)
  misc_feature (86)..(917): Homolog of NCBI NO: 730145 NR Description: Nitrate reductase [NADPH] (NR)
  misc_feature (1)..(421): Homolog of NCBI NO: 14456133 NR Description: putative nitrate reductase [Ustilago maydis]
  misc_feature (95)..(423): Homolog of NCBI NO: 548358 NR Description: Nitrate reductase [NADPH] (NR)
  misc_feature (343)..(917): Homolog of NCBI NO: 1071816 NR Description: nitrate reductase (NADPH) (EC 1.6.6.3) -
  misc_feature (343)..(917): Homolog of NCBI NO: 548358 NR Description: Nitrate reductase [NADPH] (NR)
  misc_feature (93)..(917): Homolog of NCBI NO: 730148 NR Description: Nitrate reductase [NADPH] (NR)
  misc_feature (92)..(908): Homolog of NCBI NO: 7432652 NR Description: nitrate reductase (NADH) (EC 1.7.1.1)

SEQ ID NO: 48390 - protein, 838 aa, Arabidopsis thaliana; identical to SEQ ID NO: 45156
  peptide (1)..(838): Ceres Seq. ID no. 15221081
  misc_feature (18)..(250): Pfam Name: Oxidoreductase molybdopterin binding domain Pfam Description: Oxidoreductase molybdopterin binding domain
  misc_feature (18)..(250): Pfam Name: Oxidoreductase molybdopterin binding domain Pfam Description: Oxidoreductase molybdopterin binding domain
  misc_feature (481)..(798): Homolog of NCBI NO: 14456133 NR Description: putative nitrate reductase [Ustilago maydis]
  misc_feature (1)..(342): Homolog of NCBI NO: 14456133 NR Description: putative nitrate reductase [Ustilago maydis]
  misc_feature (11)..(838): Homolog of NCBI NO: 1171706 NR Description: Nitrate reductase [NADPH] (NR)
  misc_feature (7)..(838): Homolog of NCBI NO: 730145 NR Description: Nitrate reductase [NADPH] (NR)
  misc_feature (16)..(344): Homolog of NCBI NO: 1071816 NR Description: nitrate reductase (NADPH) (EC 1.6.6.3) -
  misc_feature (481)..(798): Homolog of NCBI NO: 14456133 NR Description: putative nitrate reductase [Ustilago maydis]
  misc_feature (11)..(838): Homolog of NCBI NO: 1171706 NR Description: Nitrate reductase [NADPH] (NR)
  misc_feature (16)..(344): Homolog of NCBI NO: 1071816 NR Description: nitrate reductase (NADPH) (EC 1.6.6.3) -
  misc_feature (13)..(829): Homolog of NCBI NO: 7432652 NR Description: nitrate reductase (NADH) (EC 1.7.1.1)
  misc_feature (14)..(838): Homolog of NCBI NO: 730148 NR Description: Nitrate reductase [NADPH] (NR)
  misc_feature (264)..(838): Homolog of NCBI NO: 548358 NR Description: Nitrate reductase [NADPH] (NR)
  misc_feature (264)..(838): Homolog of NCBI NO: 1071816 NR Description: nitrate reductase (NADPH) (EC 1.6.6.3) -
  misc_feature (16)..(344): Homolog of NCBI NO: 548358 NR Description: Nitrate reductase [NADPH] (NR)
  misc_feature (7)..(838): Homolog of NCBI NO: 730145 NR Description: Nitrate reductase [NADPH] (NR)
  misc_feature (1)..(342): Homolog of NCBI NO: 14456133 NR Description: putative nitrate reductase [Ustilago maydis]
  misc_feature (16)..(344): Homolog of NCBI NO: 548358 NR Description: Nitrate reductase [NADPH] (NR)
  misc_feature (264)..(838): Homolog of NCBI NO: 1071816 NR Description: nitrate reductase (NADPH) (EC 1.6.6.3) -
  misc_feature (264)..(838): Homolog of NCBI NO: 548358 NR Description: Nitrate reductase [NADPH] (NR)
  misc_feature (14)..(838): Homolog of NCBI NO: 730148 NR Description: Nitrate reductase [NADPH] (NR)
  misc_feature (13)..(829): Homolog of NCBI NO: 7432652 NR Description: nitrate reductase (NADH) (EC 1.7.1.1)

SEQ ID NO: 48391 - DNA, 1423 bp, Arabidopsis thaliana
  misc_feature (1)..(1423): Ceres Seq. ID no. 14310247
  misc_feature: MA Experiment ID: 20000169 Result: Up-regulated in Transcription
  misc_feature: MA Experiment 20000169 PARAMETER Experiment Name: At_100uM_ABA_P Parameter: Age (day) Value: 14
  misc_feature: MA Experiment 20000169 PARAMETER Experiment Name: At_100uM_ABA_P Parameter: Organism Value: A. thaliana
  misc_feature: MA Experiment 20000169 PARAMETER Experiment Name: At_100uM_ABA_P Parameter: Plant Line Value: WS
  misc_feature: MA Experiment 20000169 PARAMETER Experiment Name: At_100uM_ABA_P Parameter: Timepoint (hr) Value: 6
  misc_feature: MA Experiment 20000169 PARAMETER Experiment Name: At_100uM_ABA_P Parameter: Tissue Value: Aerial
  misc_feature: MA Experiment 20000169 PARAMETER Experiment Name: At_100uM_ABA_P Parameter: Treatment Value: 100uM ABA vs. No Treatment
  misc_feature: MA Experiment ID: 20000180 Result: Up-regulated in Transcription
  misc_feature: MA Experiment 20000180 PARAMETER Experiment Name: At_Germinating_Seeds_P Parameter: Age (hr) Value: 24 vs. 0
  misc_feature: MA Experiment 20000180 PARAMETER Experiment Name: At_Germinating_Seeds_P Parameter: Tissue Value: Germinating Seeds
  misc_feature: MA Experiment ID: 20000436 Result: Up-regulated in Transcription
  misc_feature: MA Experiment 20000436 PARAMETER Experiment Name: At_Drought_P Parameter: Age (day) Value: 7
  misc_feature: MA Experiment 20000436 PARAMETER Experiment Name: At_Drought_P Parameter: Organism Value: A. thaliana
  misc_feature: MA Experiment 20000436 PARAMETER Experiment Name: At_Drought_P Parameter: Plant Line Value: WS
  misc_feature: MA Experiment 20000436 PARAMETER Experiment Name: At_Drought_P Parameter: Timepoint (hr) Value: 12
  misc_feature: MA Experiment 20000436 PARAMETER Experiment Name: At_Drought_P Parameter: Tissue Value: Whole Plant
  misc_feature: MA Experiment 20000436 PARAMETER Experiment Name: At_Drought_P Parameter: Treatment Value: Drought vs. No Drought
  misc_feature: MA Experiment ID: 20000437 Result: Up-regulated in Transcription
  misc_feature: MA Experiment 20000437 PARAMETER Experiment Name: At_Drought_P Parameter: Age (day) Value: 8
  misc_feature: MA Experiment 20000437 PARAMETER Experiment Name: At_Drought_P Parameter: Organism Value: A. thaliana
  misc_feature: MA Experiment 20000437 PARAMETER Experiment Name: At_Drought_P Parameter: Plant Line Value: WS
  misc_feature: MA Experiment 20000437 PARAMETER Experiment Name: At_Drought_P Parameter: Timepoint (hr) Value: 24
  misc_feature: MA Experiment 20000437 PARAMETER Experiment Name: At_Drought_P Parameter: Tissue Value: Whole Plant
  misc_feature: MA Experiment 20000437 PARAMETER Experiment Name: At_Drought_P Parameter: Treatment Value: Drought vs. No Drought
  misc_feature: MA Experiment ID: 20000496 Result: Up-regulated in Transcription
  misc_feature: MA Experiment 20000496 PARAMETER Experiment Name: At_Guard_Cells_P Parameter: Harvest Date Value: 7/19/2002
  misc_feature: MA Experiment 20000496 PARAMETER Experiment Name: At_Guard_Cells_P Parameter: Organism Value: Canola
  misc_feature: MA Experiment 20000496 PARAMETER Experiment Name: At_Guard_Cells_P Parameter: Tissue Value: Guard Cells vs. Leaves
  misc_feature: MA Experiment ID: 20001557 Result: Down-regulated in Transcription
  misc_feature: MA Experiment 20001557 PARAMETER Experiment Name: At_Drought_Soil_Dry_P Parameter: Age (day) Value: 27
  misc_feature: MA Experiment 20001557 PARAMETER Experiment Name: At_Drought_Soil_Dry_P Parameter: Organism Value: A. thaliana
  misc_feature: MA Experiment 20001557 PARAMETER Experiment Name: At_Drought_Soil_Dry_P Parameter: Plant Line Value: WS
  misc_feature: MA Experiment 20001557 PARAMETER Experiment Name: At_Drought_Soil_Dry_P Parameter: Post Timepoint (hr) Value: 3
  misc_feature: MA Experiment 20001557 PARAMETER Experiment Name: At_Drought_Soil_Dry_P Parameter: Post-Treatment Value: Re-Water vs. No Drought
  misc_feature: MA Experiment 20001557 PARAMETER Experiment Name: At_Drought_Soil_Dry_P Parameter: Timepoint (day) Value: 13
  misc_feature: MA Experiment 20001557 PARAMETER Experiment Name: At_Drought_Soil_Dry_P Parameter: Treatment Value: Drought vs. No Drought
  misc_feature: MA Experiment ID: 20001558 Result: Down-regulated in Transcription
  misc_feature: MA Experiment 20001558 PARAMETER Experiment Name: At_Drought_Soil_Dry_P Parameter: Age (day) Value: 27
  misc_feature: MA Experiment 20001558 PARAMETER Experiment Name: At_Drought_Soil_Dry_P Parameter: Organism Value: A. thaliana
  misc_feature: MA Experiment 20001558 PARAMETER Experiment Name: At_Drought_Soil_Dry_P Parameter: Plant Line Value: WS
  misc_feature: MA Experiment 20001558 PARAMETER Experiment Name: At_Drought_Soil_Dry_P Parameter: Post Timepoint (hr) Value: 6
  misc_feature: MA Experiment 20001558 PARAMETER Experiment Name: At_Drought_Soil_Dry_P Parameter: Post-Treatment Value: Re-Water vs. No Drought
  misc_feature: MA Experiment 20001558 PARAMETER Experiment Name: At_Drought_Soil_Dry_P Parameter: Timepoint (day) Value: 13
  misc_feature: MA Experiment 20001558 PARAMETER Experiment Name: At_Drought_Soil_Dry_P Parameter: Treatment Value: Drought vs. No Drought
  misc_feature: MA Experiment ID: 20001910 Result: Up-regulated in Transcription
  misc_feature: MA Experiment 20001910 PARAMETER Experiment Name: At_Drought_Reproduction_P Parameter: Age (day) Value: 37
  misc_feature: MA Experiment 20001910 PARAMETER Experiment Name: At_Drought_Reproduction_P Parameter: Organism Value: A. thaliana
  misc_feature: MA Experiment 20001910 PARAMETER Experiment Name: At_Drought_Reproduction_P Parameter: Plant Line Value: WS
  misc_feature: MA Experiment 20001910 PARAMETER Experiment Name: At_Drought_Reproduction_P Parameter: Timepoint (day) Value: 7
  misc_feature: MA Experiment 20001910 PARAMETER Experiment Name: At_Drought_Reproduction_P Parameter: Tissue Value: Flowers
  misc_feature: MA Experiment 20001910 PARAMETER Experiment Name: At_Drought_Reproduction_P Parameter: Treatment Value: Drought vs. No Drought
gattctcattccttcctcctgtttccgtaccgggggattttgtgatcatcaaaatcaaaaacaatcagatttcttctaccaaacgattaattgccttttgggatacgattcagggcttcttttggggcctctgtttgaattaacaccttgtttgctgcaaacaataataaggaaagataaacgagatggtgtcggacaatgagatgggtttgatattagctgtgtcgtcgagcgtcttcataggttccagcttcattttgaagaagaaaggtctcaagcgcgctgctgctaatggcacccgcgctggtttcggaggttatacatatttgttagagccactttggtgggtaggcttggtaacaatgacttttggagaaattgctaattttgtggcttacgtttatgaacctgctgtactagtcactcctcttggcgcattaagtataatcatcagtgctgttttggcacatttcttgttagacgaaaaacttaggaaaatgggagtttggggatgtgtttgttgcattgtgggctcagttatgatcgtcatacacgcacctcaggaacagactcccaattctgtagaagaaatctggaaactagcaatgcaaccagcttttctaatttacgtagccatatcaatgtcgatagtcctggctttgattctctactgtgaacctctctgcggccaaaccaacattcttgtttatatcggaatttgttcgttgatgggttctctcacagttatgagcatcaaggctgtagggattgccataaagttaacatttgaagggataaaccagatttggtatccagagacttggttttttgccatggttgcagcaatctgtgtggttatgcaaatgatttacctcaacaaggcgctggacacattcaacgcagcaattgtttctccaatctattatgtgatgttcacaacactcacaattgttgctagtgcaatcatgttcaaggactggaatgggcaaaacacagacagcatagcctctgagatttgtggattcctcacagtgcttacaggaacggttatactccattccacgagagaagaggaacaagcttcgccacgacgaatgagatggcaggattccgggaagagctttgacgaagaacatttgacaagtttgtacagtcctgaatattaggaaggtaacaaagatttaaaccttgtgctgaacggaaggatgttgggatccgaatcagaagatcatctaattaatctcttagtggggaaaagaatgtaaactagctttctgtatatacttgatagttttgtaacagtcttttgtatacaaatttgtccactgtttgttcatattcatttatttttgagctcttaggacagatttgttaccatgtatagatcatataacattgactattattattttgatccaacaat

SEQ ID NO: 48392 - protein, 326 aa, Arabidopsis thaliana
  peptide (1)..(326): Ceres Seq. ID no. 14310248
  misc_feature (1)..(300): Pfam Name: Protein of unknown function (DUF803) Pfam Description: Protein of unknown function (DUF803)
  misc_feature (1)..(301): Homolog of NCBI NO: 20161440 NR Description: B1065E10.15 [Oryza sativa (japonica
  misc_feature (1)..(295): Homolog of NCBI NO: 21593618 NR Description: unknown [Arabidopsis thaliana]
  misc_feature (1)..(295): Homolog of NCBI NO: 18414079 NR Description: expressed protein [Arabidopsis thaliana]
  misc_feature (1)..(295): Homolog of NCBI NO: 15229534 NR Description: purine permease - related [Arabidopsis thaliana]
  misc_feature (1)..(295): Homolog of NCBI NO: 18399280 NR Description: purine permease - related [Arabidopsis thaliana]
  misc_feature (1)..(295): Homolog of NCBI NO: 25406128 NR Description: unknown protein F17M19.5 [imported] - Arabidopsis
  misc_feature (1)..(300): Homolog of NCBI NO: 18409942 NR Description: expressed protein [Arabidopsis thaliana]
  misc_feature (1)..(326): Homolog of NCBI NO: 25412015 NR Description: hypothetical protein At2g21120 [imported] -
  misc_feature (1)..(326): Homolog of NCBI NO: 30681265 NR Description: expressed protein [Arabidopsis thaliana]
  misc_feature (1)..(326): Homolog of NCBI NO: 26449939 NR Description: unknown protein [Arabidopsis thaliana]
MVSDNEMGLILAVSSSVFIGSSFILKKKGLKRAAANGTRAGFGGYTYLLEPLWWVGLVTMTFGEIANFVAYVYEPAVLVTPLGALSIIISAVLAHFLLDEKLRKMGVWGCVCCIVGSVMIVIHAPQEQTPNSVEEIWKLAMQPAFLIYVAISMSIVLALILYCEPLCGQTNILVYIGICSLMGSLTVMSIKAVGIAIKLTFEGINQIWYPETWFFAMVAAICVVMQMIYLNKALDTFNAAIVSPIYYVMFTTLTIVASAIMFKDWNGQNTDSIASEICGFLTVLTGTVILHSTREEEQASPRRMRWQDSGKSFDEEHLTSLYSPEY

SEQ ID NO: 48393 - protein, 320 aa, Arabidopsis thaliana
  peptide (1)..(320): Ceres Seq. ID no. 14310249
  misc_feature (1)..(294): Pfam Name: Protein of unknown function (DUF803) Pfam Description: Protein of unknown function (DUF803)
  misc_feature (1)..(295): Homolog of NCBI NO: 20161440 NR Description: B1065E10.15 [Oryza sativa (japonica
  misc_feature (1)..(289): Homolog of NCBI NO: 21593618 NR Description: unknown [Arabidopsis thaliana]
  misc_feature (1)..(289): Homolog of NCBI NO: 18414079 NR Description: expressed protein [Arabidopsis thaliana]
  misc_feature (1)..(289): Homolog of NCBI NO: 15229534 NR Description: purine permease - related [Arabidopsis thaliana]
  misc_feature (1)..(289): Homolog of NCBI NO: 18399280 NR Description: purine permease - related [Arabidopsis thaliana]
  misc_feature (1)..(289): Homolog of NCBI NO: 25406128 NR Description: unknown protein F17M19.5 [imported] - Arabidopsis
  misc_feature (1)..(294): Homolog of NCBI NO: 18409942 NR Description: expressed protein [Arabidopsis thaliana]
  misc_feature (1)..(320): Homolog of NCBI NO: 25412015 NR Description: hypothetical protein At2g21120 [imported] -
  misc_feature (1)..(320): Homolog of NCBI NO: 30681265 NR Description: expressed protein [Arabidopsis thaliana]
  misc_feature (1)..(320): Homolog of NCBI NO: 26449939 NR Description: unknown protein [Arabidopsis thaliana]
MGLILAVSSSVFIGSSFILKKKGLKRAAANGTRAGFGGYTYLLEPLWWVGLVTMTFGEIANFVAYVYEPAVLVTPLGALSIIISAVLAHFLLDEKLRKMGVWGCVCCIVGSVMIVIHAPQEQTPNSVEEIWKLAMQPAFLIYVAISMSIVLALILYCEPLCGQTNILVYIGICSLMGSLTVMSIKAVGIAIKLTFEGINQIWYPETWFFAMVAAICVVMQMIYLNKALDTFNAAIVSPIYYVMFTTLTIVASAIMFKDWNGQNTDSIASEICGFLTVLTGTVILHSTREEEQASPRRMRWQDSGKSFDEEHLTSLYSPEY

SEQ ID NO: 48394 - protein, 267 aa, Arabidopsis thaliana
  peptide (1)..(267): Ceres Seq. ID no. 14310250
  misc_feature (1)..(241): Pfam Name: Protein of unknown function (DUF803) Pfam Description: Protein of unknown function (DUF803)
  misc_feature (1)..(242): Homolog of NCBI NO: 20161440 NR Description: B1065E10.15 [Oryza sativa (japonica
  misc_feature (1)..(236): Homolog of NCBI NO: 21593618 NR Description: unknown [Arabidopsis thaliana]
  misc_feature (1)..(236): Homolog of NCBI NO: 18414079 NR Description: expressed protein [Arabidopsis thaliana]
  misc_feature (1)..(236): Homolog of NCBI NO: 15229534 NR Description: purine permease - related [Arabidopsis thaliana]
  misc_feature (1)..(236): Homolog of NCBI NO: 18399280 NR Description: purine permease - related [Arabidopsis thaliana]
  misc_feature (1)..(236): Homolog of NCBI NO: 25406128 NR Description: unknown protein F17M19.5 [imported] - Arabidopsis
  misc_feature (1)..(241): Homolog of NCBI NO: 18409942 NR Description: expressed protein [Arabidopsis thaliana]
  misc_feature (1)..(267): Homolog of NCBI NO: 25412015 NR Description: hypothetical protein At2g21120 [imported] -
  misc_feature (1)..(267): Homolog of NCBI NO: 30681265 NR Description: expressed protein [Arabidopsis thaliana]
  misc_feature (1)..(267): Homolog of NCBI NO: 26449939 NR Description: unknown protein [Arabidopsis thaliana]
MTFGEIANFVAYVYEPAVLVTPLGALSIIISAVLAHFLLDEKLRKMGVWGCVCCIVGSVMIVIHAPQEQTPNSVEEIWKLAMQPAFLIYVAISMSIVLALILYCEPLCGQTNILVYIGICSLMGSLTVMSIKAVGIAIKLTFEGINQIWYPETWFFAMVAAICVVMQMIYLNKALDTFNAAIVSPIYYVMFTTLTIVASAIMFKDWNGQNTDSIASEICGFLTVLTGTVILHSTREEEQASPRRMRWQDSGKSFDEEHLTSLYSPEY

SEQ ID NO: 48395 - DNA, 1383 bp, Arabidopsis thaliana
  misc_feature (1)..(1383): Ceres Seq. ID no. 13580745
  misc_feature: MA Experiment ID: 20000306 Result: Up-regulated in Transcription
  misc_feature: MA Experiment 20000306 PARAMETER Experiment Name: At_Germinating_Seeds_Sub_P Parameter: Age (hr) Value: 6 vs. 0
  misc_feature: MA Experiment 20000306 PARAMETER Experiment Name: At_Germinating_Seeds_Sub_P Parameter: Organism Value: A. thaliana
  misc_feature: MA Experiment 20000306 PARAMETER Experiment Name: At_Germinating_Seeds_Sub_P Parameter: Plant Line Value: WS
  misc_feature: MA Experiment 20000306 PARAMETER Experiment Name: At_Germinating_Seeds_Sub_P Parameter: Tissue Value: Germinating Seeds
  misc_feature: MA Experiment ID: 20000307 Result: Up-regulated in Transcription
  misc_feature: MA Experiment 20000307 PARAMETER Experiment Name: At_Germinating_Seeds_Sub_P Parameter: Age (hr) Value: 24 vs. 0
  misc_feature: MA Experiment 20000307 PARAMETER Experiment Name: At_Germinating_Seeds_Sub_P Parameter: Organism Value: A. thaliana
  misc_feature: MA Experiment 20000307 PARAMETER Experiment Name: At_Germinating_Seeds_Sub_P Parameter: Plant Line Value: WS
  misc_feature: MA Experiment 20000307 PARAMETER Experiment Name: At_Germinating_Seeds_Sub_P Parameter: Tissue Value: Germinating Seeds
  misc_feature: MA Experiment ID: 20000314 Result: Down-regulated in Transcription
  misc_feature: MA Experiment 20000314 PARAMETER Experiment Name: At_14day_Shoots-Roots_Sub_P Parameter: Age (day) Value: 14
  misc_feature: MA Experiment 20000314 PARAMETER Experiment Name: At_14day_Shoots-Roots_Sub_P Parameter: Organism Value: A. thaliana
  misc_feature: MA Experiment 20000314 PARAMETER Experiment Name: At_14day_Shoots-Roots_Sub_P Parameter: Plant Line Value: WS
  misc_feature: MA Experiment 20000314 PARAMETER Experiment Name: At_14day_Shoots-Roots_Sub_P Parameter: Tissue Value: Roots vs. Whole Plant
  misc_feature: MA Experiment ID: 20000315 Result: Down-regulated in Transcription
  misc_feature: MA Experiment 20000315 PARAMETER Experiment Name: At_14day_Shoots-Roots_Sub_P Parameter: Age (day) Value: 14
  misc_feature: MA Experiment 20000315 PARAMETER Experiment Name: At_14day_Shoots-Roots_Sub_P Parameter: Organism Value: A. thaliana
  misc_feature: MA Experiment 20000315 PARAMETER Experiment Name: At_14day_Shoots-Roots_Sub_P Parameter: Plant Line Value: WS
  misc_feature: MA Experiment 20000315 PARAMETER Experiment Name: At_14day_Shoots-Roots_Sub_P Parameter: Tissue Value: Shoots vs. Whole Plant
  misc_feature: MA Experiment ID: 20000355 Result: Down-regulated in Transcription
  misc_feature: MA Experiment 20000355 PARAMETER Experiment Name: At_Siliques_Sub_P Parameter: Age (day) Value: 21
  misc_feature: MA Experiment 20000355 PARAMETER Experiment Name: At_Siliques_Sub_P Parameter: Organism Value: A. thaliana
  misc_feature: MA Experiment 20000355 PARAMETER Experiment Name: At_Siliques_Sub_P Parameter: Plant Line Value: WS
  misc_feature: MA Experiment 20000355 PARAMETER Experiment Name: At_Siliques_Sub_P Parameter: Tissue Value: Less Than 5mm Siliques vs. Whole Plant
gatcttcgtcttcctttcctccttcattcctcttttcttcgtctcccaccatttctgcagaagaagacaaataaaaaagctctcatttatcttcgtggagatctaaaagaaggaggaagacatttcttccctctggatctccaaaagtaagaacatttacaagaaacgagaggtttgggtggggaaggaaagaaggaggaagaggcaatgtcagctaggtattggtgtcacatgtgttcacaaatggtgaatccagttattggtgccgagatcaaatgccccttttgccaaagcgggtttgtcgaggaaatgagccgtgagattaatggcggcagcagtagcagtctaagggaggttcaagaccctgagattgattttggtacagaccgtgcattgtctctatggggtccaatcttgcttggaatgatgagtaatcctcgtagacgtagaaggtttaggaggacagagtttggtgtggataatgatgaggtcaatgtatctgatgatgttgatggaaatgacagcgtcgatattgatcgacatcatcatcgtcgtcatcgccacaggcaacaaggtagagagattgatttagacagagagtttgagtctatccttaggaggagacggagaagctcagctactatattgcagttgcttcagggtattcgtgcagggattgcttctgagtatgagagctcggatcgagacctgttaaatcaatcagctgttgttcagggttcaacgagtttgaatcaaaaccggaacaatacttctctttctgcaattggagattactttgttggatccagtttagaccatttgcttgaacatctagctgataatgattcaatcaggcacgggagtcttccagcacgtaaagaagttgtggataatctcccaacggttaagataagtgaatcattgcagtgctcgatttgtttggatgattttgacaaaggaagtgaagctaaagagatgccgtgtaagcacaagtttcacatccggtgtatagtaccgtggctcgagcttcacagttcatgtcccgtgtgccgatatgaactccctcctgatgatgagaccaaggttaatcctgtaagaccgagaacaagaactctagagatcaacgtaagtaatgagaatgtggaagatgatgcaaggaacagtaatgtgagcgagagaaggttctcttttccatggccgttcagcggattattctcttcatcctcttcgtcatccgcatcggcctcggggtcatctcatctcggtgagaactcgtaaactgctattcctcagcttatagtacataaaatcttgttcactcagattgttgaatactgcataacaaataaacactttcgaggaatggaatcttttctttatttg

SEQ ID NO: 48396 - protein, 356 aa, Arabidopsis thaliana; identical to SEQ ID NO: 39296
  peptide (1)..(356): Ceres Seq. ID no. 13580746
  misc_feature (241)..(281): Pfam Name: Zinc finger, C3HC4 type (RING finger) Pfam Description: Zinc finger, C3HC4 type (RING finger)
  misc_feature (194)..(352): Homolog of NCBI NO: 11994207 NR Description: gene_id:MPN9.20~unknown protein [Arabidopsis
  misc_feature (97)..(290): Homolog of NCBI NO: 34903272 NR Description: unnamed protein product [Oryza sativa (japonica
  misc_feature (191)..(356): Homolog of NCBI NO: 37535546 NR Description: putative zinc finger protein
  misc_feature (24)..(327): Homolog of NCBI NO: 15231238 NR Description: expressed protein [Arabidopsis thaliana]
  misc_feature (24)..(327): Homolog of NCBI NO: 38454178 NR Description: At3g13430 [Arabidopsis thaliana]
  misc_feature (310)..(349): Homolog of NCBI NO: 18405411 NR Description: expressed protein [Arabidopsis thaliana]
  misc_feature (24)..(325): Homolog of NCBI NO: 18405411 NR Description: expressed protein [Arabidopsis thaliana]
  misc_feature (1)..(356): Homolog of NCBI NO: 15241188 NR Description: expressed protein [Arabidopsis thaliana]
  misc_feature (13)..(356): Homolog of NCBI NO: 7486783 NR Description: hypothetical protein M3E9.170 - Arabidopsis
  misc_feature (1)..(356): Homolog of NCBI NO: 22328949 NR Description: expressed protein [Arabidopsis thaliana]

SEQ ID NO: 48397 - protein, 348 aa, Arabidopsis thaliana; identical to SEQ ID NO: 39297
  peptide (1)..(348): Ceres Seq. ID no. 13580747
  misc_feature (233)..(273): Pfam Name: Zinc finger, C3HC4 type (RING finger) Pfam Description: Zinc finger, C3HC4 type (RING finger)
  misc_feature (186)..(344): Homolog of NCBI NO: 11994207 NR Description: gene_id:MPN9.20~unknown protein [Arabidopsis
  misc_feature (89)..(282): Homolog of NCBI NO: 34903272 NR Description: unnamed protein product [Oryza sativa (japonica
  misc_feature (183)..(348): Homolog of NCBI NO: 37535546 NR Description: putative zinc finger protein
  misc_feature (16)..(319): Homolog of NCBI NO: 15231238 NR Description: expressed protein [Arabidopsis thaliana]
  misc_feature (16)..(319): Homolog of NCBI NO: 38454178 NR Description: At3g13430 [Arabidopsis thaliana]
  misc_feature (302)..(341): Homolog of NCBI NO: 18405411 NR Description: expressed protein [Arabidopsis thaliana]
  misc_feature (16)..(317): Homolog of NCBI NO: 18405411 NR Description: expressed protein [Arabidopsis thaliana]
  misc_feature (1)..(348): Homolog of NCBI NO: 15241188 NR Description: expressed protein [Arabidopsis thaliana]
  misc_feature (5)..(348): Homolog of NCBI NO: 7486783 NR Description: hypothetical protein M3E9.170 - Arabidopsis
  misc_feature (1)..(348): Homolog of NCBI NO: 22328949 NR Description: expressed protein [Arabidopsis thaliana]

SEQ ID NO: 48398 - protein, 344 aa, Arabidopsis thaliana; identical to SEQ ID NO: 39298
  peptide (1)..(344): Ceres Seq. ID no. 13580748
  misc_feature (229)..(269): Pfam Name: Zinc finger, C3HC4 type (RING finger) Pfam Description: Zinc finger, C3HC4 type (RING finger)
  misc_feature (182)..(340): Homolog of NCBI NO: 11994207 NR Description: gene_id:MPN9.20~unknown protein [Arabidopsis
  misc_feature (85)..(278): Homolog of NCBI NO: 34903272 NR Description: unnamed protein product [Oryza sativa (japonica
  misc_feature (179)..(344): Homolog of NCBI NO: 37535546 NR Description: putative zinc finger protein
  misc_feature (12)..(315): Homolog of NCBI NO: 15231238 NR Description: expressed protein [Arabidopsis thaliana]
  misc_feature (12)..(315): Homolog of NCBI NO: 38454178 NR Description: At3g13430 [Arabidopsis thaliana]
  misc_feature (298)..(337): Homolog of NCBI NO: 18405411 NR Description: expressed protein [Arabidopsis thaliana]
  misc_feature (12)..(313): Homolog of NCBI NO: 18405411 NR Description: expressed protein [Arabidopsis thaliana]
  misc_feature (1)..(344): Homolog of NCBI NO: 15241188 NR Description: expressed protein [Arabidopsis thaliana]
  misc_feature (1)..(344): Homolog of NCBI NO: 7486783 NR Description: hypothetical protein M3E9.170 - Arabidopsis
  misc_feature (1)..(344): Homolog of NCBI NO: 22328949 NR Description: expressed protein [Arabidopsis thaliana]

SEQ ID NO: 48399 - DNA, 2174 bp, Arabidopsis thaliana
  misc_feature (1)..(2174): Ceres Seq. ID no. 14310271
  misc_feature: MA Experiment ID: 20000179 Result: Down-regulated in Transcription
  misc_feature: MA Experiment 20000179 PARAMETER Experiment Name: At_Germinating_Seeds_P Parameter: Age (hr) Value: 6 vs. 0
  misc_feature: MA Experiment 20000179 PARAMETER Experiment Name: At_Germinating_Seeds_P Parameter: Tissue Value: Germinating Seeds
  misc_feature: MA Experiment ID: 20000180 Result: Down-regulated in Transcription
  misc_feature: MA Experiment 20000180 PARAMETER Experiment Name: At_Germinating_Seeds_P Parameter: Age (hr) Value: 24 vs. 0
  misc_feature: MA Experiment 20000180 PARAMETER Experiment Name: At_Germinating_Seeds_P Parameter: Tissue Value: Germinating Seeds
  misc_feature: MA Experiment ID: 20000184 Result: Down-regulated in Transcription
  misc_feature: MA Experiment 20000184 PARAMETER Experiment Name: At_Shoots__P Parameter: Age (day) Value: 7
  misc_feature: MA Experiment 20000184 PARAMETER Experiment Name: At_Shoots__P Parameter: Tissue Value: Shoots vs. Whole Plant
  misc_feature: MA Experiment ID: 20001458 Result: Up-regulated in Transcription
  misc_feature: MA Experiment 20001458 PARAMETER Experiment Name: At_50mM_NH4NO3_L-to-H_P Parameter: Age (day) Value: Undefined
  misc_feature: MA Experiment 20001458 PARAMETER Experiment Name: At_50mM_NH4NO3_L-to-H_P Parameter: Organism Value: Undefined
  misc_feature: MA Experiment 20001458 PARAMETER Experiment Name: At_50mM_NH4NO3_L-to-H_P Parameter: Plant Line Value: Undefined
  misc_feature: MA Experiment 20001458 PARAMETER Experiment Name: At_50mM_NH4NO3_L-to-H_P Parameter: Timepoint (hr) Value: 2
  misc_feature: MA Experiment 20001458 PARAMETER Experiment Name: At_50mM_NH4NO3_L-to-H_P Parameter: Tissue Value: Siliques
  misc_feature: MA Experiment 20001458 PARAMETER Experiment Name: At_50mM_NH4NO3_L-to-H_P Parameter: Treatment Value: 50mM NH4NO3 vs. 100mM Manitol
  misc_feature: MA Experiment ID: 20001557 Result: Up-regulated in Transcription
  misc_feature: MA Experiment 20001557 PARAMETER Experiment Name: At_Drought_Soil_Dry_P Parameter: Age (day) Value: 27
  misc_feature: MA Experiment 20001557 PARAMETER Experiment Name: At_Drought_Soil_Dry_P Parameter: Organism Value: A. thaliana
  misc_feature: MA Experiment 20001557 PARAMETER Experiment Name: At_Drought_Soil_Dry_P Parameter: Plant Line Value: WS
  misc_feature: MA Experiment 20001557 PARAMETER Experiment Name: At_Drought_Soil_Dry_P Parameter: Post Timepoint (hr) Value: 3
  misc_feature: MA Experiment 20001557 PARAMETER Experiment Name: At_Drought_Soil_Dry_P Parameter: Post-Treatment Value: Re-Water vs. No Drought
  misc_feature: MA Experiment 20001557 PARAMETER Experiment Name: At_Drought_Soil_Dry_P Parameter: Timepoint (day) Value: 13
  misc_feature: MA Experiment 20001557 PARAMETER Experiment Name: At_Drought_Soil_Dry_P Parameter: Treatment Value: Drought vs. No Drought
  misc_feature: MA Experiment ID: 20001558 Result: Up-regulated in Transcription
  misc_feature: MA Experiment 20001558 PARAMETER Experiment Name: At_Drought_Soil_Dry_P Parameter: Age (day) Value: 27
  misc_feature: MA Experiment 20001558 PARAMETER Experiment Name: At_Drought_Soil_Dry_P Parameter: Organism Value: A. thaliana
  misc_feature: MA Experiment 20001558 PARAMETER Experiment Name: At_Drought_Soil_Dry_P Parameter: Plant Line Value: WS
  misc_feature: MA Experiment 20001558 PARAMETER Experiment Name: At_Drought_Soil_Dry_P Parameter: Post Timepoint (hr) Value: 6
  misc_feature: MA Experiment 20001558 PARAMETER Experiment Name: At_Drought_Soil_Dry_P Parameter: Post-Treatment Value: Re-Water vs. No Drought
  misc_feature: MA Experiment 20001558 PARAMETER Experiment Name: At_Drought_Soil_Dry_P Parameter: Timepoint (day) Value: 13
  misc_feature: MA Experiment 20001558 PARAMETER Experiment Name: At_Drought_Soil_Dry_P Parameter: Treatment Value: Drought vs. No Drought
  misc_feature: MA Experiment ID: 20001757 Result: Up-regulated in Transcription
  misc_feature: MA Experiment 20001757 PARAMETER Experiment Name: At_50mM_NH4NO3_L-to-H_P Parameter: Timepoint (hr) Value: 6
  misc_feature: MA Experiment 20001757 PARAMETER Experiment Name: At_50mM_NH4NO3_L-to-H_P Parameter: Tissue Value: Leaf
  misc_feature: MA Experiment 20001757 PARAMETER Experiment Name: At_50mM_NH4NO3_L-to-H_P Parameter: Treatment Value: 50mM NH4NO3 vs 100mM Mannitol
gacgactattttcccttcacttcttcatcttcttcctgcgccgcttttcaaacctattcgaccagacaagctcggaaatttcatattccatgggtaagacgaagttaaaacctgtggaggatgtgaactcggaagtggtggacgaagttgagaaagcagaggaagttgaggaacagagaaacgacagagaacaagaagaagagcaaaaagaagaagaggcacctaaaagtttcgaagagctagggcttgattctcgtctaattcgtgccctaactaaaaagggtatagagaaaccaacccttattcagcaatcagccattccttacattctggaaggaaaagatgtggttgctagggcaaagactggttcaggtaagactttggcttaccttttgccattgctccagaagctattttcagcagattctgtgagcaagaagaagcttgctccttctgcatttattcttgttccatctcgagaactatgtcagcaggtttacacagaggtttcatcgcttattgagctgtgtagagttcagctaaaagcagtgcagttgactagtagcatgtctgcatctgatatgcgtaatgcattggctggactgcctgagattcttgtctccacacctgcttgtattccgaaatgttttgctgccggagttttagagcccactgctgtcagtgaatcactttcaattctggttcttgatgaggcagatcttttgttgtcatatggatatgaagataatctaaggtcggtaacatcaataatcccaaggcgttgccaatgccttcttatgtcggctaccacaagctctgatgtcgaaaaattgaagaaattgattctgcacaacccaatcgttttgaccttgacagaagataatgacaaggaagaggccgtcccaagtaatgttcagcagttttggatctcttgcagtgctcaggataaactgcttcacattcttgctctcttgaagctagaggttgttcagaagaaaattctgattttcatcaatacaattgacatgggattcaggttgaaattattcttggaaaagtttggaatcaagtctgcaattttaaacggggaattgcctcagaattctcgacttcatatccttgagcaattcaatgcaggacttttcgattacttgattgcaacggatgataatagccagactaaaaaacaaaaggaagaggctaaaggtgaggctaacaaggagaacaagaaaaataataagcgtagcaaaccaaagctagatgctgagttcggtgtagttaggggaattgatttcaaaaaagttcacacggttataaactttgatatgcctcaaagtgttactggatatatccatcgaattgagcgtacagggagagcatatagcagcggatcttccgtttctcttatttctcctgatgagatggaagggtttgaagatataaagtccttcttagcaagcgacaagaacaaggatattgatattatcacaccctttcctttgttgaccgaaaatgctgtcgagtctcttagatatagagctgaggatgtggcaaagagtgttacaaagattgcggttcgagagtctcgagctcaggatttgaggaatgagataatcaactctgaaaagttaaaagctcattttgaagctaatccaagagacttagatctgttgagacatgacaagcctctgagtaagactgcacctgcaccacatctaaaggacatccccgagtatctagtggacgcaaagactcaagaagcaagcaagatggtaaagctagctagagccgcaatgggcaacactaggagatctggtggaggtggtggtcgcaacaacaaaaacaagaaacggtctagaaaaggcagcgacccactcaaaaccttcaaccctaatgggtctaagagaggagccgttggccagaaggatggcaaagattctagctcgaccaaaaaacagaagacagtttaagttatttcgtttagctcaagtgtaaccaaattttgactcgttataatcaatcacacaaaagaacggagacgagagcatcaatctttgtagctctattcatgtggcatcaggagacaaagttttgtgagcatattattagccttttgaggtttttattgaaatagatttttgtaaaaaaaaaaaaaaaaaaactagagaactagt

SEQ ID NO: 48400 - protein, 655 aa, Arabidopsis thaliana
  peptide (1)..(655): Ceres Seq. ID no. 14310272
  misc_feature (88)..(307): Pfam Name: DEAD/DEAH box helicase Pfam Description: DEAD/DEAH box helicase
  misc_feature (27)..(492): Homolog of NCBI NO: 32413753 NR Description: hypothetical protein [Neurospora crassa]
  misc_feature (77)..(580): Homolog of NCBI NO: 24643725 NR Description: Helicase CG1666-PA [Drosophila melanogaster]
  misc_feature (59)..(636): Homolog of NCBI NO: 31201105 NR Description: ENSANGP00000021948 [Anopheles gambiae]
  misc_feature (76)..(628): Homolog of NCBI NO: 3850123 NR Description: dead box helicase [Candida albicans]
  misc_feature (70)..(624): Homolog of NCBI NO: 10434373 NR Description: unnamed protein product [Homo sapiens]
  misc_feature (70)..(624): Homolog of NCBI NO: 9506931 NR Description: DEAD (Asp-Glu-Ala-Asp) box polypeptide 56
  misc_feature (70)..(582): Homolog of NCBI NO: 26344992 NR Description: unnamed protein product [Mus musculus]
  misc_feature (70)..(582): Homolog of NCBI NO: 34879060 NR Description: similar to Probable ATP-dependent 61 kDa
  misc_feature (70)..(582): Homolog of NCBI NO: 21312650 NR Description: nucleolar RNA helicase homolog; DEAD-box RNA
  misc_feature (372)..(630): Homolog of NCBI NO: 11358798 NR Description: RNA helicase RH16 [imported] - Arabidopsis
RLFSLHFFIFFLRRFSNLFDQTSSEISYSMGKTKLKPVEDVNSEVVDEVEKAEEVEEQRNDREQEEEQKEEEAPKSFEELGLDSRLIRALTKKGIEKPTLIQQSAIPYILEGKDVVARAKTGSGKTLAYLLPLLQKLFSADSVSKKKLAPSAFILVPSRELCQQVYTEVSSLIELCRVQLKAVQLTSSMSASDMRNALAGLPEILVSTPACIPKCFAAGVLEPTAVSESLSILVLDEADLLLSYGYEDNLRSVTSIIPRRCQCLLMSATTSSDVEKLKKLILHNPIVLTLTEDNDKEEAVPSNVQQFWISCSAQDKLLHILALLKLEVVQKKILIFINTIDMGFRLKLFLEKFGIKSAILNGELPQNSRLHILEQFNAGLFDYLIATDDNSQTKKQKEEAKGEANKENKKNNKRSKPKLDAEFGVVRGIDFKKVHTVINFDMPQSVTGYIHRIERTGRAYSSGSSVSLISPDEMEGFEDIKSFLASDKNKDIDIITPFPLLTENAVESLRYRAEDVAKSVTKIAVRESRAQDLRNEIINSEKLKAHFEANPRDLDLLRHDKPLSKTAPAPHLKDIPEYLVDAKTQEASKMVKLARAAMGNTRRSGGGGGRNNKNKKRSRKGSDPLKTFNPNGSKRGAVGQKDGKDSSSTKKQKTV

SEQ ID NO: 48401 - protein, 626 aa, Arabidopsis thaliana
  peptide (1)..(626): Ceres Seq. ID no. 14310273
  misc_feature (59)..(278): Pfam Name: DEAD/DEAH box helicase Pfam Description: DEAD/DEAH box helicase
  misc_feature (1)..(463): Homolog of NCBI NO: 32413753 NR Description: hypothetical protein [Neurospora crassa]
  misc_feature (48)..(551): Homolog of NCBI NO: 24643725 NR Description: Helicase CG1666-PA [Drosophila melanogaster]
  misc_feature (30)..(607): Homolog of NCBI NO: 31201105 NR Description: ENSANGP00000021948 [Anopheles gambiae]
  misc_feature (47)..(599): Homolog of NCBI NO: 3850123 NR Description: dead box helicase [Candida albicans]
  misc_feature (41)..(595): Homolog of NCBI NO: 10434373 NR Description: unnamed protein product [Homo sapiens]
  misc_feature (41)..(595): Homolog of NCBI NO: 9506931 NR Description: DEAD (Asp-Glu-Ala-Asp) box polypeptide 56
  misc_feature (41)..(553): Homolog of NCBI NO: 26344992 NR Description: unnamed protein product [Mus musculus]
  misc_feature (41)..(553): Homolog of NCBI NO: 34879060 NR Description: similar to Probable ATP-dependent 61 kDa
  misc_feature (41)..(553): Homolog of NCBI NO: 21312650 NR Description: nucleolar RNA helicase homolog; DEAD-box RNA
  misc_feature (343)..(601): Homolog of NCBI NO: 11358798 NR Description: RNA helicase RH16 [imported] - Arabidopsis
MGKTKLKPVEDVNSEVVDEVEKAEEVEEQRNDREQEEEQKEEEAPKSFEELGLDSRLIRALTKKGIEKPTLIQQSAIPYILEGKDVVARAKTGSGKTLAYLLPLLQKLFSADSVSKKKLAPSAFILVPSRELCQQVYTEVSSLIELCRVQLKAVQLTSSMSASDMRNALAGLPEILVSTPACIPKCFAAGVLEPTAVSESLSILVLDEADLLLSYGYEDNLRSVTSIIPRRCQCLLMSATTSSDVEKLKKLILHNPIVLTLTEDNDKEEAVPSNVQQFWISCSAQDKLLHILALLKLEVVQKKILIFINTIDMGFRLKLFLEKFGIKSAILNGELPQNSRLHILEQFNAGLFDYLIATDDNSQTKKQKEEAKGEANKENKKNNKRSKPKLDAEFGVVRGIDFKKVHTVINFDMPQSVTGYIHRIERTGRAYSSGSSVSLISPDEMEGFEDIKSFLASDKNKDIDIITPFPLLTENAVESLRYRAEDVAKSVTKIAVRESRAQDLRNEIINSEKLKAHFEANPRDLDLLRHDKPLSKTAPAPHLKDIPEYLVDAKTQEASKMVKLARAAMGNTRRSGGGGGRNNKNKKRSRKGSDPLKTFNPNGSKRGAVGQKDGKDSSSTKKQKTV

SEQ ID NO: 48402 - protein, 467 aa, Arabidopsis thaliana
  peptide (1)..(467): Ceres Seq. ID no. 14310274
  misc_feature (1)..(119): Pfam Name: DEAD/DEAH box helicase Pfam Description: DEAD/DEAH box helicase
  misc_feature (1)..(304): Homolog of NCBI NO: 32413753 NR Description: hypothetical protein [Neurospora crassa]
  misc_feature (1)..(392): Homolog of NCBI NO: 24643725 NR Description: Helicase CG1666-PA [Drosophila melanogaster]
  misc_feature (1)..(448): Homolog of NCBI NO: 31201105 NR Description: ENSANGP00000021948 [Anopheles gambiae]
  misc_feature (1)..(440): Homolog of NCBI NO: 3850123 NR Description: dead box helicase [Candida albicans]
  misc_feature (1)..(436): Homolog of NCBI NO: 10434373 NR Description: unnamed protein product [Homo sapiens]
  misc_feature (1)..(436): Homolog of NCBI NO: 9506931 NR Description: DEAD (Asp-Glu-Ala-Asp) box polypeptide 56
  misc_feature (1)..(394): Homolog of NCBI NO: 26344992 NR Description: unnamed protein product [Mus musculus]
  misc_feature (1)..(394): Homolog of NCBI NO: 34879060 NR Description: similar to Probable ATP-dependent 61 kDa
  misc_feature (1)..(394): Homolog of NCBI NO: 21312650 NR Description: nucleolar RNA helicase homolog; DEAD-box RNA
  misc_feature (184)..(442): Homolog of NCBI NO: 11358798 NR Description: RNA helicase RH16 [imported] - Arabidopsis
MSASDMRNALAGLPEILVSTPACIPKCFAAGVLEPTAVSESLSILVLDEADLLLSYGYEDNLRSVTSIIPRRCQCLLMSATTSSDVEKLKKLILHNPIVLTLTEDNDKEEAVPSNVQQFWISCSAQDKLLHILALLKLEVVQKKILIFINTIDMGFRLKLFLEKFGIKSAILNGELPQNSRLHILEQFNAGLFDYLIATDDNSQTKKQKEEAKGEANKENKKNNKRSKPKLDAEFGVVRGIDFKKVHTVINFDMPQSVTGYIHRIERTGRAYSSGSSVSLISPDEMEGFEDIKSFLASDKNKDIDIITPFPLLTENAVESLRYRAEDVAKSVTKIAVRESRAQDLRNEIINSEKLKAHFEANPRDLDLLRHDKPLSKTAPAPHLKDIPEYLVDAKTQEASKMVKLARAAMGNTRRSGGGGGRNNKNKKRSRKGSDPLKTFNPNGSKRGAVGQKDGKDSSSTKKQKTV

SEQ ID NO: 48403 - DNA, 3885 bp, Arabidopsis thaliana
  misc_feature (1)..(3885): Ceres Seq. ID no. 13579059
  misc_feature: MA Experiment ID: 20000180 Result: Up-regulated in Transcription
  misc_feature: MA Experiment 20000180 PARAMETER Experiment Name: At_Germinating_Seeds_P Parameter: Age (hr) Value: 24 vs. 0
  misc_feature: MA Experiment 20000180 PARAMETER Experiment Name: At_Germinating_Seeds_P Parameter: Tissue Value: Germinating Seeds
  misc_feature: MA Experiment ID: 20000185 Result: Up-regulated in Transcription
  misc_feature: MA Experiment 20000185 PARAMETER Experiment Name: At_Roots__P Parameter: Age (day) Value: 7 vs. 21
  misc_feature: MA Experiment 20000185 PARAMETER Experiment Name: At_Roots__P Parameter: Organism Value: A. thaliana
  misc_feature: MA Experiment 20000185 PARAMETER Experiment Name: At_Roots__P Parameter: Tissue Value: Roots vs. Whole Plant
  misc_feature: MA Experiment ID: 20000227 Result: Up-regulated in Transcription
  misc_feature: MA Experiment 20000227 PARAMETER Experiment Name: At_Root-Tips-vs-Tops_P Parameter: Tissue Value: Root Tips vs. Root Tops
  misc_feature: MA Experiment ID: 20000234 Result: Up-regulated in Transcription
  misc_feature: MA Experiment 20000234 PARAMETER Experiment Name: At_Siliques_P Parameter: Age (day) Value: 21
  misc_feature: MA Experiment 20000234 PARAMETER Experiment Name: At_Siliques_P Parameter: Organism Value: A. thaliana
  misc_feature: MA Experiment 20000234 PARAMETER Experiment Name: At_Siliques_P Parameter: Plant Line Value: WS
  misc_feature: MA Experiment 20000234 PARAMETER Experiment Name: At_Siliques_P Parameter: Tissue Value: Less Than 5mm Siliques vs. Whole Plant
  misc_feature: MA Experiment ID: 20000235 Result: Up-regulated in Transcription
  misc_feature: MA Experiment 20000235 PARAMETER Experiment Name: At_Siliques_P Parameter: Age (day) Value: 21
  misc_feature: MA Experiment 20000235 PARAMETER Experiment Name: At_Siliques_P Parameter: Organism Value: A. thaliana
  misc_feature: MA Experiment 20000235 PARAMETER Experiment Name: At_Siliques_P Parameter: Plant Line Value: WS
  misc_feature: MA Experiment 20000235 PARAMETER Experiment Name: At_Siliques_P Parameter: Tissue Value: 5-10mm Siliques vs. Whole Plant
  misc_feature: MA Experiment ID: 20000264 Result: Up-regulated in Transcription
  misc_feature: MA Experiment 20000264 PARAMETER Experiment Name: At_Open_Flower_P Parameter: Age (day) Value: 21
  misc_feature: MA Experiment 20000264 PARAMETER Experiment Name: At_Open_Flower_P Parameter: Plant Line Value: WS
  misc_feature: MA Experiment 20000264 PARAMETER Experiment Name: At_Open_Flower_P Parameter: Tissue Value: Open Flower vs. Whole Plant
  misc_feature: MA Experiment ID: 20000265 Result: Up-regulated in Transcription
  misc_feature: MA Experiment 20000265 PARAMETER Experiment Name: At_Open_Flower_P Parameter: Age (day) Value: 21
  misc_feature: MA Experiment 20000265 PARAMETER Experiment Name: At_Open_Flower_P Parameter: Plant Line Value: WS
  misc_feature: MA Experiment 20000265 PARAMETER Experiment Name: At_Open_Flower_P Parameter: Tissue Value: Closed Flower vs. Whole Plant
  misc_feature: MA Experiment ID: 20000286 Result: Up-regulated in Transcription
  misc_feature: MA Experiment 20000286 PARAMETER Experiment Name: At_Open_Flower_P Parameter: Age (day) Value: 21
  misc_feature: MA Experiment 20000286 PARAMETER Experiment Name: At_Open_Flower_P Parameter: Plant Line Value: WS
  misc_feature: MA Experiment 20000286 PARAMETER Experiment Name: At_Open_Flower_P Parameter: Tissue Value: Half Open vs. Whole Plant
  misc_feature: MA Experiment ID: 20000437 Result: Down-regulated in Transcription
  misc_feature: MA Experiment 20000437 PARAMETER Experiment Name: At_Drought_P Parameter: Age (day) Value: 8
  misc_feature: MA Experiment 20000437 PARAMETER Experiment Name: At_Drought_P Parameter: Organism Value: A. thaliana
  misc_feature: MA Experiment 20000437 PARAMETER Experiment Name: At_Drought_P Parameter: Plant Line Value: WS
  misc_feature: MA Experiment 20000437 PARAMETER Experiment Name: At_Drought_P Parameter: Timepoint (hr) Value: 24
  misc_feature: MA Experiment 20000437 PARAMETER Experiment Name: At_Drought_P Parameter: Tissue Value: Whole Plant
  misc_feature: MA Experiment 20000437 PARAMETER Experiment Name: At_Drought_P Parameter: Treatment Value: Drought vs. No Drought
  misc_feature: MA Experiment ID: 20000495 Result: Up-regulated in Transcription
  misc_feature: MA Experiment 20000495 PARAMETER Experiment Name: At_Guard_Cells_P Parameter: Harvest Date Value: 8/2/2002
  misc_feature: MA Experiment 20000495 PARAMETER Experiment Name: At_Guard_Cells_P Parameter: Organism Value: A. thaliana
  misc_feature: MA Experiment 20000495 PARAMETER Experiment Name: At_Guard_Cells_P Parameter: Tissue Value: Guard Cells vs. Leaves
  misc_feature: MA Experiment ID: 20001450 Result: Down-regulated in Transcription
  misc_feature: MA Experiment 20001450 PARAMETER Experiment Name: At_Far-red-induction_P Parameter: Age (day) Value: 7
  misc_feature: MA Experiment 20001450 PARAMETER Experiment Name: At_Far-red-induction_P Parameter: Light Value: Far-red vs. White
  misc_feature: MA Experiment 20001450 PARAMETER Experiment Name: At_Far-red-induction_P Parameter: Organism Value: A. thaliana
  misc_feature: MA Experiment 20001450 PARAMETER Experiment Name: At_Far-red-induction_P Parameter: Plant Line Value: Columbia
  misc_feature: MA Experiment 20001450 PARAMETER Experiment Name: At_Far-red-induction_P Parameter: Timepoint (hr) Value: 8
  misc_feature: MA Experiment 20001450 PARAMETER Experiment Name: At_Far-red-induction_P Parameter: Tissue Value: Whole Plant
  misc_feature: MA Experiment ID: 20001451 Result: Down-regulated in Transcription
  misc_feature: MA Experiment 20001451 PARAMETER Experiment Name: At_Far-red-induction_P Parameter: Age (day) Value: 7
  misc_feature: MA Experiment 20001451 PARAMETER Experiment Name: At_Far-red-induction_P Parameter: Light Value: Far-red vs. White
  misc_feature: MA Experiment 20001451 PARAMETER Experiment Name: At_Far-red-induction_P Parameter: Organism Value: A. thaliana
  misc_feature: MA Experiment 20001451 PARAMETER Experiment Name: At_Far-red-induction_P Parameter: Plant Line Value: Columbia
  misc_feature: MA Experiment 20001451 PARAMETER Experiment Name: At_Far-red-induction_P Parameter: Timepoint (hr) Value: 24
  misc_feature: MA Experiment 20001451 PARAMETER Experiment Name: At_Far-red-induction_P Parameter: Tissue Value: Whole Plant
  misc_feature: MA Experiment ID: 20001556 Result: Down-regulated in Transcription
  misc_feature: MA Experiment 20001556 PARAMETER Experiment Name: At_Drought_Soil_Dry_P Parameter: Age (day) Value: 26
  misc_feature: MA Experiment 20001556 PARAMETER Experiment Name: At_Drought_Soil_Dry_P Parameter: Organism Value: A. thaliana
  misc_feature: MA Experiment 20001556 PARAMETER Experiment Name: At_Drought_Soil_Dry_P Parameter: Plant Line Value: WS
  misc_feature: MA Experiment 20001556 PARAMETER Experiment Name: At_Drought_Soil_Dry_P Parameter: Post Timepoint (hr) Value: None
  misc_feature: MA Experiment 20001556 PARAMETER Experiment Name: At_Drought_Soil_Dry_P Parameter: Post-Treatment Value: None
  misc_feature: MA Experiment 20001556 PARAMETER Experiment Name: At_Drought_Soil_Dry_P Parameter: Timepoint (day) Value: 12
  misc_feature: MA Experiment 20001556 PARAMETER Experiment Name: At_Drought_Soil_Dry_P Parameter: Treatment Value: Drought vs. No Drought
atggagagcacagagtgcgttagggttgccgtcaacatccgtccgttaattacaccggagcttttgaacggatgcacagattgcatcaccgtggctcccaaagagccacaggtacatattggttcgcatacatttacttatgatttcgtctacggaaatggtggctatccgtgttcggagatttacaatcactgtgttgctccacttgtggatgcattgtttaaaggatacaatgccactgttctagcttatggccagactggttcaggtaaaacctataccatgggtactaattatagtggagattgcacaaatggtggcgttataccaaacgttatggaggatatatttagaagagtggagacaaccaaagattcatctgaactattgatacgagtgtcttttattgagatttttaaggaagaagtttttgatttgctggactcaaattcttcggccctccttaaaaatgacagtggcgttcaagcaaagcacactgctctctcacgagctccaattcaaatcagggaaactgccagtggaggaataacattggctggagttactgaggctgaagtcaagacgaaagaggagatgggctcgtttctagcacgaggctctttgtctcgagctacaggcagcacaaacatgaatagccagtcaagtcggtcccatgcaatcttcacaatcactctggaacaaaagaagattgccggtggttcttgcacaacaactgaagatggaggtgaagatatattatgtgcaaagcttcatttggttgacctagcggggtcagaacgtgcaaaacgaacaggagctgatgggatgcgtttaaaagaaggtattcacatcaacaaaggtctattagctcttggaaatgttataagtgcacttggagatgagaaaaagagaaaggaaggaggtcacgttccttaccgtgacagcaagttaactcgtttgctacaggattctcttggtggcaatagcaaaactgtgatgattgcttgtgtaagtcccgctgatacaaatgctgaggaaactttaaatacgctcaaatacgcaaatcgtgctcgcaatattcaaaacaaagcagtgatcaatcgagacccagcaaccgcacaaatgcaaagaatgcggagccaaattgagcaactgcaaacagaactcttgttctataggggtgatagtggtgcttttgatgagctccagattctcaagcataagatatcactacttgaggcaagcaatcgtgagctacacaatgaacttcaagaacggagagtcgcgtctgagcatttctcaaagcgtgcttatgatgctcaggttgaaaaggacaaacttataatgataattgaatctgttcgtaatggtaaatccttggatgagattgaatcctgccaaaatgaggatgttggtttggtgaacaagtatgtctcgaaaattcaagagctagaaggagaactgttgcatatcaaaaacttgaagaaaaccagtaaccaccaatattcggatgattcctatgacgttgggcctcgttcgaacaatgtcttgtttccctcatccaatgagtcgtcagattgtgaagacaaagtgatggatgtcactgatgaacttgaatttcaagaaaaagagattgaacattgctcacttcaagaaaagttggatatggagctaaaggaattggataagagacttgaagaaaaggaggctgaaatgaagcgcttttcaagtggtggtacatctgttctcaaacaacactatgagaaaaaagtttatgacctagaacaggaaaaaagagcactacagagagaaatcgaaggtttgagacataatcttgctagcataccatctggaccaggagatggtgcccagaaactgaaggaagaatatgttcagaaactgaacacgcttgaaacacaggtttctgttctgaagaagaaacaagatgcacaggctcagcttatgagacaaaagcagaaaagtgacgatgccgcaataaaattgcaggatgaaatacacagaattaagtctcagaaggtgcaattacagcaaaagattaagcaggagtcagagcagtttagggcttggaaggcttcaagagagaaggaagttatgcagctcaaaaaagagggaaggagaaatgagtatgagatgcacaaactcatggctctgaatcaaaaacagaagctggttttgcaaagaaagacagaagaggcatctcaggtgacaaaaagactcaaagagcttttagataatcgaaaggcttcttcacgcgagacattgagtggtgctaatggccctggaactcaggcattgatgcaagcaattgagcatgagattgaagtcactgttcgggttcacgaagtgcgttctgaatatgagaggcaaacggaagagagggcaagaatggctaaggaagttgcaaggctaagagaagaaaacgagcttctcaagaatgccaagataagcgttcatggtgacaccatgtctcctggtgcaagaaactcaaggatttttgctctggagaatatgcttgcgacctcttccagcactcttgtctccatggcatcacagttatctgaagcagaagaacgtgagcgtgtgtttggtggaagagggaggtggaaccaagttagaacattaggtgacgccaagagtatcatgaactatctattcaacttggcgtcaactgcgaggtgtctagcccgagataaagaggcagactgcagagaaaaagatgtcctaataagagacctcaaagaaaaaatagtaaagtttagcagttatgtaagatacatggagatccagaaagcagacctcgtgcatcaagtgaaagcacagacctctgcaatgaagaaattgtcagcagatgagaacctaaagaacgagcatagtatgaaaaagcaggaaacccgaaactcgactatagttcttgaggacatggatacctctgattctgaagcgtcagaccatgaacgggaagatccagatcttgatgatgaatggaaacctgaacatgaatcagagcgtgagtccgagcaggaatcggttataaagctaaataggaaacgaaacttcaaagtgggaagacggcgctcgagtgtggtcatgaggcgttcatatgaagagaattcggaaactccttcagatgatgcagtgaaatctgacgtgtgttgttgcacttgcagcaagagctcctcttgcaagacaatgaagtgtcagtgtcgagctacaaagggatcttgtggtccgtcatgtggatgttcttccgtgaaatgctccaacagaaacgcagacggaaaggagaacaattccatctcggaatcagaggccttggaaaacggggagaactcgcaagaatctgatgaaaaggacaaaggccaacaacaacaagttcttgcttcacgtggagctatgctgctacagaacgctcttgctgacaagccagaggaggagacaaacgatgatggaggaacacgaagaagaagaaaacctctatcagacataggaaacacaacgggtaaatcgaatgtgccaaggccaagccaaagaaagaaatggaagaagactgtgcttcagcttgttcctgtaggtccaccagcactaccacccacacacacaaacacacacctgattccagaagctaattcagtgactgtggactcggacacagcgagaatgccagaaaacagtgactcaggagagtctaatagcatcaaactgaagctaccgagggcaatgagagcaattcgggtagggcaagtggaagtagaacttcagatgaaaaggagaaccacactcgtcgggtctaaagaggagacgtcgcttgaggttcctgttgtgaattttctcagacagatacagttgttaaagtttgaagtttga

SEQ ID NO: 48404 - protein, 1294 aa, Arabidopsis thaliana
  peptide (1)..(1294): Ceres Seq. ID no. 13579060
  misc_feature (361)..(992): Pfam Name: Myosin tail Pfam Description: Myosin tail
  misc_feature (173)..(955): Homolog of NCBI NO: 18202611 NR Description: Chromosome-associated kinesin KIF4A
  misc_feature (7)..(236): Homolog of NCBI NO: 18202613 NR Description: Chromosome-associated kinesin KLP1
  misc_feature (173)..(945): Homolog of NCBI NO: 18202613 NR Description: Chromosome-associated kinesin KLP1
  misc_feature (1062)..(1123): Homolog of NCBI NO: 27668154 NR Description: similar to Chromosome-associated kinesin KIF4A
  misc_feature (7)..(236): Homolog of NCBI NO: 27668154 NR Description: similar to Chromosome-associated kinesin KIF4A
  misc_feature (173)..(994): Homolog of NCBI NO: 27668154 NR Description: similar to Chromosome-associated kinesin KIF4A
  misc_feature (1062)..(1123): Homolog of NCBI NO: 20858575 NR Description: similar to Chromosome-associated kinesin KIF4A
  misc_feature (7)..(236): Homolog of NCBI NO: 20858575 NR Description: similar to Chromosome-associated kinesin KIF4A
  misc_feature (173)..(994): Homolog of NCBI NO: 20858575 NR Description: similar to Chromosome-associated kinesin KIF4A
  misc_feature (628)..(1007): Homolog of NCBI NO: 26451782 NR Description: putative microtubule-associated motor
MESTECVRVAVNIRPLITPELLNGCTDCITVAPKEPQVHIGSHTFTYDFVYGNGGYPCSEIYNHCVAPLVDALFKGYNATVLAYGQTGSGKTYTMGTNYSGDCTNGGVIPNVMEDIFRRVETTKDSSELLIRVSFIEIFKEEVFDLLDSNSSALLKNDSGVQAKHTALSRAPIQIRETASGGITLAGVTEAEVKTKEEMGSFLARGSLSRATGSTNMNSQSSRSHAIFTITLEQKKIAGGSCTTTEDGGEDILCAKLHLVDLAGSERAKRTGADGMRLKEGIHINKGLLALGNVISALGDEKKRKEGGHVPYRDSKLTRLLQDSLGGNSKTVMIACVSPADTNAEETLNTLKYANRARNIQNKAVINRDPATAQMQRMRSQIEQLQTELLFYRGDSGAFDELQILKHKISLLEASNRELHNELQERRVASEHFSKRAYDAQVEKDKLIMIIESVRNGKSLDEIESCQNEDVGLVNKYVSKIQELEGELLHIKNLKKTSNHQYSDDSYDVGPRSNNVLFPSSNESSDCEDKVMDVTDELEFQEKEIEHCSLQEKLDMELKELDKRLEEKEAEMKRFSSGGTSVLKQHYEKKVYDLEQEKRALQREIEGLRHNLASIPSGPGDGAQKLKEEYVQKLNTLETQVSVLKKKQDAQAQLMRQKQKSDDAAIKLQDEIHRIKSQKVQLQQKIKQESEQFRAWKASREKEVMQLKKEGRRNEYEMHKLMALNQKQKLVLQRKTEEASQVTKRLKELLDNRKASSRETLSGANGPGTQALMQAIEHEIEVTVRVHEVRSEYERQTEERARMAKEVARLREENELLKNAKISVHGDTMSPGARNSRIFALENMLATSSSTLVSMASQLSEAEERERVFGGRGRWNQVRTLGDAKSIMNYLFNLASTARCLARDKEADCREKDVLIRDLKEKIVKFSSYVRYMEIQKADLVHQVKAQTSAMKKLSADENLKNEHSMKKQETRNSTIVLEDMDTSDSEASDHEREDPDLDDEWKPEHESERESEQESVIKLNRKRNFKVGRRRSSVVMRRSYEENSETPSDDAVKSDVCCCTCSKSSSCKTMKCQCRATKGSCGPSCGCSSVKCSNRNADGKENNSISESEALENGENSQESDEKDKGQQQQVLASRGAMLLQNALADKPEEETNDDGGTRRRRKPLSDIGNTTGKSNVPRPSQRKKWKKTVLQLVPVGPPALPPTHTNTHLIPEANSVTVDSDTARMPENSDSGESNSIKLKLPRAMRAIRVGQVEVELQMKRRTTLVGSKEETSLEVPVVNFLRQIQLLKFEV

SEQ ID NO: 48405 - protein, 1200 aa, Arabidopsis thaliana
  peptide (1)..(1200): Ceres Seq. ID no. 13579061
  misc_feature (267)..(898): Pfam Name: Myosin tail Pfam Description: Myosin tail
  misc_feature (79)..(861): Homolog of NCBI NO: 18202611 NR Description: Chromosome-associated kinesin KIF4A
  misc_feature (1)..(142): Homolog of NCBI NO: 18202613 NR Description: Chromosome-associated kinesin KLP1
  misc_feature (79)..(851): Homolog of NCBI NO: 18202613 NR Description: Chromosome-associated kinesin KLP1
  misc_feature (968)..(1029): Homolog of NCBI NO: 27668154 NR Description: similar to Chromosome-associated kinesin KIF4A
  misc_feature (1)..(142): Homolog of NCBI NO: 27668154 NR Description: similar to Chromosome-associated kinesin KIF4A
  misc_feature (79)..(900): Homolog of NCBI NO: 27668154 NR Description: similar to Chromosome-associated kinesin KIF4A
  misc_feature (968)..(1029): Homolog of NCBI NO: 20858575 NR Description: similar to Chromosome-associated kinesin KIF4A
  misc_feature (1)..(142): Homolog of NCBI NO: 20858575 NR Description: similar to Chromosome-associated kinesin KIF4A
  misc_feature (79)..(900): Homolog of NCBI NO: 20858575 NR Description: similar to Chromosome-associated kinesin KIF4A
  misc_feature (534)..(913): Homolog of NCBI NO: 26451782 NR Description: putative microtubule-associated motor
MGTNYSGDCTNGGVIPNVMEDIFRRVETTKDSSELLIRVSFIEIFKEEVFDLLDSNSSALLKNDSGVQAKHTALSRAPIQIRETASGGITLAGVTEAEVKTKEEMGSFLARGSLSRATGSTNMNSQSSRSHAIFTITLEQKKIAGGSCTTTEDGGEDILCAKLHLVDLAGSERAKRTGADGMRLKEGIHINKGLLALGNVISALGDEKKRKEGGHVPYRDSKLTRLLQDSLGGNSKTVMIACVSPADTNAEETLNTLKYANRARNIQNKAVINRDPATAQMQRMRSQIEQLQTELLFYRGDSGAFDELQILKHKISLLEASNRELHNELQERRVASEHFSKRAYDAQVEKDKLIMIIESVRNGKSLDEIESCQNEDVGLVNKYVSKIQELEGELLHIKNLKKTSNHQYSDDSYDVGPRSNNVLFPSSNESSDCEDKVMDVTDELEFQEKEIEHCSLQEKLDMELKELDKRLEEKEAEMKRFSSGGTSVLKQHYEKKVYDLEQEKRALQREIEGLRHNLASIPSGPGDGAQKLKEEYVQKLNTLETQVSVLKKKQDAQAQLMRQKQKSDDAAIKLQDEIHRIKSQKVQLQQKIKQESEQFRAWKASREKEVMQLKKEGRRNEYEMHKLMALNQKQKLVLQRKTEEASQVTKRLKELLDNRKASSRETLSGANGPGTQALMQAIEHEIEVTVRVHEVRSEYERQTEERARMAKEVARLREENELLKNAKISVHGDTMSPGARNSRIFALENMLATSSSTLVSMASQLSEAEERERVFGGRGRWNQVRTLGDAKSIMNYLFNLASTARCLARDKEADCREKDVLIRDLKEKIVKFSSYVRYMEIQKADLVHQVKAQTSAMKKLSADENLKNEHSMKKQETRNSTIVLEDMDTSDSEASDHEREDPDLDDEWKPEHESERESEQESVIKLNRKRNFKVGRRRSSVVMRRSYEENSETPSDDAVKSDVCCCTCSKSSSCKTMKCQCRATKGSCGPSCGCSSVKCSNRNADGKENNSISESEALENGENSQESDEKDKGQQQQVLASRGAMLLQNALADKPEEETNDDGGTRRRRKPLSDIGNTTGKSNVPRPSQRKKWKKTVLQLVPVGPPALPPTHTNTHLIPEANSVTVDSDTARMPENSDSGESNSIKLKLPRAMRAIRVGQVEVELQMKRRTTLVGSKEETSLEVPVVNFLRQIQLLKFEV

SEQ ID NO: 48406 - protein, 1182 aa, Arabidopsis thaliana
  peptide (1)..(1182): Ceres Seq. ID no. 13579062
  misc_feature (249)..(880): Pfam Name: Myosin tail Pfam Description: Myosin tail
  misc_feature (61)..(843): Homolog of NCBI NO: 18202611 NR Description: Chromosome-associated kinesin KIF4A
  misc_feature (1)..(124): Homolog of NCBI NO: 18202613 NR Description: Chromosome-associated kinesin KLP1
  misc_feature (61)..(833): Homolog of NCBI NO: 18202613 NR Description: Chromosome-associated kinesin KLP1
  misc_feature (950)..(1011): Homolog of NCBI NO: 27668154 NR Description: similar to Chromosome-associated kinesin KIF4A
  misc_feature (1)..(124): Homolog of NCBI NO: 27668154 NR Description: similar to Chromosome-associated kinesin KIF4A
  misc_feature (61)..(882): Homolog of NCBI NO: 27668154 NR Description: similar to Chromosome-associated kinesin KIF4A
  misc_feature (950)..(1011): Homolog of NCBI NO: 20858575 NR Description: similar to Chromosome-associated kinesin KIF4A
  misc_feature (1)..(124): Homolog of NCBI NO: 20858575 NR Description: similar to Chromosome-associated kinesin KIF4A
  misc_feature (61)..(882): Homolog of NCBI NO: 20858575 NR Description: similar to Chromosome-associated kinesin KIF4A
  misc_feature (516)..(895): Homolog of NCBI NO: 26451782 NR Description: putative microtubule-associated motor
MEDIFRRVETTKDSSELLIRVSFIEIFKEEVFDLLDSNSSALLKNDSGVQAKHTALSRAPIQIRETASGGITLAGVTEAEVKTKEEMGSFLARGSLSRATGSTNMNSQSSRSHAIFTITLEQKKIAGGSCTTTEDGGEDILCAKLHLVDLAGSERAKRTGADGMRLKEGIHINKGLLALGNVISALGDEKKRKEGGHVPYRDSKLTRLLQDSLGGNSKTVMIACVSPADTNAEETLNTLKYANRARNIQNKAVINRDPATAQMQRMRSQIEQLQTELLFYRGDSGAFDELQILKHKISLLEASNRELHNELQERRVASEHFSKRAYDAQVEKDKLIMIIESVRNGKSLDEIESCQNEDVGLVNKYVSKIQELEGELLHIKNLKKTSNHQYSDDSYDVGPRSNNVLFPSSNESSDCEDKVMDVTDELEFQEKEIEHCSLQEKLDMELKELDKRLEEKEAEMKRFSSGGTSVLKQHYEKKVYDLEQEKRALQREIEGLRHNLASIPSGPGDGAQKLKEEYVQKLNTLETQVSVLKKKQDAQAQLMRQKQKSDDAAIKLQDEIHRIKSQKVQLQQKIKQESEQFRAWKASREKEVMQLKKEGRRNEYEMHKLMALNQKQKLVLQRKTEEASQVTKRLKELLDNRKASSRETLSGANGPGTQALMQAIEHEIEVTVRVHEVRSEYERQTEERARMAKEVARLREENELLKNAKISVHGDTMSPGARNSRIFALENMLATSSSTLVSMASQLSEAEERERVFGGRGRWNQVRTLGDAKSIMNYLFNLASTARCLARDKEADCREKDVLIRDLKEKIVKFSSYVRYMEIQKADLVHQVKAQTSAMKKLSADENLKNEHSMKKQETRNSTIVLEDMDTSDSEASDHEREDPDLDDEWKPEHESERESEQESVIKLNRKRNFKVGRRRSSVVMRRSYEENSETPSDDAVKSDVCCCTCSKSSSCKTMKCQCRATKGSCGPSCGCSSVKCSNRNADGKENNSISESEALENGENSQESDEKDKGQQQQVLASRGAMLLQNALADKPEEETNDDGGTRRRRKPLSDIGNTTGKSNVPRPSQRKKWKKTVLQLVPVGPPALPPTHTNTHLIPEANSVTVDSDTARMPENSDSGESNSIKLKLPRAMRAIRVGQVEVELQMKRRTTLVGSKEETSLEVPVVNFLRQIQLLKFEV

SEQ ID NO: 48407 - DNA, 1912 bp, Arabidopsis thaliana
  misc_feature (1)..(1912): Ceres Seq. ID no. 15168677
  misc_feature: MA Experiment ID: 20000227 Result: Up-regulated in Transcription
  misc_feature: MA Experiment 20000227 PARAMETER Experiment Name: At_Root-Tips-vs-Tops_P Parameter: Tissue Value: Root Tips vs. Root Tops
  misc_feature: MA Experiment ID: 20000495 Result: Down-regulated in Transcription
  misc_feature: MA Experiment 20000495 PARAMETER Experiment Name: At_Guard_Cells_P Parameter: Harvest Date Value: 8/2/2002
  misc_feature: MA Experiment 20000495 PARAMETER Experiment Name: At_Guard_Cells_P Parameter: Organism Value: A. thaliana
  misc_feature: MA Experiment 20000495 PARAMETER Experiment Name: At_Guard_Cells_P Parameter: Tissue Value: Guard Cells vs. Leaves
  misc_feature: MA Experiment ID: 20001557 Result: Up-regulated in Transcription
  misc_feature: MA Experiment 20001557 PARAMETER Experiment Name: At_Drought_Soil_Dry_P Parameter: Age (day) Value: 27
  misc_feature: MA Experiment 20001557 PARAMETER Experiment Name: At_Drought_Soil_Dry_P Parameter: Organism Value: A. thaliana
  misc_feature: MA Experiment 20001557 PARAMETER Experiment Name: At_Drought_Soil_Dry_P Parameter: Plant Line Value: WS
  misc_feature: MA Experiment 20001557 PARAMETER Experiment Name: At_Drought_Soil_Dry_P Parameter: Post Timepoint (hr) Value: 3
  misc_feature: MA Experiment 20001557 PARAMETER Experiment Name: At_Drought_Soil_Dry_P Parameter: Post-Treatment Value: Re-Water vs. No Drought
  misc_feature: MA Experiment 20001557 PARAMETER Experiment Name: At_Drought_Soil_Dry_P Parameter: Timepoint (day) Value: 13
  misc_feature: MA Experiment 20001557 PARAMETER Experiment Name: At_Drought_Soil_Dry_P Parameter: Treatment Value: Drought vs. No Drought
  misc_feature: MA Experiment ID: 20001558 Result: Up-regulated in Transcription
  misc_feature: MA Experiment 20001558 PARAMETER Experiment Name: At_Drought_Soil_Dry_P Parameter: Age (day) Value: 27
  misc_feature: MA Experiment 20001558 PARAMETER Experiment Name: At_Drought_Soil_Dry_P Parameter: Organism Value: A. thaliana
  misc_feature: MA Experiment 20001558 PARAMETER Experiment Name: At_Drought_Soil_Dry_P Parameter: Plant Line Value: WS
  misc_feature: MA Experiment 20001558 PARAMETER Experiment Name: At_Drought_Soil_Dry_P Parameter: Post Timepoint (hr) Value: 6
  misc_feature: MA Experiment 20001558 PARAMETER Experiment Name: At_Drought_Soil_Dry_P Parameter: Post-Treatment Value: Re-Water vs. No Drought
  misc_feature: MA Experiment 20001558 PARAMETER Experiment Name: At_Drought_Soil_Dry_P Parameter: Timepoint (day) Value: 13
  misc_feature: MA Experiment 20001558 PARAMETER Experiment Name: At_Drought_Soil_Dry_P Parameter: Treatment Value: Drought vs. No Drought
gacaaaaacccttttaatctctctctcgtgtagatctatcactctccatttcccttcttctctgtaaaccctttataaatctcacttccttcttcttcatcaatccttcctcagatctcttcttattcaaattcaattgagagatactctcttcttcttctttttctctatccagttccttctgtgcgaagttcttctgattaatttgagtttcttggaagcttttactcgatcttcatcggatcttagggttttgtttaaatccagatcttgggttttgttaaataatggcgactccttatcctggagcgacgcaggtgggttcgtactttgtggggcagtattatcaagtgttgcagcagcagccagatcttattcatcagttttattctgagcctagtagagctattcgtatcgatggtgattccaccgagactgctaattctttgctgcatattcataacatggttatgtcactgaatttcactgcgattgaagtgaagacgattaattcagtcgagtcgtgggaaggtggtgttcttgtggtggtttcaggatctgtgaaaaccaaggaatttagcaacagaaggagttttgtgcagaccttttttctcgctcctcaggaaaagggttattttgttctcagtgatgtatttctgtttgttgatgagggtactgtttactatcatcagccttcttatttatctgaaatcaagcatgaggctcagcttaatcctcctacccgtcatccagaaccccaagtttctgactatgtgctggaggaagaggcaagcgattatgtgaacgcagtccaaatcaaagatgatcttgttgataagtacagtctgcaagaggaccaacatcaacctcagcatgaagactatgaagatgaagttgcgattgaggaaacacctagggaagaagttgcagttgatgtggtacatgaacatcgggctgcaccagtagaggaaccagttggtgaaaaatcaaagatgagttatgcttccattttaaaagttgcaaaggaagcagcaactgtacctgtagctgctacacaaccatcatataacaagagctctcaagatattaatgagtgggatcaaccaatgcggactccttcccctcagctggctgcgcctcttgcccctattcagcaatcaaactcatccacatatgtttccgactatggagcagaggcagaagatggctccggttttgaagactttgagttcaaatcagtgtacgttaggaatttgccttccgacatatctgcttctgaaatagaggaagagtttaagaacttcggtacaatcaagcctgatggtgtgttcctcagaacccgcaaggatgttatgggcgtatgttatgcatttgttgagtttgaggacatgacttccgttgagaatgcgattaaggcttctcctatatacttgggtggaaggcaagtatacattgaggaacgaagaccaaatcccgctggtgttcgcggagcaagaagaggaggaggacgtggaaggggtggttacccaacagaagcaccaagaggccggtttggtgggcgtgggtctggcagaggaaaccaggatggaggtgactacaggccaagaggaaatggttactaccgcggtggtggtcgctaaaagaaaaaagaatctcgtcaaagttttagtgctaccaaagaatgaaatgattcagttcttcttcctttatctacggaagaagtagtttgtaatttctattttgttgggtttggtttttggctcaaagaaacaaagattttggcttatatatgtttttctttaaatttgttatagatttagccatttagactgttatctccctttgggaatggtttagttttggtataacatttcaatttttggtttccttactggattgaattccaaacttc

SEQ ID NO: 48408 - protein, 450 aa, Arabidopsis thaliana
  peptide (1)..(450): Ceres Seq. ID no. 15168678
  misc_feature (11)..(125): Pfam Name: Nuclear transport factor 2 (NTF2) domain Pfam Description: Nuclear transport factor 2 (NTF2) domain
  misc_feature (11)..(450): Homolog of NCBI NO: 34394922 NR Description: putative Ras-GTPase activating protein SH3
  misc_feature (11)..(444): Homolog of NCBI NO: 30695510 NR Description: NTF2-containing RNA-binding protein, putative
  misc_feature (11)..(444): Homolog of NCBI NO: 10177355 NR Description: RNA-binding protein-like [Arabidopsis thaliana]
  misc_feature (11)..(449): Homolog of NCBI NO: 30687772 NR Description: NTF2-containing RNA-binding protein, putative
  misc_feature (10)..(449): Homolog of NCBI NO: 9294171 NR Description: RNA-binding protein-like [Arabidopsis thaliana]
  misc_feature (6)..(448): Homolog of NCBI NO: 21742151 NR Description: OSJNBa0069D17.2 [Oryza sativa (japonica
  misc_feature (229)..(448): Homolog of NCBI NO: 30697455 NR Description: NTF2-containing RNA-binding protein, putative
  misc_feature (2)..(258): Homolog of NCBI NO: 30697455 NR Description: NTF2-containing RNA-binding protein, putative
  misc_feature (5)..(446): Homolog of NCBI NO: 32488304 NR Description: OSJNBb0065L13.13 [Oryza sativa (japonica
  misc_feature (1)..(450): Homolog of NCBI NO: 15240057 NR Description: NTF2-containing RNA-binding protein, putative
MATPYPGATQVGSYFVGQYYQVLQQQPDLIHQFYSEPSRAIRIDGDSTETANSLLHIHNMVMSLNFTAIEVKTINSVESWEGGVLVVVSGSVKTKEFSNRRSFVQTFFLAPQEKGYFVLSDVFLFVDEGTVYYHQPSYLSEIKHEAQLNPPTRHPEPQVSDYVLEEEASDYVNAVQIKDDLVDKYSLQEDQHQPQHEDYEDEVAIEETPREEVAVDVVHEHRAAPVEEPVGEKSKMSYASILKVAKEAATVPVAATQPSYNKSSQDINEWDQPMRTPSPQLAAPLAPIQQSNSSTYVSDYGAEAEDGSGFEDFEFKSVYVRNLPSDISASEIEEEFKNFGTIKPDGVFLRTRKDVMGVCYAFVEFEDMTSVENAIKASPIYLGGRQVYIEERRPNPAGVRGARRGGGRGRGGYPTEAPRGRFGGRGSGRGNQDGGDYRPRGNGYYRGGGR

SEQ ID NO: 48409 - protein, 391 aa, Arabidopsis thaliana
  peptide (1)..(391): Ceres Seq. ID no. 15168679
  misc_feature (1)..(66): Pfam Name: Nuclear transport factor 2 (NTF2) domain Pfam Description: Nuclear transport factor 2 (NTF2) domain
  misc_feature (1)..(391): Homolog of NCBI NO: 34394922 NR Description: putative Ras-GTPase activating protein SH3
  misc_feature (1)..(385): Homolog of NCBI NO: 30695510 NR Description: NTF2-containing RNA-binding protein, putative
  misc_feature (1)..(385): Homolog of NCBI NO: 10177355 NR Description: RNA-binding protein-like [Arabidopsis thaliana]
  misc_feature (1)..(390): Homolog of NCBI NO: 30687772 NR Description: NTF2-containing RNA-binding protein, putative
  misc_feature (1)..(390): Homolog of NCBI NO: 9294171 NR Description: RNA-binding protein-like [Arabidopsis thaliana]
  misc_feature (1)..(389): Homolog of NCBI NO: 21742151 NR Description: OSJNBa0069D17.2 [Oryza sativa (japonica
  misc_feature (170)..(389): Homolog of NCBI NO: 30697455 NR Description: NTF2-containing RNA-binding protein, putative
  misc_feature (1)..(199): Homolog of NCBI NO: 30697455 NR Description: NTF2-containing RNA-binding protein, putative
  misc_feature (1)..(387): Homolog of NCBI NO: 32488304 NR Description: OSJNBb0065L13.13 [Oryza sativa (japonica
  misc_feature (1)..(391): Homolog of NCBI NO: 15240057 NR Description: NTF2-containing RNA-binding protein, putative
MVMSLNFTAIEVKTINSVESWEGGVLVVVSGSVKTKEFSNRRSFVQTFFLAPQEKGYFVLSDVFLFVDEGTVYYHQPSYLSEIKHEAQLNPPTRHPEPQVSDYVLEEEASDYVNAVQIKDDLVDKYSLQEDQHQPQHEDYEDEVAIEETPREEVAVDVVHEHRAAPVEEPVGEKSKMSYASILKVAKEAATVPVAATQPSYNKSSQDINEWDQPMRTPSPQLAAPLAPIQQSNSSTYVSDYGAEAEDGSGFEDFEFKSVYVRNLPSDISASEIEEEFKNFGTIKPDGVFLRTRKDVMGVCYAFVEFEDMTSVENAIKASPIYLGGRQVYIEERRPNPAGVRGARRGGGRGRGGYPTEAPRGRFGGRGSGRGNQDGGDYRPRGNGYYRGGGR

SEQ ID NO: 48410 - protein, 389 aa, Arabidopsis thaliana
  peptide (1)..(389): Ceres Seq. ID no. 15168680
  misc_feature (1)..(64): Pfam Name: Nuclear transport factor 2 (NTF2) domain Pfam Description: Nuclear transport factor 2 (NTF2) domain
  misc_feature (1)..(389): Homolog of NCBI NO: 34394922 NR Description: putative Ras-GTPase activating protein SH3
  misc_feature (1)..(383): Homolog of NCBI NO: 30695510 NR Description: NTF2-containing RNA-binding protein, putative
  misc_feature (1)..(383): Homolog of NCBI NO: 10177355 NR Description: RNA-binding protein-like [Arabidopsis thaliana]
  misc_feature (1)..(388): Homolog of NCBI NO: 30687772 NR Description: NTF2-containing RNA-binding protein, putative
  misc_feature (1)..(388): Homolog of NCBI NO: 9294171 NR Description: RNA-binding protein-like [Arabidopsis thaliana]
  misc_feature (1)..(387): Homolog of NCBI NO: 21742151 NR Description: OSJNBa0069D17.2 [Oryza sativa (japonica
  misc_feature (168)..(387): Homolog of NCBI NO: 30697455 NR Description: NTF2-containing RNA-binding protein, putative
  misc_feature (1)..(197): Homolog of NCBI NO: 30697455 NR Description: NTF2-containing RNA-binding protein, putative
  misc_feature (1)..(385): Homolog of NCBI NO: 32488304 NR Description: OSJNBb0065L13.13 [Oryza sativa (japonica
  misc_feature (1)..(389): Homolog of NCBI NO: 15240057 NR Description: NTF2-containing RNA-binding protein, putative
MSLNFTAIEVKTINSVESWEGGVLVVVSGSVKTKEFSNRRSFVQTFFLAPQEKGYFVLSDVFLFVDEGTVYYHQPSYLSEIKHEAQLNPPTRHPEPQVSDYVLEEEASDYVNAVQIKDDLVDKYSLQEDQHQPQHEDYEDEVAIEETPREEVAVDVVHEHRAAPVEEPVGEKSKMSYASILKVAKEAATVPVAATQPSYNKSSQDINEWDQPMRTPSPQLAAPLAPIQQSNSSTYVSDYGAEAEDGSGFEDFEFKSVYVRNLPSDISASEIEEEFKNFGTIKPDGVFLRTRKDVMGVCYAFVEFEDMTSVENAIKASPIYLGGRQVYIEERRPNPAGVRGARRGGGRGRGGYPTEAPRGRFGGRGSGRGNQDGGDYRPRGNGYYRGGGR

SEQ ID NO: 48411 - DNA, 1592 bp, Arabidopsis thaliana; identical to SEQ ID NO: 46783
  misc_feature (1)..(1592): Ceres Seq. ID no. 12574698
  misc_feature: MA Experiment ID: 20000169 Result: Down-regulated in Transcription
  misc_feature: MA Experiment 20000169 PARAMETER Experiment Name: At_100uM_ABA_P Parameter: Age (day) Value: 14
  misc_feature: MA Experiment 20000169 PARAMETER Experiment Name: At_100uM_ABA_P Parameter: Organism Value: A. thaliana
  misc_feature: MA Experiment 20000169 PARAMETER Experiment Name: At_100uM_ABA_P Parameter: Plant Line Value: WS
  misc_feature: MA Experiment 20000169 PARAMETER Experiment Name: At_100uM_ABA_P Parameter: Timepoint (hr) Value: 6
  misc_feature: MA Experiment 20000169 PARAMETER Experiment Name: At_100uM_ABA_P Parameter: Tissue Value: Aerial
  misc_feature: MA Experiment 20000169 PARAMETER Experiment Name: At_100uM_ABA_P Parameter: Treatment Value: 100uM ABA vs. No Treatment
  misc_feature: MA Experiment ID: 20000185 Result: Down-regulated in Transcription
  misc_feature: MA Experiment 20000185 PARAMETER Experiment Name: At_Roots__P Parameter: Age (day) Value: 7 vs. 21
  misc_feature: MA Experiment 20000185 PARAMETER Experiment Name: At_Roots__P Parameter: Organism Value: A. thaliana
  misc_feature: MA Experiment 20000185 PARAMETER Experiment Name: At_Roots__P Parameter: Tissue Value: Roots vs. Whole Plant
  misc_feature: MA Experiment ID: 20000234 Result: Down-regulated in Transcription
  misc_feature: MA Experiment 20000234 PARAMETER Experiment Name: At_Siliques_P Parameter: Age (day) Value: 21
  misc_feature: MA Experiment 20000234 PARAMETER Experiment Name: At_Siliques_P Parameter: Organism Value: A. thaliana
  misc_feature: MA Experiment 20000234 PARAMETER Experiment Name: At_Siliques_P Parameter: Plant Line Value: WS
  misc_feature: MA Experiment 20000234 PARAMETER Experiment Name: At_Siliques_P Parameter: Tissue Value: Less Than 5mm Siliques vs. Whole Plant
  misc_feature: MA Experiment ID: 20000264 Result: Down-regulated in Transcription
  misc_feature: MA Experiment 20000264 PARAMETER Experiment Name: At_Open_Flower_P Parameter: Age (day) Value: 21
  misc_feature: MA Experiment 20000264 PARAMETER Experiment Name: At_Open_Flower_P Parameter: Plant Line Value: WS
  misc_feature: MA Experiment 20000264 PARAMETER Experiment Name: At_Open_Flower_P Parameter: Tissue Value: Open Flower vs. Whole Plant
  misc_feature: MA Experiment ID: 20000437 Result: Down-regulated in Transcription
  misc_feature: MA Experiment 20000437 PARAMETER Experiment Name: At_Drought_P Parameter: Age (day) Value: 8
  misc_feature: MA Experiment 20000437 PARAMETER Experiment Name: At_Drought_P Parameter: Organism Value: A. thaliana
  misc_feature: MA Experiment 20000437 PARAMETER Experiment Name: At_Drought_P Parameter: Plant Line Value: WS
  misc_feature: MA Experiment 20000437 PARAMETER Experiment Name: At_Drought_P Parameter: Timepoint (hr) Value: 24
  misc_feature: MA Experiment 20000437 PARAMETER Experiment Name: At_Drought_P Parameter: Tissue Value: Whole Plant
  misc_feature: MA Experiment 20000437 PARAMETER Experiment Name: At_Drought_P Parameter: Treatment Value: Drought vs. No Drought
  misc_feature: MA Experiment ID: 20000439 Result: Down-regulated in Transcription
  misc_feature: MA Experiment 20000439 PARAMETER Experiment Name: At_Roots__P Parameter: Age (day) Value: 14 vs. 21
  misc_feature: MA Experiment 20000439 PARAMETER Experiment Name: At_Roots__P Parameter: Organism Value: A. thaliana
  misc_feature: MA Experiment 20000439 PARAMETER Experiment Name: At_Roots__P Parameter: Tissue Value: Roots vs. Whole Plant
  misc_feature: MA Experiment ID: 20000455 Result: Up-regulated in Transcription
  misc_feature: MA Experiment 20000455 PARAMETER Experiment Name: At_100uM_ABA_P Parameter: Age (day) Value: 16
  misc_feature: MA Experiment 20000455 PARAMETER Experiment Name: At_100uM_ABA_P Parameter: Organism Value: A. thaliana
  misc_feature: MA Experiment 20000455 PARAMETER Experiment Name: At_100uM_ABA_P Parameter: Plant Line Value: WS
  misc_feature: MA Experiment 20000455 PARAMETER Experiment Name: At_100uM_ABA_P Parameter: Timepoint (hr) Value: 48
  misc_feature: MA Experiment 20000455 PARAMETER Experiment Name: At_100uM_ABA_P Parameter: Tissue Value: Aerial
  misc_feature: MA Experiment 20000455 PARAMETER Experiment Name: At_100uM_ABA_P Parameter: Treatment Value: 100uM ABA vs. No Treatment
  misc_feature: MA Experiment ID: 20000495 Result: Down-regulated in Transcription
  misc_feature: MA Experiment 20000495 PARAMETER Experiment Name: At_Guard_Cells_P Parameter: Harvest Date Value: 8/2/2002
  misc_feature: MA Experiment 20000495 PARAMETER Experiment Name: At_Guard_Cells_P Parameter: Organism Value: A. thaliana
  misc_feature: MA Experiment 20000495 PARAMETER Experiment Name: At_Guard_Cells_P Parameter: Tissue Value: Guard Cells vs. Leaves
  misc_feature: MA Experiment ID: 20000496 Result: Down-regulated in Transcription
  misc_feature: MA Experiment 20000496 PARAMETER Experiment Name: At_Guard_Cells_P Parameter: Harvest Date Value: 7/19/2002
  misc_feature: MA Experiment 20000496 PARAMETER Experiment Name: At_Guard_Cells_P Parameter: Organism Value: Canola
  misc_feature: MA Experiment 20000496 PARAMETER Experiment Name: At_Guard_Cells_P Parameter: Tissue Value: Guard Cells vs. Leaves
  misc_feature: MA Experiment ID: 20000794 Result: Down-regulated in Transcription
  misc_feature: MA Experiment 20000794 PARAMETER Experiment Name: At_Petals_P Parameter: Age (day) Value: 23-25 days
  misc_feature: MA Experiment 20000794 PARAMETER Experiment Name: At_Petals_P Parameter: Plant Line Value: WS
  misc_feature: MA Experiment 20000794 PARAMETER Experiment Name: At_Petals_P Parameter: Tissue Value: Petals vs. Whole plant
  misc_feature: MA Experiment ID: 20001450 Result: Down-regulated in Transcription
  misc_feature: MA Experiment 20001450 PARAMETER Experiment Name: At_Far-red-induction_P Parameter: Age (day) Value: 7
  misc_feature: MA Experiment 20001450 PARAMETER Experiment Name: At_Far-red-induction_P Parameter: Light Value: Far-red vs. White
  misc_feature: MA Experiment 20001450 PARAMETER Experiment Name: At_Far-red-induction_P Parameter: Organism Value: A. thaliana
  misc_feature: MA Experiment 20001450 PARAMETER Experiment Name: At_Far-red-induction_P Parameter: Plant Line Value: Columbia
  misc_feature: MA Experiment 20001450 PARAMETER Experiment Name: At_Far-red-induction_P Parameter: Timepoint (hr) Value: 8
  misc_feature: MA Experiment 20001450 PARAMETER Experiment Name: At_Far-red-induction_P Parameter: Tissue Value: Whole Plant
  misc_feature: MA Experiment ID: 20001451 Result: Down-regulated in Transcription
  misc_feature: MA Experiment 20001451 PARAMETER Experiment Name: At_Far-red-induction_P Parameter: Age (day) Value: 7
  misc_feature: MA Experiment 20001451 PARAMETER Experiment Name: At_Far-red-induction_P Parameter: Light Value: Far-red vs. White
  misc_feature: MA Experiment 20001451 PARAMETER Experiment Name: At_Far-red-induction_P Parameter: Organism Value: A. thaliana
  misc_feature: MA Experiment 20001451 PARAMETER Experiment Name: At_Far-red-induction_P Parameter: Plant Line Value: Columbia
  misc_feature: MA Experiment 20001451 PARAMETER Experiment Name: At_Far-red-induction_P Parameter: Timepoint (hr) Value: 24
  misc_feature: MA Experiment 20001451 PARAMETER Experiment Name: At_Far-red-induction_P Parameter: Tissue Value: Whole Plant
  misc_feature: MA Experiment ID: 20001458 Result: Up-regulated in Transcription
  misc_feature: MA Experiment 20001458 PARAMETER Experiment Name: At_50mM_NH4NO3_L-to-H_P Parameter: Age (day) Value: Undefined
  misc_feature: MA Experiment 20001458 PARAMETER Experiment Name: At_50mM_NH4NO3_L-to-H_P Parameter: Organism Value: Undefined
  misc_feature: MA Experiment 20001458 PARAMETER Experiment Name: At_50mM_NH4NO3_L-to-H_P Parameter: Plant Line Value: Undefined
  misc_feature: MA Experiment 20001458 PARAMETER Experiment Name: At_50mM_NH4NO3_L-to-H_P Parameter: Timepoint (hr) Value: 2
  misc_feature: MA Experiment 20001458 PARAMETER Experiment Name: At_50mM_NH4NO3_L-to-H_P Parameter: Tissue Value: Siliques
  misc_feature: MA Experiment 20001458 PARAMETER Experiment Name: At_50mM_NH4NO3_L-to-H_P Parameter: Treatment Value: 50mM NH4NO3 vs. 100mM Manitol
  misc_feature: MA Experiment ID: 20001556 Result: Up-regulated in Transcription
  misc_feature: MA Experiment 20001556 PARAMETER Experiment Name: At_Drought_Soil_Dry_P Parameter: Age (day) Value: 26
  misc_feature: MA Experiment 20001556 PARAMETER Experiment Name: At_Drought_Soil_Dry_P Parameter: Organism Value: A. thaliana
  misc_feature: MA Experiment 20001556 PARAMETER Experiment Name: At_Drought_Soil_Dry_P Parameter: Plant Line Value: WS
  misc_feature: MA Experiment 20001556 PARAMETER Experiment Name: At_Drought_Soil_Dry_P Parameter: Post Timepoint (hr) Value: None
  misc_feature: MA Experiment 20001556 PARAMETER Experiment Name: At_Drought_Soil_Dry_P Parameter: Post-Treatment Value: None
  misc_feature: MA Experiment 20001556 PARAMETER Experiment Name: At_Drought_Soil_Dry_P Parameter: Timepoint (day) Value: 12
  misc_feature: MA Experiment 20001556 PARAMETER Experiment Name: At_Drought_Soil_Dry_P Parameter: Treatment Value: Drought vs. No Drought
  misc_feature: MA Experiment ID: 20001557 Result: Up-regulated in Transcription
  misc_feature: MA Experiment 20001557 PARAMETER Experiment Name: At_Drought_Soil_Dry_P Parameter: Age (day) Value: 27
  misc_feature: MA Experiment 20001557 PARAMETER Experiment Name: At_Drought_Soil_Dry_P Parameter: Organism Value: A. thaliana
  misc_feature: MA Experiment 20001557 PARAMETER Experiment Name: At_Drought_Soil_Dry_P Parameter: Plant Line Value: WS
  misc_feature: MA Experiment 20001557 PARAMETER Experiment Name: At_Drought_Soil_Dry_P Parameter: Post Timepoint (hr) Value: 3
  misc_feature: MA Experiment 20001557 PARAMETER Experiment Name: At_Drought_Soil_Dry_P Parameter: Post-Treatment Value: Re-Water vs. No Drought
  misc_feature: MA Experiment 20001557 PARAMETER Experiment Name: At_Drought_Soil_Dry_P Parameter: Timepoint (day) Value: 13
  misc_feature: MA Experiment 20001557 PARAMETER Experiment Name: At_Drought_Soil_Dry_P Parameter: Treatment Value: Drought vs. No Drought
  misc_feature: MA Experiment ID: 20001757 Result: Up-regulated in Transcription
  misc_feature: MA Experiment 20001757 PARAMETER Experiment Name: At_50mM_NH4NO3_L-to-H_P Parameter: Timepoint (hr) Value: 6
  misc_feature: MA Experiment 20001757 PARAMETER Experiment Name: At_50mM_NH4NO3_L-to-H_P Parameter: Tissue Value: Leaf
  misc_feature: MA Experiment 20001757 PARAMETER Experiment Name: At_50mM_NH4NO3_L-to-H_P Parameter: Treatment Value: 50mM NH4NO3 vs 100mM Mannitol

SEQ ID NO: 48412 - protein, 529 aa, Arabidopsis thaliana; identical to SEQ ID NO: 46784
  peptide (1)..(529): Ceres Seq. ID no. 12574699
  misc_feature (161)..(374): Pfam Name: DEAD/DEAH box helicase Pfam Description: DEAD/DEAH box helicase
  misc_feature (161)..(374): Pfam Name: DEAD/DEAH box helicase Pfam Description: DEAD/DEAH box helicase
  misc_feature (156)..(520): Homolog of NCBI NO: 2231116 NR Description: heat resistant RNA dependent ATPase [Thermus
  misc_feature (165)..(519): Homolog of NCBI NO: 34899624 NR Description: putative RNA helicase [Oryza sativa (japonica
  misc_feature (93)..(519): Homolog of NCBI NO: 15228722 NR Description: putative RNA helicase
  misc_feature (113)..(519): Homolog of NCBI NO: 22331253 NR Description: putative RNA helicase
  misc_feature (55)..(521): Homolog of NCBI NO: 34897326 NR Description: putative RNA helicase [Oryza sativa]
  misc_feature (156)..(520): Homolog of NCBI NO: 2231116 NR Description: heat resistant RNA dependent ATPase [Thermus
  misc_feature (93)..(519): Homolog of NCBI NO: 15228722 NR Description: putative RNA helicase
  misc_feature (55)..(521): Homolog of NCBI NO: 34897326 NR Description: putative RNA helicase [Oryza sativa]
  misc_feature (47)..(521): Homolog of NCBI NO: 11358808 NR Description: RNA helicase RH3 [imported] - Arabidopsis
  misc_feature (47)..(521): Homolog of NCBI NO: 19347898 NR Description: unknown protein [Arabidopsis thaliana]
  misc_feature (47)..(521): Homolog of NCBI NO: 30690260 NR Description: DEAD box RNA helicase (RH3) [Arabidopsis
  misc_feature (47)..(521): Homolog of NCBI NO: 22135801 NR Description: At5g26740 [Arabidopsis thaliana]
  misc_feature (47)..(521): Homolog of NCBI NO: 7488180 NR Description: probable RNA helicase F21E10.1 - Arabidopsis
  misc_feature (113)..(519): Homolog of NCBI NO: 22331253 NR Description: putative RNA helicase
  misc_feature (165)..(519): Homolog of NCBI NO: 34899624 NR Description: putative RNA helicase [Oryza sativa (japonica
  misc_feature (47)..(521): Homolog of NCBI NO: 7488180 NR Description: probable RNA helicase F21E10.1 - Arabidopsis
  misc_feature (47)..(521): Homolog of NCBI NO: 22135801 NR Description: At5g26740 [Arabidopsis thaliana]
  misc_feature (47)..(521): Homolog of NCBI NO: 30690260 NR Description: DEAD box RNA helicase (RH3) [Arabidopsis
  misc_feature (47)..(521): Homolog of NCBI NO: 19347898 NR Description: unknown protein [Arabidopsis thaliana]
  misc_feature (47)..(521): Homolog of NCBI NO: 11358808 NR Description: RNA helicase RH3 [imported] - Arabidopsis

SEQ ID NO: 48413 - protein, 483 aa, Arabidopsis thaliana; identical to SEQ ID NO: 46785
  peptide (1)..(483): Ceres Seq. ID no. 12574700
  misc_feature (115)..(328): Pfam Name: DEAD/DEAH box helicase Pfam Description: DEAD/DEAH box helicase
  misc_feature (115)..(328): Pfam Name: DEAD/DEAH box helicase Pfam Description: DEAD/DEAH box helicase
  misc_feature (110)..(474): Homolog of NCBI NO: 2231116 NR Description: heat resistant RNA dependent ATPase [Thermus
  misc_feature (119)..(473): Homolog of NCBI NO: 34899624 NR Description: putative RNA helicase [Oryza sativa (japonica
  misc_feature (47)..(473): Homolog of NCBI NO: 15228722 NR Description: putative RNA helicase
  misc_feature (67)..(473): Homolog of NCBI NO: 22331253 NR Description: putative RNA helicase
  misc_feature (9)..(475): Homolog of NCBI NO: 34897326 NR Description: putative RNA helicase [Oryza sativa]
  misc_feature (110)..(474): Homolog of NCBI NO: 2231116 NR Description: heat resistant RNA dependent ATPase [Thermus
  misc_feature (47)..(473): Homolog of NCBI NO: 15228722 NR Description: putative RNA helicase
  misc_feature (9)..(475): Homolog of NCBI NO: 34897326 NR Description: putative RNA helicase [Oryza sativa]
  misc_feature (1)..(475): Homolog of NCBI NO: 11358808 NR Description: RNA helicase RH3 [imported] - Arabidopsis
  misc_feature (1)..(475): Homolog of NCBI NO: 19347898 NR Description: unknown protein [Arabidopsis thaliana]
  misc_feature (1)..(475): Homolog of NCBI NO: 30690260 NR Description: DEAD box RNA helicase (RH3) [Arabidopsis
  misc_feature (1)..(475): Homolog of NCBI NO: 22135801 NR Description: At5g26740 [Arabidopsis thaliana]
  misc_feature (1)..(475): Homolog of NCBI NO: 7488180 NR Description: probable RNA helicase F21E10.1 - Arabidopsis
  misc_feature (67)..(473): Homolog of NCBI NO: 22331253 NR Description: putative RNA helicase
  misc_feature (119)..(473): Homolog of NCBI NO: 34899624 NR Description: putative RNA helicase [Oryza sativa (japonica
  misc_feature (1)..(475): Homolog of NCBI NO: 7488180 NR Description: probable RNA helicase F21E10.1 - Arabidopsis
  misc_feature (1)..(475): Homolog of NCBI NO: 22135801 NR Description: At5g26740 [Arabidopsis thaliana]
  misc_feature (1)..(475): Homolog of NCBI NO: 30690260 NR Description: DEAD box RNA helicase (RH3) [Arabidopsis
  misc_feature (1)..(475): Homolog of NCBI NO: 19347898 NR Description: unknown protein [Arabidopsis thaliana]
  misc_feature (1)..(475): Homolog of NCBI NO: 11358808 NR Description: RNA helicase RH3 [imported] - Arabidopsis

SEQ ID NO: 48414 - DNA, 1507 bp, Arabidopsis thaliana
  misc_feature (1)..(1507): Ceres Seq. ID no. 12575600
  misc_feature: MA Experiment ID: 20000437 Result: Up-regulated in Transcription
  misc_feature: MA Experiment 20000437 PARAMETER Experiment Name: At_Drought_P Parameter: Age (day) Value: 8
  misc_feature: MA Experiment 20000437 PARAMETER Experiment Name: At_Drought_P Parameter: Organism Value: A. thaliana
  misc_feature: MA Experiment 20000437 PARAMETER Experiment Name: At_Drought_P Parameter: Plant Line Value: WS
  misc_feature: MA Experiment 20000437 PARAMETER Experiment Name: At_Drought_P Parameter: Timepoint (hr) Value: 24
  misc_feature: MA Experiment 20000437 PARAMETER Experiment Name: At_Drought_P Parameter: Tissue Value: Whole Plant
  misc_feature: MA Experiment 20000437 PARAMETER Experiment Name: At_Drought_P Parameter: Treatment Value: Drought vs. No Drought
  misc_feature: MA Experiment ID: 20000573 Result: Up-regulated in Transcription
  misc_feature: MA Experiment 20000573 PARAMETER Experiment Name: At_100uM_ABA_Mutants__P Parameter: Organism Value: A. thaliana
  misc_feature: MA Experiment 20000573 PARAMETER Experiment Name: At_100uM_ABA_Mutants__P Parameter: Plant Line Value: CS22 vs. Ler wt
  misc_feature: MA Experiment 20000573 PARAMETER Experiment Name: At_100uM_ABA_Mutants__P Parameter: Timepoint (hr) Value: N/A
  misc_feature: MA Experiment 20000573 PARAMETER Experiment Name: At_100uM_ABA_Mutants__P Parameter: Tissue Value: Whole Plant
  misc_feature: MA Experiment 20000573 PARAMETER Experiment Name: At_100uM_ABA_Mutants__P Parameter: Treatment Value: None
  misc_feature: MA Experiment ID: 20000574 Result: Up-regulated in Transcription
  misc_feature: MA Experiment 20000574 PARAMETER Experiment Name: At_100uM_ABA_Mutants__P Parameter: Organism Value: A. thaliana
  misc_feature: MA Experiment 20000574 PARAMETER Experiment Name: At_100uM_ABA_Mutants__P Parameter: Plant Line Value: CS23 vs. Ler wt
  misc_feature: MA Experiment 20000574 PARAMETER Experiment Name: At_100uM_ABA_Mutants__P Parameter: Timepoint (hr) Value: N/A
  misc_feature: MA Experiment 20000574 PARAMETER Experiment Name: At_100uM_ABA_Mutants__P Parameter: Tissue Value: Whole Plant
  misc_feature: MA Experiment 20000574 PARAMETER Experiment Name: At_100uM_ABA_Mutants__P Parameter: Treatment Value: None
  misc_feature: MA Experiment ID: 20001451 Result: Up-regulated in Transcription
  misc_feature: MA Experiment 20001451 PARAMETER Experiment Name: At_Far-red-induction_P Parameter: Age (day) Value: 7
  misc_feature: MA Experiment 20001451 PARAMETER Experiment Name: At_Far-red-induction_P Parameter: Light Value: Far-red vs. White
  misc_feature: MA Experiment 20001451 PARAMETER Experiment Name: At_Far-red-induction_P Parameter: Organism Value: A. thaliana
  misc_feature: MA Experiment 20001451 PARAMETER Experiment Name: At_Far-red-induction_P Parameter: Plant Line Value: Columbia
  misc_feature: MA Experiment 20001451 PARAMETER Experiment Name: At_Far-red-induction_P Parameter: Timepoint (hr) Value: 24
  misc_feature: MA Experiment 20001451 PARAMETER Experiment Name: At_Far-red-induction_P Parameter: Tissue Value: Whole Plant
gacttcaagaaaaattaaagaaaagaaagtaaactctttcaccaaaaaaaataaagaaaatttattgttccatctttctgataatcggatcttacagagagagagctccatggatcgccgcatctatggtggctccgccgtcattcatctctttctcttcttctccgtcctaatcttctccgccgcatctgcattatccaagaaccagtctccttcttccgggtcgggtcagatcaactccaactctgtcctcgtagctcttcttgactctcgttacactgagctagctgagctcgtcgagaaagctcttctccttcagacacttgaagacgctgttggtcgtcacaatattaccatttttgctcctcgcaatgaagctcttgagcgtgaccttgaccctgagttcaagcggttcttgctcgagccaggtaatctcaaatctctgcaaacactcctcatgttccacattatacccaatcgggtcgggtcgaaccaatggccttcagaagaatcgggtcgggtcaagcaccacacgctagggaacgatcaggtccgtttgagcaacggacaaggaaaaaagatggttgatttagctgagattatccgacccgatgatttgacccgacccgacggattgatccacgggattgaacggcttctcattcctcgctctgttcaagaagatttcaatcgccgtcgtagccttcaatcaatctccgccgtcttacctgaaggagctcctgaagttgacccgagaaccaaccgtctcaagaaacccgcagctccagtacccgccggatctccaccagctcttccgatccaatccgctatggcccctggtccgtcgctagctccggcaccagctccgggacctggaggcaagcagcaccacttcgacggtgaggctcaagtcaaagatttcatccatacactgttacattacggcggttacaacgagatggcagatattctcgtgaatctgacgtcactcgcgacagagatgggacggttggtgtcagaaggctatgtgttaacggttttggctcctaacgatgaagcaatggcgaaattgaccacggatcagctgagtgagccaggagcaccggagcagatcgtatactaccatataatccctgagtatcaaacggaggagagtatgtacaattctgttaggagatttgggaaggtgaagttcgatacgttgcgttttcctcataaggttgcggctaaggaagctgatggttccgttaagtttggtgacggtgagaagtcggcgtatttgtttgatcctgatatctatacggacggtcggatttcggttcaggggattgacggtgttttgtttccacaagaggaggaggttgttgaatcggttaagaaaccggttaagaaaattgttcagccgagaagaggtacgcttttgtttttattgcatttgatcttttatgtgtgttcctcaaattgtgtgcttagtattgattttctgcgtgtggcaaagtttagataa

SEQ ID NO: 48415 - protein, 501 aa, Arabidopsis thaliana
  peptide (1)..(501): Ceres Seq. ID no. 12575601
  misc_feature (79)..(222): Pfam Name: Fasciclin domain Pfam Description: Fasciclin domain
  misc_feature (153)..(476): Homolog of NCBI NO: 7486009 NR Description: hypothetical protein F22O6.250 - Arabidopsis
  misc_feature (61)..(452): Homolog of NCBI NO: 27819499 NR Description: putative arabinogalactan-protein
  misc_feature (62)..(452): Homolog of NCBI NO: 34899886 NR Description: OJ1714_H10.26 [Oryza sativa (japonica
  misc_feature (62)..(452): Homolog of NCBI NO: 33146739 NR Description: GPI-anchored protein -like
  misc_feature (51)..(474): Homolog of NCBI NO: 30686588 NR Description: expressed protein [Arabidopsis thaliana]
  misc_feature (51)..(481): Homolog of NCBI NO: 25370583 NR Description: hypothetical protein At2g35860 [imported] -
  misc_feature (52)..(474): Homolog of NCBI NO: 15231197 NR Description: unknown protein; protein id: At3g52370.1
  misc_feature (37)..(472): Homolog of NCBI NO: 6041822 NR Description: unknown protein [Arabidopsis thaliana]
  misc_feature (37)..(474): Homolog of NCBI NO: 18399319 NR Description: expressed protein
  misc_feature (37)..(501): Homolog of NCBI NO: 15240029 NR Description: putative protein; protein id: At5g06390.1
TSRKIKEKKVNSFTKKNKENLLFHLSDNRILQRESSMDRRIYGGSAVIHLFLFFSVLIFSAASALSKNQSPSSGSGQINSNSVLVALLDSRYTELAELVEKALLLQTLEDAVGRHNITIFAPRNEALERDLDPEFKRFLLEPGNLKSLQTLLMFHIIPNRVGSNQWPSEESGRVKHHTLGNDQVRLSNGQGKKMVDLAEIIRPDDLTRPDGLIHGIERLLIPRSVQEDFNRRRSLQSISAVLPEGAPEVDPRTNRLKKPAAPVPAGSPPALPIQSAMAPGPSLAPAPAPGPGGKQHHFDGEAQVKDFIHTLLHYGGYNEMADILVNLTSLATEMGRLVSEGYVLTVLAPNDEAMAKLTTDQLSEPGAPEQIVYYHIIPEYQTEESMYNSVRRFGKVKFDTLRFPHKVAAKEADGSVKFGDGEKSAYLFDPDIYTDGRISVQGIDGVLFPQEEEVVESVKKPVKKIVQPRRGTLLFLLHLIFYVCSSNCVLSIDFLRVAKFR

SEQ ID NO: 48416 - protein, 465 aa, Arabidopsis thaliana
  peptide (1)..(465): Ceres Seq. ID no. 12575602
  misc_feature (43)..(186): Pfam Name: Fasciclin domain Pfam Description: Fasciclin domain
  misc_feature (117)..(440): Homolog of NCBI NO: 7486009 NR Description: hypothetical protein F22O6.250 - Arabidopsis
  misc_feature (25)..(416): Homolog of NCBI NO: 27819499 NR Description: putative arabinogalactan-protein
  misc_feature (26)..(416): Homolog of NCBI NO: 34899886 NR Description: OJ1714_H10.26 [Oryza sativa (japonica
  misc_feature (26)..(416): Homolog of NCBI NO: 33146739 NR Description: GPI-anchored protein -like
  misc_feature (15)..(438): Homolog of NCBI NO: 30686588 NR Description: expressed protein [Arabidopsis thaliana]
  misc_feature (15)..(445): Homolog of NCBI NO: 25370583 NR Description: hypothetical protein At2g35860 [imported] -
  misc_feature (16)..(438): Homolog of NCBI NO: 15231197 NR Description: unknown protein; protein id: At3g52370.1
  misc_feature (1)..(436): Homolog of NCBI NO: 6041822 NR Description: unknown protein [Arabidopsis thaliana]
  misc_feature (1)..(438): Homolog of NCBI NO: 18399319 NR Description: expressed protein
  misc_feature (1)..(465): Homolog of NCBI NO: 15240029 NR Description: putative protein; protein id: At5g06390.1
MDRRIYGGSAVIHLFLFFSVLIFSAASALSKNQSPSSGSGQINSNSVLVALLDSRYTELAELVEKALLLQTLEDAVGRHNITIFAPRNEALERDLDPEFKRFLLEPGNLKSLQTLLMFHIIPNRVGSNQWPSEESGRVKHHTLGNDQVRLSNGQGKKMVDLAEIIRPDDLTRPDGLIHGIERLLIPRSVQEDFNRRRSLQSISAVLPEGAPEVDPRTNRLKKPAAPVPAGSPPALPIQSAMAPGPSLAPAPAPGPGGKQHHFDGEAQVKDFIHTLLHYGGYNEMADILVNLTSLATEMGRLVSEGYVLTVLAPNDEAMAKLTTDQLSEPGAPEQIVYYHIIPEYQTEESMYNSVRRFGKVKFDTLRFPHKVAAKEADGSVKFGDGEKSAYLFDPDIYTDGRISVQGIDGVLFPQEEEVVESVKKPVKKIVQPRRGTLLFLLHLIFYVCSSNCVLSIDFLRVAKFR

SEQ ID NO: 48417 - protein, 349 aa, Arabidopsis thaliana
  peptide (1)..(349): Ceres Seq. ID no. 12575603
  misc_feature (1)..(70): Pfam Name: Fasciclin domain Pfam Description: Fasciclin domain
  misc_feature (1)..(324): Homolog of NCBI NO: 7486009 NR Description: hypothetical protein F22O6.250 - Arabidopsis
  misc_feature (1)..(300): Homolog of NCBI NO: 27819499 NR Description: putative arabinogalactan-protein
  misc_feature (1)..(300): Homolog of NCBI NO: 34899886 NR Description: OJ1714_H10.26 [Oryza sativa (japonica
  misc_feature (1)..(300): Homolog of NCBI NO: 33146739 NR Description: GPI-anchored protein -like
  misc_feature (1)..(322): Homolog of NCBI NO: 30686588 NR Description: expressed protein [Arabidopsis thaliana]
  misc_feature (1)..(329): Homolog of NCBI NO: 25370583 NR Description: hypothetical protein At2g35860 [imported] -
  misc_feature (1)..(322): Homolog of NCBI NO: 15231197 NR Description: unknown protein; protein id: At3g52370.1
  misc_feature (1)..(320): Homolog of NCBI NO: 6041822 NR Description: unknown protein [Arabidopsis thaliana]
  misc_feature (1)..(322): Homolog of NCBI NO: 18399319 NR Description: expressed protein
  misc_feature (1)..(349): Homolog of NCBI NO: 15240029 NR Description: putative protein; protein id: At5g06390.1
MFHIIPNRVGSNQWPSEESGRVKHHTLGNDQVRLSNGQGKKMVDLAEIIRPDDLTRPDGLIHGIERLLIPRSVQEDFNRRRSLQSISAVLPEGAPEVDPRTNRLKKPAAPVPAGSPPALPIQSAMAPGPSLAPAPAPGPGGKQHHFDGEAQVKDFIHTLLHYGGYNEMADILVNLTSLATEMGRLVSEGYVLTVLAPNDEAMAKLTTDQLSEPGAPEQIVYYHIIPEYQTEESMYNSVRRFGKVKFDTLRFPHKVAAKEADGSVKFGDGEKSAYLFDPDIYTDGRISVQGIDGVLFPQEEEVVESVKKPVKKIVQPRRGTLLFLLHLIFYVCSSNCVLSIDFLRVAKFR

SEQ ID NO: 48418 - DNA, 2410 bp, Arabidopsis thaliana
  misc_feature (1)..(2410): Ceres Seq. ID no. 13579078
  misc_feature: MA Experiment ID: 20000307 Result: Up-regulated in Transcription
  misc_feature: MA Experiment 20000307 PARAMETER Experiment Name: At_Germinating_Seeds_Sub_P Parameter: Age (hr) Value: 24 vs. 0
  misc_feature: MA Experiment 20000307 PARAMETER Experiment Name: At_Germinating_Seeds_Sub_P Parameter: Organism Value: A. thaliana
  misc_feature: MA Experiment 20000307 PARAMETER Experiment Name: At_Germinating_Seeds_Sub_P Parameter: Plant Line Value: WS
  misc_feature: MA Experiment 20000307 PARAMETER Experiment Name: At_Germinating_Seeds_Sub_P Parameter: Tissue Value: Germinating Seeds
  misc_feature: MA Experiment ID: 20000314 Result: Up-regulated in Transcription
  misc_feature: MA Experiment 20000314 PARAMETER Experiment Name: At_14day_Shoots-Roots_Sub_P Parameter: Age (day) Value: 14
  misc_feature: MA Experiment 20000314 PARAMETER Experiment Name: At_14day_Shoots-Roots_Sub_P Parameter: Organism Value: A. thaliana
  misc_feature: MA Experiment 20000314 PARAMETER Experiment Name: At_14day_Shoots-Roots_Sub_P Parameter: Plant Line Value: WS
  misc_feature: MA Experiment 20000314 PARAMETER Experiment Name: At_14day_Shoots-Roots_Sub_P Parameter: Tissue Value: Roots vs. Whole Plant
  misc_feature: MA Experiment ID: 20000327 Result: Down-regulated in Transcription
  misc_feature: MA Experiment 20000327 PARAMETER Experiment Name: At_42deg_Heat_Sub_P Parameter: Age (day) Value: 14
  misc_feature: MA Experiment 20000327 PARAMETER Experiment Name: At_42deg_Heat_Sub_P Parameter: Organism Value: A. thaliana
  misc_feature: MA Experiment 20000327 PARAMETER Experiment Name: At_42deg_Heat_Sub_P Parameter: Plant Line Value: WS
  misc_feature: MA Experiment 20000327 PARAMETER Experiment Name: At_42deg_Heat_Sub_P Parameter: Temperature (deg C) Value: 42 vs. 22
  misc_feature: MA Experiment 20000327 PARAMETER Experiment Name: At_42deg_Heat_Sub_P Parameter: Timepoint (hr) Value: 1
  misc_feature: MA Experiment 20000327 PARAMETER Experiment Name: At_42deg_Heat_Sub_P Parameter: Tissue Value: Aerial
  misc_feature: MA Experiment ID: 20000328 Result: Down-regulated in Transcription
  misc_feature: MA Experiment 20000328 PARAMETER Experiment Name: At_42deg_Heat_Sub_P Parameter: Age (day) Value: 14
  misc_feature: MA Experiment 20000328 PARAMETER Experiment Name: At_42deg_Heat_Sub_P Parameter: Organism Value: A. thaliana
  misc_feature: MA Experiment 20000328 PARAMETER Experiment Name: At_42deg_Heat_Sub_P Parameter: Plant Line Value: WS
  misc_feature: MA Experiment 20000328 PARAMETER Experiment Name: At_42deg_Heat_Sub_P Parameter: Temperature (deg C) Value: 42 vs. 22
  misc_feature: MA Experiment 20000328 PARAMETER Experiment Name: At_42deg_Heat_Sub_P Parameter: Timepoint (hr) Value: 6
  misc_feature: MA Experiment 20000328 PARAMETER Experiment Name: At_42deg_Heat_Sub_P Parameter: Tissue Value: Aerial
ccacgcgtccgattctactaaagagtttgttgagcaatgaagggagcgactctcgttgctctcgccgccacaatcggcaatttcttacaaggatgggacaatgccaccattgctggagctatggtttatatcaacaaagacttgaatctaccaacctctgttcaaggtcttgtcgttgctatgtcattgatcggtgcaacggtcatcacgacttgctcaggaccgatatctgattggctcggcagacgccccatgctcattttatcatcagttatgtatttcgtctgcggtttgataatgttgtggtctcccaatgtctatgttctgtgctttgctaggcttcttaatgggtttggtgccgggctcgcggttacacttgtccctgtttacatttctgaaaccgctcctccggagatcagaggacagttaaatactctccctcagtttcttggctctggtggaatgtttttgtcatactgtatggttttcactatgtccctgagtgactcccctagctggagagccatgctcggtgtcctctcgatcccttctcttctttatttgtttctcacggtgttttatttgcccgagtctcctcgttggctggttagtaaaggaagaatggacgaggctaagcgagttcttcaacagttatgtggcagagaagatgttaccgatgagatggctttactagttgaaggactagatataggaggagaaaaaacaatggaagatctcttagtaactttggaggatcatgaaggtgatgatacacttgaaaccgttgatgaggatggacaaatgcggctttatggaacccacgagaatcaatcgtaccttgctagacctgtcccagaacaaaatagctcacttgggctacgctctcgccacggaagcttagcaaaccaaagcatgatccttaaagatccgctcgtcaatctttttggcagtctccacgagaagatgccagaagcaggcggaaacactcggagtgggattttccctcatttcggaagcatgttcagtactactgccgatgcgcctcacggtaaaccggctcattgggaaaaggacatagagagccattacaacaaagacaatgatgactatgcgactgatgatggtgcgggtgatgatgatgactcggacaacgatttgcgtagccccttaatgtcgcgccagaccacaagcatggacaaggatatgatcccacatcctacaagtggaagcactttaagcatgagacgacacagtacgcttatgcaaggcaacggcgaaagtagcatgggaattggtggtggttggcatatgggatatagatacgaaaacgatgaatacaagaggtattatcttaaagaagatggagctgaatctcgccgtggctcgatcatctctattcccggaggtccggatggtggaggcagctacattcacgcttctgcccttgtaagcagatctgttcttggtcctaaatcagttcatggatccgccatggttcccccggagaaaattgctgcctctggaccactctggtctgctcttcttgaacctggtgttaagcgtgccttggttgttggtgtcggcattcaaatactgcagcagttttcaggtatcaatggagttctctactacactcctcagattctcgaacgggctggcgtagatattcttctttcgagcctcggactaagttccatctctgcgtcattcctcatcagcggtttaacaacattactcatgctcccagccattgtcgttgccatgagactcatggatgtatccggaagaaggtcattacttctctggacaatcccagttctcattgtctcacttgtcgtccttgtcatcagcgagctcatccacatcagcaaagtcgtgaacgcagcactctccacaggttgtgtcgtgctctacttctgcttcttcgtgatgggttacggtcccattccaaacatcctctgttctgaaatcttcccaacaagagtccgtggtctctgcatcgccatatgtgctatggtcttttggattggagacattattgtcacgtactcacttcccgttctcctcagctcgatcggactagttggtgttttcagcatttacgctgcggtttgcgttatctcatggatcttcgtttacatgaaagtcccggagactaaaggcatgcctttggaagttatcacagactactttgcctttggagctcaagctcaagcttctgctccttctaaggatatataacttgtaactttcttcttcgtcaattgctctgtgtacctaaagattctcttcatccccnttttgttttgtttttcagatacccttcatatcgtttttgtttcttttgttttttttctttttcctttgtttcgttgtcaaaatcaatctaataagtactcaattttctctc

SEQ ID NO: 48419 - protein, 734 aa, Arabidopsis thaliana
  peptide (1)..(734): Ceres Seq. ID no. 13579079
  misc_feature (478)..(733): Homolog of NCBI NO: 34393630 NR Description: putative sorbitol transporter
  misc_feature (499)..(724): Homolog of NCBI NO: 22208506 NR Description: putative sugar transporter [Sorghum bicolor]
  misc_feature (1)..(225): Homolog of NCBI NO: 22208506 NR Description: putative sugar transporter [Sorghum bicolor]
  misc_feature (4)..(320): Homolog of NCBI NO: 6063538 NR Description: similar to sugar transporter protein. (AL022604)
  misc_feature (372)..(724): Homolog of NCBI NO: 6063538 NR Description: similar to sugar transporter protein. (AL022604)
  misc_feature (73)..(724): Homolog of NCBI NO: 26986188 NR Description: sugar transporter [Hordeum vulgare subsp. vulgare]
  misc_feature (1)..(731): Homolog of NCBI NO: 15230501 NR Description: sugar transporter family [Arabidopsis thaliana]
  misc_feature (3)..(724): Homolog of NCBI NO: 26986186 NR Description: hexose transporter [Hordeum vulgare subsp.
  misc_feature (1)..(728): Homolog of NCBI NO: 30690286 NR Description: transporter - related [Arabidopsis thaliana]
  misc_feature (1)..(728): Homolog of NCBI NO: 30690293 NR Description: transporter - related [Arabidopsis thaliana]
MKGATLVALAATIGNFLQGWDNATIAGAMVYINKDLNLPTSVQGLVVAMSLIGATVITTCSGPISDWLGRRPMLILSSVMYFVCGLIMLWSPNVYVLCFARLLNGFGAGLAVTLVPVYISETAPPEIRGQLNTLPQFLGSGGMFLSYCMVFTMSLSDSPSWRAMLGVLSIPSLLYLFLTVFYLPESPRWLVSKGRMDEAKRVLQQLCGREDVTDEMALLVEGLDIGGEKTMEDLLVTLEDHEGDDTLETVDEDGQMRLYGTHENQSYLARPVPEQNSSLGLRSRHGSLANQSMILKDPLVNLFGSLHEKMPEAGGNTRSGIFPHFGSMFSTTADAPHGKPAHWEKDIESHYNKDNDDYATDDGAGDDDDSDNDLRSPLMSRQTTSMDKDMIPHPTSGSTLSMRRHSTLMQGNGESSMGIGGGWHMGYRYENDEYKRYYLKEDGAESRRGSIISIPGGPDGGGSYIHASALVSRSVLGPKSVHGSAMVPPEKIAASGPLWSALLEPGVKRALVVGVGIQILQQFSGINGVLYYTPQILERAGVDILLSSLGLSSISASFLISGLTTLLMLPAIVVAMRLMDVSGRRSLLLWTIPVLIVSLVVLVISELIHISKVVNAALSTGCVVLYFCFFVMGYGPIPNILCSEIFPTRVRGLCIAICAMVFWIGDIIVTYSLPVLLSSIGLVGVFSIYAAVCVISWIFVYMKVPETKGMPLEVITDYFAFGAQAQASAPSKDI

SEQ ID NO: 48420 - protein, 706 aa, Arabidopsis thaliana
  peptide (1)..(706): Ceres Seq. ID no. 13579080
  misc_feature (450)..(705): Homolog of NCBI NO: 34393630 NR Description: putative sorbitol transporter
  misc_feature (471)..(696): Homolog of NCBI NO: 22208506 NR Description: putative sugar transporter [Sorghum bicolor]
  misc_feature (1)..(197): Homolog of NCBI NO: 22208506 NR Description: putative sugar transporter [Sorghum bicolor]
  misc_feature (1)..(292): Homolog of NCBI NO: 6063538 NR Description: similar to sugar transporter protein. (AL022604)
  misc_feature (344)..(696): Homolog of NCBI NO: 6063538 NR Description: similar to sugar transporter protein. (AL022604)
  misc_feature (45)..(696): Homolog of NCBI NO: 26986188 NR Description: sugar transporter [Hordeum vulgare subsp. vulgare]
  misc_feature (1)..(703): Homolog of NCBI NO: 15230501 NR Description: sugar transporter family [Arabidopsis thaliana]
  misc_feature (1)..(696): Homolog of NCBI NO: 26986186 NR Description: hexose transporter [Hordeum vulgare subsp.
  misc_feature (1)..(700): Homolog of NCBI NO: 30690286 NR Description: transporter - related [Arabidopsis thaliana]
  misc_feature (1)..(700): Homolog of NCBI NO: 30690293 NR Description: transporter - related [Arabidopsis thaliana]
MVYINKDLNLPTSVQGLVVAMSLIGATVITTCSGPISDWLGRRPMLILSSVMYFVCGLIMLWSPNVYVLCFARLLNGFGAGLAVTLVPVYISETAPPEIRGQLNTLPQFLGSGGMFLSYCMVFTMSLSDSPSWRAMLGVLSIPSLLYLFLTVFYLPESPRWLVSKGRMDEAKRVLQQLCGREDVTDEMALLVEGLDIGGEKTMEDLLVTLEDHEGDDTLETVDEDGQMRLYGTHENQSYLARPVPEQNSSLGLRSRHGSLANQSMILKDPLVNLFGSLHEKMPEAGGNTRSGIFPHFGSMFSTTADAPHGKPAHWEKDIESHYNKDNDDYATDDGAGDDDDSDNDLRSPLMSRQTTSMDKDMIPHPTSGSTLSMRRHSTLMQGNGESSMGIGGGWHMGYRYENDEYKRYYLKEDGAESRRGSIISIPGGPDGGGSYIHASALVSRSVLGPKSVHGSAMVPPEKIAASGPLWSALLEPGVKRALVVGVGIQILQQFSGINGVLYYTPQILERAGVDILLSSLGLSSISASFLISGLTTLLMLPAIVVAMRLMDVSGRRSLLLWTIPVLIVSLVVLVISELIHISKVVNAALSTGCVVLYFCFFVMGYGPIPNILCSEIFPTRVRGLCIAICAMVFWIGDIIVTYSLPVLLSSIGLVGVFSIYAAVCVISWIFVYMKVPETKGMPLEVITDYFAFGAQAQASAPSKDI

SEQ ID NO: 48421 - protein, 686 aa, Arabidopsis thaliana
  peptide (1)..(686): Ceres Seq. ID no. 13579081
  misc_feature (430)..(685): Homolog of NCBI NO: 34393630 NR Description: putative sorbitol transporter
  misc_feature (451)..(676): Homolog of NCBI NO: 22208506 NR Description: putative sugar transporter [Sorghum bicolor]
  misc_feature (1)..(177): Homolog of NCBI NO: 22208506 NR Description: putative sugar transporter [Sorghum bicolor]
  misc_feature (1)..(272): Homolog of NCBI NO: 6063538 NR Description: similar to sugar transporter protein. (AL022604)
  misc_feature (324)..(676): Homolog of NCBI NO: 6063538 NR Description: similar to sugar transporter protein. (AL022604)
  misc_feature (25)..(676): Homolog of NCBI NO: 26986188 NR Description: sugar transporter [Hordeum vulgare subsp. vulgare]
  misc_feature (1)..(683): Homolog of NCBI NO: 15230501 NR Description: sugar transporter family [Arabidopsis thaliana]
  misc_feature (1)..(676): Homolog of NCBI NO: 26986186 NR Description: hexose transporter [Hordeum vulgare subsp.
  misc_feature (1)..(680): Homolog of NCBI NO: 30690286 NR Description: transporter - related [Arabidopsis thaliana]
  misc_feature (1)..(680): Homolog of NCBI NO: 30690293 NR Description: transporter - related [Arabidopsis thaliana]
MSLIGATVITTCSGPISDWLGRRPMLILSSVMYFVCGLIMLWSPNVYVLCFARLLNGFGAGLAVTLVPVYISETAPPEIRGQLNTLPQFLGSGGMFLSYCMVFTMSLSDSPSWRAMLGVLSIPSLLYLFLTVFYLPESPRWLVSKGRMDEAKRVLQQLCGREDVTDEMALLVEGLDIGGEKTMEDLLVTLEDHEGDDTLETVDEDGQMRLYGTHENQSYLARPVPEQNSSLGLRSRHGSLANQSMILKDPLVNLFGSLHEKMPEAGGNTRSGIFPHFGSMFSTTADAPHGKPAHWEKDIESHYNKDNDDYATDDGAGDDDDSDNDLRSPLMSRQTTSMDKDMIPHPTSGSTLSMRRHSTLMQGNGESSMGIGGGWHMGYRYENDEYKRYYLKEDGAESRRGSIISIPGGPDGGGSYIHASALVSRSVLGPKSVHGSAMVPPEKIAASGPLWSALLEPGVKRALVVGVGIQILQQFSGINGVLYYTPQILERAGVDILLSSLGLSSISASFLISGLTTLLMLPAIVVAMRLMDVSGRRSLLLWTIPVLIVSLVVLVISELIHISKVVNAALSTGCVVLYFCFFVMGYGPIPNILCSEIFPTRVRGLCIAICAMVFWIGDIIVTYSLPVLLSSIGLVGVFSIYAAVCVISWIFVYMKVPETKGMPLEVITDYFAFGAQAQASAPSKDI

SEQ ID NO: 48422 - DNA, 1934 bp, Arabidopsis thaliana
  misc_feature (1)..(1934): Ceres Seq. ID no. 12574577
  misc_feature: MA Experiment ID: 20000185 Result: Up-regulated in Transcription
  misc_feature: MA Experiment 20000185 PARAMETER Experiment Name: At_Roots__P Parameter: Age (day) Value: 7 vs. 21
  misc_feature: MA Experiment 20000185 PARAMETER Experiment Name: At_Roots__P Parameter: Organism Value: A. thaliana
  misc_feature: MA Experiment 20000185 PARAMETER Experiment Name: At_Roots__P Parameter: Tissue Value: Roots vs. Whole Plant
  misc_feature: MA Experiment ID: 20000264 Result: Up-regulated in Transcription
  misc_feature: MA Experiment 20000264 PARAMETER Experiment Name: At_Open_Flower_P Parameter: Age (day) Value: 21
  misc_feature: MA Experiment 20000264 PARAMETER Experiment Name: At_Open_Flower_P Parameter: Plant Line Value: WS
  misc_feature: MA Experiment 20000264 PARAMETER Experiment Name: At_Open_Flower_P Parameter: Tissue Value: Open Flower vs. Whole Plant
  misc_feature: MA Experiment ID: 20000265 Result: Up-regulated in Transcription
  misc_feature: MA Experiment 20000265 PARAMETER Experiment Name: At_Open_Flower_P Parameter: Age (day) Value: 21
  misc_feature: MA Experiment 20000265 PARAMETER Experiment Name: At_Open_Flower_P Parameter: Plant Line Value: WS
  misc_feature: MA Experiment 20000265 PARAMETER Experiment Name: At_Open_Flower_P Parameter: Tissue Value: Closed Flower vs. Whole Plant
  misc_feature: MA Experiment ID: 20000439 Result: Up-regulated in Transcription
  misc_feature: MA Experiment 20000439 PARAMETER Experiment Name: At_Roots__P Parameter: Age (day) Value: 14 vs. 21
  misc_feature: MA Experiment 20000439 PARAMETER Experiment Name: At_Roots__P Parameter: Organism Value: A. thaliana
  misc_feature: MA Experiment 20000439 PARAMETER Experiment Name: At_Roots__P Parameter: Tissue Value: Roots vs. Whole Plant
  misc_feature: MA Experiment ID: 20000495 Result: Up-regulated in Transcription
  misc_feature: MA Experiment 20000495 PARAMETER Experiment Name: At_Guard_Cells_P Parameter: Harvest Date Value: 8/2/2002
  misc_feature: MA Experiment 20000495 PARAMETER Experiment Name: At_Guard_Cells_P Parameter: Organism Value: A. thaliana
  misc_feature: MA Experiment 20000495 PARAMETER Experiment Name: At_Guard_Cells_P Parameter: Tissue Value: Guard Cells vs. Leaves
ctgattctcctgctccttcgtcttcttcatcttcctctgagaaatcaaaaactcgatcgatcaattcgttgttcgtctacatcgattccttcagaacctagtgatcctctgttttggttgattcgattaagctaaccatgtcttacaaaccaagcgcgaagactgaggttcgccggaacaggtataaagtatctgtggacgccgatgaaggtcgccggagacgggaggataacatggtggagatccggaagaacaagagagaggagaacttgcagaagaagcggcgtgaaggttttaatccttccatggcgtcacagccagggcaggatttctcctcgtctctccctacggaaacgagattggagaatatacaacagatgattgctggagtaatgtcagaggatagagacttacaattggaggcgacggctagcttcaggagattgctttcaattgagcgaaatcctccaatcaatgaagttgttcaatctggtgttgttcctcacattgtgcaatttctttccagggatgacttcactcaacttcagtttgaggcagcttgggcgcttaccaatatcgcttcagggacatctgagaacactagggtcattattgatagtggtgctgtccctttattcgtcaaacttcttagttctgcaagtgaggaagttcgagaacaggctgtatgggcattgggaaacgttgctggtgactcgccaaaatgtcgtgatcatgtcctaagttgtgaggctatgatgtctcttctggctcaattccatgagcattcaaagctctccatgctgaggaatgctacatggacattatcaaatttctgcagagggaagccgcagcctgcatttgaacagacaaaagcagctttaccagctcttgagcgccttctgcattcaaccgacgaagaagttctcacagatgcatcctgggctctctcatatctctctgatggtacaaacgagaaaatacaaactgttatcgacgctggtgtcatccctcgccttgttcagctcttggctcatccatcgccctcagttctgattccagctctccgtacaattggtaacattgtaaccggagatgatattcagactcaggcggttattagcagtcaagcgcttcctggtctgttaaaccttttgaagaacacatacaagaagagtatcaagaaggaagcttgctggactatctctaacattacagctgggaacacaagtcaaattcaagaagtgtttcaggcaggcattattcggcctctgattaacctgcttgagatcggtgaattcgaaattaagaaagaagctgtttgggcaatctctaatgcaacttctggtggcaatcatgaccaaatcaagtttctcgtgagccaaggctgcatcagacccctgtgtgatctcctaccgtgtcccgatccaagggttgtcacagtgactttggaaggtctagaaaacattctcaaagtaggtgaagccgagaagaatctaggcaacacaggaaacgataatctgtacgcgcagatgattgaagacgcagatggtttggacaagattgagaatcttcagagtcacgataataatgagatttatgagaaagcagtcaaaatcctggagtcgtattgggctgcagatgacgaggaggaagatattggcggtgtggatgctcctgagaatgttcagtcttccggtttccaattcggaaaccaaagtggtaatgctcctacgggtggattcaactttggttgaaggtttctgtagtattctctcagttgcttgaacttaagaacaaaggtcgctcgttgtcttttctaaaaacagtttaggtttttttttctcttttttgggtcatgttttgagtgaattttgtatttttagaagtttggatattttgttctctcgcgtttaaggcggaaattaaagtgtttc

SEQ ID NO: 48423 - protein, 538 aa, Arabidopsis thaliana
  peptide (1)..(538): Ceres Seq. ID no. 12574578
  misc_feature (4)..(99): Pfam Name: Importin beta binding domain Pfam Description: Importin beta binding domain
  misc_feature (1)..(537): Homolog of NCBI NO: 3915737 NR Description: Importin alpha subunit (Karyopherin alpha
  misc_feature (1)..(538): Homolog of NCBI NO: 13752562 NR Description: importin alpha 2 [Capsicum annuum]
  misc_feature (1)..(537): Homolog of NCBI NO: 13699777 NR Description: AtKAP alpha [Arabidopsis thaliana]
  misc_feature (1)..(537): Homolog of NCBI NO: 15809794 NR Description: AT3g06720/F3E22_14 [Arabidopsis thaliana]
  misc_feature (1)..(537): Homolog of NCBI NO: 25314876 NR Description: probable nuclear transport factor importin
  misc_feature (1)..(537): Homolog of NCBI NO: 15230778 NR Description: importin alpha
  misc_feature (1)..(537): Homolog of NCBI NO: 25314872 NR Description: probable nuclear transport factor importin alpha
  misc_feature (1)..(537): Homolog of NCBI NO: 2154717 NR Description: Kap alpha protein [Arabidopsis thaliana]
  misc_feature (1)..(537): Homolog of NCBI NO: 15235257 NR Description: AtKAP alpha
  misc_feature (1)..(538): Homolog of NCBI NO: 15217828 NR Description: importin alpha, putative
MSYKPSAKTEVRRNRYKVSVDADEGRRRREDNMVEIRKNKREENLQKKRREGFNPSMASQPGQDFSSSLPTETRLENIQQMIAGVMSEDRDLQLEATASFRRLLSIERNPPINEVVQSGVVPHIVQFLSRDDFTQLQFEAAWALTNIASGTSENTRVIIDSGAVPLFVKLLSSASEEVREQAVWALGNVAGDSPKCRDHVLSCEAMMSLLAQFHEHSKLSMLRNATWTLSNFCRGKPQPAFEQTKAALPALERLLHSTDEEVLTDASWALSYLSDGTNEKIQTVIDAGVIPRLVQLLAHPSPSVLIPALRTIGNIVTGDDIQTQAVISSQALPGLLNLLKNTYKKSIKKEACWTISNITAGNTSQIQEVFQAGIIRPLINLLEIGEFEIKKEAVWAISNATSGGNHDQIKFLVSQGCIRPLCDLLPCPDPRVVTVTLEGLENILKVGEAEKNLGNTGNDNLYAQMIEDADGLDKIENLQSHDNNEIYEKAVKILESYWAADDEEEDIGGVDAPENVQSSGFQFGNQSGNAPTGGFNFG

SEQ ID NO: 48424 - protein, 506 aa, Arabidopsis thaliana
  peptide (1)..(506): Ceres Seq. ID no. 12574579
  misc_feature (1)..(67): Pfam Name: Importin beta binding domain Pfam Description: Importin beta binding domain
  misc_feature (1)..(505): Homolog of NCBI NO: 3915737 NR Description: Importin alpha subunit (Karyopherin alpha
  misc_feature (1)..(506): Homolog of NCBI NO: 13752562 NR Description: importin alpha 2 [Capsicum annuum]
  misc_feature (1)..(505): Homolog of NCBI NO: 13699777 NR Description: AtKAP alpha [Arabidopsis thaliana]
  misc_feature (1)..(505): Homolog of NCBI NO: 15809794 NR Description: AT3g06720/F3E22_14 [Arabidopsis thaliana]
  misc_feature (1)..(505): Homolog of NCBI NO: 25314876 NR Description: probable nuclear transport factor importin
  misc_feature (1)..(505): Homolog of NCBI NO: 15230778 NR Description: importin alpha
  misc_feature (1)..(505): Homolog of NCBI NO: 25314872 NR Description: probable nuclear transport factor importin alpha
  misc_feature (1)..(505): Homolog of NCBI NO: 2154717 NR Description: Kap alpha protein [Arabidopsis thaliana]
  misc_feature (1)..(505): Homolog of NCBI NO: 15235257 NR Description: AtKAP alpha
  misc_feature (1)..(506): Homolog of NCBI NO: 15217828 NR Description: importin alpha, putative
MVEIRKNKREENLQKKRREGFNPSMASQPGQDFSSSLPTETRLENIQQMIAGVMSEDRDLQLEATASFRRLLSIERNPPINEVVQSGVVPHIVQFLSRDDFTQLQFEAAWALTNIASGTSENTRVIIDSGAVPLFVKLLSSASEEVREQAVWALGNVAGDSPKCRDHVLSCEAMMSLLAQFHEHSKLSMLRNATWTLSNFCRGKPQPAFEQTKAALPALERLLHSTDEEVLTDASWALSYLSDGTNEKIQTVIDAGVIPRLVQLLAHPSPSVLIPALRTIGNIVTGDDIQTQAVISSQALPGLLNLLKNTYKKSIKKEACWTISNITAGNTSQIQEVFQAGIIRPLINLLEIGEFEIKKEAVWAISNATSGGNHDQIKFLVSQGCIRPLCDLLPCPDPRVVTVTLEGLENILKVGEAEKNLGNTGNDNLYAQMIEDADGLDKIENLQSHDNNEIYEKAVKILESYWAADDEEEDIGGVDAPENVQSSGFQFGNQSGNAPTGGFNFG

SEQ ID NO: 48425 - protein, 482 aa, Arabidopsis thaliana
  peptide (1)..(482): Ceres Seq. ID no. 12574580
  misc_feature (137)..(178): Pfam Name: Armadillo/beta-catenin-like repeat Pfam Description: Armadillo/beta-catenin-like repeat
  misc_feature (1)..(481): Homolog of NCBI NO: 3915737 NR Description: Importin alpha subunit (Karyopherin alpha
  misc_feature (1)..(482): Homolog of NCBI NO: 13752562 NR Description: importin alpha 2 [Capsicum annuum]
  misc_feature (1)..(481): Homolog of NCBI NO: 13699777 NR Description: AtKAP alpha [Arabidopsis thaliana]
  misc_feature (1)..(481): Homolog of NCBI NO: 15809794 NR Description: AT3g06720/F3E22_14 [Arabidopsis thaliana]
  misc_feature (1)..(481): Homolog of NCBI NO: 25314876 NR Description: probable nuclear transport factor importin
  misc_feature (1)..(481): Homolog of NCBI NO: 15230778 NR Description: importin alpha
  misc_feature (1)..(481): Homolog of NCBI NO: 25314872 NR Description: probable nuclear transport factor importin alpha
  misc_feature (1)..(481): Homolog of NCBI NO: 2154717 NR Description: Kap alpha protein [Arabidopsis thaliana]
  misc_feature (1)..(481): Homolog of NCBI NO: 15235257 NR Description: AtKAP alpha
  misc_feature (1)..(482): Homolog of NCBI NO: 15217828 NR Description: importin alpha, putative
MASQPGQDFSSSLPTETRLENIQQMIAGVMSEDRDLQLEATASFRRLLSIERNPPINEVVQSGVVPHIVQFLSRDDFTQLQFEAAWALTNIASGTSENTRVIIDSGAVPLFVKLLSSASEEVREQAVWALGNVAGDSPKCRDHVLSCEAMMSLLAQFHEHSKLSMLRNATWTLSNFCRGKPQPAFEQTKAALPALERLLHSTDEEVLTDASWALSYLSDGTNEKIQTVIDAGVIPRLVQLLAHPSPSVLIPALRTIGNIVTGDDIQTQAVISSQALPGLLNLLKNTYKKSIKKEACWTISNITAGNTSQIQEVFQAGIIRPLINLLEIGEFEIKKEAVWAISNATSGGNHDQIKFLVSQGCIRPLCDLLPCPDPRVVTVTLEGLENILKVGEAEKNLGNTGNDNLYAQMIEDADGLDKIENLQSHDNNEIYEKAVKILESYWAADDEEEDIGGVDAPENVQSSGFQFGNQSGNAPTGGFNFG

SEQ ID NO: 48426 - DNA, 1414 bp, Arabidopsis thaliana
  misc_feature (1)..(1414): Ceres Seq. ID no. 15168631
  misc_feature: MA Experiment ID: 20000214 Result: Down-regulated in Transcription
  misc_feature: MA Experiment 20000214 PARAMETER Experiment Name: At_4deg_Cold_P Parameter: Timepoint (hr) Value: 6
ggccatttcctatttctcccttcgtctccatcaagcaaccctctctctctctctctctctctatcatcatcatcgcagaggagacgatcttacgcgacgaatccttgagagattgagagggacaagcgagttttgacccaaggattgttgacggtctatattgaacaagtaaacaaggatgcgtaagtggatctgttgtacatgtcaaatagaagactcaaatgaagagcaacaactgaaaagttcacagcagcaatctgatgcaaatcataagaattcaaaaccagcacctgttgcaaaacatgaggttaagaaggaagctcttcccatcgaggtccctcccttgtctttggatgaggtcaaggaaaagactgaaaattttggatccaaggcactgattggtgaagggtcttatgggagagtatattatgcgacactaaatgatggtgtggcggttgctctgaagaaacttgatgtcgcacctgaagctgaaacagataccgaattcttgagtcaggtttccatggtctctaggctgaagcatgaaaatctcattcaattgcttggattttgtgttgatggaaacctccgcgtccttgcatatgagtttgcaacaatgggatcgttgcatgacatcttgcatggtaggaagggagttcaaggagcacaaccaggtccaacacttgactggataatgagggtgaagatagcggttgaggcagctaggggtttggaatacctcccatgagaagtctcagcctcctgtaatccatagggacataagatctagcaatgtccttctttttgaagactacaaagcaaagattgctgatttcaatctctcgaatcaagcacctgataatgctgcccgtcttcactcaacaagagtcttggggacttttggttatcatgctccagaatatgcaatgactggacagttaactcagaagagtgatgtgtacagctttggtgttgtacttctagaacttcttacagggaggaaaccggtggatcataccatgcctagaggtcaacagagtcttgtaacctgggcgacaccaagactcagtgaagataaagtgaaacagtgcattgatccaaagctaaaagccgattaccctccaaaagcagttgctaagctagcagcggtggcagcattgtgtgtgcaatacgaagctgagtttagaccaaatatgagcatagttgtgaaggcgctacagcctctcctgaaacctccagcagcagctccagcaccagaatattgaaacttttaaatcttttttttcgctgcaactatcagaaagaatctacatagtaccatttgccataaatgataatgaggttggttttgagagtgataactactattattaaaagatgatattatgtttcatttgatgatttgattttgcac

SEQ ID NO: 48427 - protein, 189 aa, Arabidopsis thaliana
  peptide (1)..(189): Ceres Seq. ID no. 15168632
  misc_feature (1)..(188): Homolog of NCBI NO: 15224557 NR Description: serine/threonine protein kinase, putative
  misc_feature (17)..(188): Homolog of NCBI NO: 25287624 NR Description: probable protein kinase [imported] - Arabidopsis
  misc_feature (1)..(188): Homolog of NCBI NO: 13877995 NR Description: putative protein kinase interactor [Arabidopsis
  misc_feature (1)..(188): Homolog of NCBI NO: 15222170 NR Description: serine/threonine protein kinase, putative
MRKWICCTCQIEDSNEEQQLKSSQQQSDANHKNSKPAPVAKHEVKKEALPIEVPPLSLDEVKEKTENFGSKALIGEGSYGRVYYATLNDGVAVALKKLDVAPEAETDTEFLSQVSMVSRLKHENLIQLLGFCVDGNLRVLAYEFATMGSLHDILHGRKGVQGAQPGPTLDWIMRVKIAVEAARGLEYLP

SEQ ID NO: 48428 - protein, 112 aa, Arabidopsis thaliana
  peptide (1)..(112): Ceres Seq. ID no. 15168633
  misc_feature (1)..(110): Homolog of NCBI NO: 15224557 NR Description: serine/threonine protein kinase, putative
  misc_feature (1)..(111): Homolog of NCBI NO: 25287624 NR Description: probable protein kinase [imported] - Arabidopsis
  misc_feature (1)..(111): Homolog of NCBI NO: 13877995 NR Description: putative protein kinase interactor [Arabidopsis
  misc_feature (1)..(111): Homolog of NCBI NO: 15222170 NR Description: serine/threonine protein kinase, putative
MTGQLTQKSDVYSFGVVLLELLTGRKPVDHTMPRGQQSLVTWATPRLSEDKVKQCIDPKLKADYPPKAVAKLAAVAALCVQYEAEFRPNMSIVVKALQPLLKPPAAAPAPEY

SEQ ID NO: 48429 - DNA, 2211 bp, Arabidopsis thaliana
  misc_feature (1)..(2211): Ceres Seq. ID no. 12601185
  misc_feature: MA Experiment ID: 20000286 Result: Up-regulated in Transcription
  misc_feature: MA Experiment 20000286 PARAMETER Experiment Name: At_Open_Flower_P Parameter: Age (day) Value: 21
  misc_feature: MA Experiment 20000286 PARAMETER Experiment Name: At_Open_Flower_P Parameter: Plant Line Value: WS
  misc_feature: MA Experiment 20000286 PARAMETER Experiment Name: At_Open_Flower_P Parameter: Tissue Value: Half Open vs. Whole Plant
cgtcttcttcaccatttcgaaaaatctcaaaactttacagagagaaagagagatcctttacatatacttcactgtcttcttgaaaaccctaatcctccgatctgtttaacctccgatcaagagagatttcttcagcttgtgtgtatcagattcctttggattccccgattcttcgtcgtatcgaatcgggggatggcatttccgtgaaatcagtgatgaaattggaggtgagaagaagttatttctatctatgggcgtagtagctgaggtttggaggtcgagcgtgaggctattaacgaactcgcctcagcttaacggtggctctcacaagagtgcgttatggaagtggcgatttttctctgctcagcccaaaagaaccgtaatgtggacatgggtttgtggtttcatgcttttctctttaggagtcatctcacttttcactggtcacgttgtctcgcaccttgagtggtattctcagcaattaagcaaacggagcttactggatatgagccgtcgagaaccaattgatgtatggaagtcaaaatattcgaagtttttctatggatgcagtgagagaggaaggaacttccttcctgctgtccaggagcagtcatctaatggatatttgcttattgcagctagtggaggccttaaccaacaaagaacaggaataactgatgcagtggttgttgcacggattcttaatgctactttagttgtacccgagttggatcaccattcttactggaaagatgacagtgacttcagtgacatttttgatgttaactggttcatatcttctctcgccaaagatgtgactatagtaaagagagttcccgacagagtcatgcgtgcgatggagaaacctccttataccacacgtgtgcctcgaaagtctactcttgagtattatcttgaccaagtattgccaattctcacgaggagacatgttttacaattgacaaagtttgactacagactagcaaatgatctagatgaagacatgcaaaagttgcgctgcagggtcaactatcatgctttaagattcacaaagcggatacaatcagttgggatgaaagtggtcaagaggatgagaaagatggccaaacgttttattgctgtccatttgagatttgagcctgacatgctagccttttctggttgtgactttggtgggggtgaaaaagagagagctgagctagcagaaataagaaaacgatgggacacattgcctgatctggaccctcttgaagaaagaaagcgtgggaaatgccctcttacacctcatgaagtgggcttaatgctgcgcgctcttggttttacaaacgacacatatatctatgtcgcatctggagaaatatatggtggtgaaaagacactgaaaccactgagagagctgtttccaaacttttacaccaaggaaatgcttgccaacgatgagctcaagcctctgcttccctattcttcacgccttgctgccattgactacattgttagtgacgaaagcgatgtgtttatcactaataataatggaaatatggccaagattcttgcaggccgaaggaggtacatgggtcacaagaggaccatcaggccaaatgcaaagaagctcagtgcattgttcatggaccgggaaaagatggagtggcaaactttcgccaaaaaagtgaaatcttgtcaacgtggattcatgggtgatccagatgagttcaaaccaggacgcggtgaattccacgagtacccgcaatcttgcatttgtcagagacccttctcttacgacaaaacctcaacggatgatgaagaagaagacatgtcagaagagaaccacaacagcaccagccctggacatgtacatttgtcttcagcagacaatgagcgcgacgaagttttccctgactagcaaattggttctgaggtcgctggagattttactgtaaccagctgttgtaaggagattgatcaatcacagtagatcgaggagaggaataggaggcttcccgcgtagctacttgttgcttcaagtgttcatagatacttctatcgaataggcatacataacccaagctctctctttgtttctttctgattttgaaacaccaccaaaactctctcttgtcttgtacttgtcttatattattacctcatatctagtttttggttttcttttgtattcccttagatttcctgaaatgtataatcaagttttcatct

SEQ ID NO: 48430 - protein, 549 aa, Arabidopsis thaliana
  peptide (1)..(549): Ceres Seq. ID no. 12601186
  misc_feature (127)..(469): Pfam Name: Plant protein family Pfam Description: Plant protein family
  misc_feature (89)..(538): Homolog of NCBI NO: 15233840 NR Description: putative growth regulator protein; protein id:
  misc_feature (52)..(546): Homolog of NCBI NO: 322752 NR Description: auxin-independent growth promoter - common
  misc_feature (89)..(545): Homolog of NCBI NO: 8886957 NR Description: F2D10.3 [Arabidopsis thaliana]
  misc_feature (89)..(545): Homolog of NCBI NO: 8778600 NR Description: F5M15.13 [Arabidopsis thaliana]
  misc_feature (89)..(549): Homolog of NCBI NO: 18411065 NR Description: putative auxin-independent growth promoter
  misc_feature (89)..(549): Homolog of NCBI NO: 25406439 NR Description: hypothetical protein F15M4.23 [imported] -
  misc_feature (93)..(505): Homolog of NCBI NO: 38345930 NR Description: OSJNBb0078D11.5 [Oryza sativa (japonica
  misc_feature (51)..(505): Homolog of NCBI NO: 38345464 NR Description: OSJNBa0010H02.2 [Oryza sativa (japonica
  misc_feature (108)..(534): Homolog of NCBI NO: 7488118 NR Description: probable growth regulator - Arabidopsis thaliana
  misc_feature (1)..(549): Homolog of NCBI NO: 22328730 NR Description: growth regulator like protein
MGVVAEVWRSSVRLLTNSPQLNGGSHKSALWKWRFFSAQPKRTVMWTWVCGFMLFSLGVISLFTGHVVSHLEWYSQQLSKRSLLDMSRREPIDVWKSKYSKFFYGCSERGRNFLPAVQEQSSNGYLLIAASGGLNQQRTGITDAVVVARILNATLVVPELDHHSYWKDDSDFSDIFDVNWFISSLAKDVTIVKRVPDRVMRAMEKPPYTTRVPRKSTLEYYLDQVLPILTRRHVLQLTKFDYRLANDLDEDMQKLRCRVNYHALRFTKRIQSVGMKVVKRMRKMAKRFIAVHLRFEPDMLAFSGCDFGGGEKERAELAEIRKRWDTLPDLDPLEERKRGKCPLTPHEVGLMLRALGFTNDTYIYVASGEIYGGEKTLKPLRELFPNFYTKEMLANDELKPLLPYSSRLAAIDYIVSDESDVFITNNNGNMAKILAGRRRYMGHKRTIRPNAKKLSALFMDREKMEWQTFAKKVKSCQRGFMGDPDEFKPGRGEFHEYPQSCICQRPFSYDKTSTDDEEEDMSEENHNSTSPGHVHLSSADNERDEVFPD

SEQ ID NO: 48431 - protein, 505 aa, Arabidopsis thaliana
  peptide (1)..(505): Ceres Seq. ID no. 12601187
  misc_feature (83)..(425): Pfam Name: Plant protein family Pfam Description: Plant protein family
  misc_feature (45)..(494): Homolog of NCBI NO: 15233840 NR Description: putative growth regulator protein; protein id:
  misc_feature (8)..(502): Homolog of NCBI NO: 322752 NR Description: auxin-independent growth promoter - common
  misc_feature (45)..(501): Homolog of NCBI NO: 8886957 NR Description: F2D10.3 [Arabidopsis thaliana]
  misc_feature (45)..(501): Homolog of NCBI NO: 8778600 NR Description: F5M15.13 [Arabidopsis thaliana]
  misc_feature (45)..(505): Homolog of NCBI NO: 18411065 NR Description: putative auxin-independent growth promoter
  misc_feature (45)..(505): Homolog of NCBI NO: 25406439 NR Description: hypothetical protein F15M4.23 [imported] -
  misc_feature (49)..(461): Homolog of NCBI NO: 38345930 NR Description: OSJNBb0078D11.5 [Oryza sativa (japonica
  misc_feature (7)..(461): Homolog of NCBI NO: 38345464 NR Description: OSJNBa0010H02.2 [Oryza sativa (japonica
  misc_feature (64)..(490): Homolog of NCBI NO: 7488118 NR Description: probable growth regulator - Arabidopsis thaliana
  misc_feature (1)..(505): Homolog of NCBI NO: 22328730 NR Description: growth regulator like protein
MWTWVCGFMLFSLGVISLFTGHVVSHLEWYSQQLSKRSLLDMSRREPIDVWKSKYSKFFYGCSERGRNFLPAVQEQSSNGYLLIAASGGLNQQRTGITDAVVVARILNATLVVPELDHHSYWKDDSDFSDIFDVNWFISSLAKDVTIVKRVPDRVMRAMEKPPYTTRVPRKSTLEYYLDQVLPILTRRHVLQLTKFDYRLANDLDEDMQKLRCRVNYHALRFTKRIQSVGMKVVKRMRKMAKRFIAVHLRFEPDMLAFSGCDFGGGEKERAELAEIRKRWDTLPDLDPLEERKRGKCPLTPHEVGLMLRALGFTNDTYIYVASGEIYGGEKTLKPLRELFPNFYTKEMLANDELKPLLPYSSRLAAIDYIVSDESDVFITNNNGNMAKILAGRRRYMGHKRTIRPNAKKLSALFMDREKMEWQTFAKKVKSCQRGFMGDPDEFKPGRGEFHEYPQSCICQRPFSYDKTSTDDEEEDMSEENHNSTSPGHVHLSSADNERDEVFPD

SEQ ID NO: 48432 - protein, 497 aa, Arabidopsis thaliana
  peptide (1)..(497): Ceres Seq. ID no. 12601188
  misc_feature (75)..(417): Pfam Name: Plant protein family Pfam Description: Plant protein family
  misc_feature (37)..(486): Homolog of NCBI NO: 15233840 NR Description: putative growth regulator protein; protein id:
  misc_feature (1)..(494): Homolog of NCBI NO: 322752 NR Description: auxin-independent growth promoter - common
  misc_feature (37)..(493): Homolog of NCBI NO: 8886957 NR Description: F2D10.3 [Arabidopsis thaliana]
  misc_feature (37)..(493): Homolog of NCBI NO: 8778600 NR Description: F5M15.13 [Arabidopsis thaliana]
  misc_feature (37)..(497): Homolog of NCBI NO: 18411065 NR Description: putative auxin-independent growth promoter
  misc_feature (37)..(497): Homolog of NCBI NO: 25406439 NR Description: hypothetical protein F15M4.23 [imported] -
  misc_feature (41)..(453): Homolog of NCBI NO: 38345930 NR Description: OSJNBb0078D11.5 [Oryza sativa (japonica
  misc_feature (1)..(453): Homolog of NCBI NO: 38345464 NR Description: OSJNBa0010H02.2 [Oryza sativa (japonica
  misc_feature (56)..(482): Homolog of NCBI NO: 7488118 NR Description: probable growth regulator - Arabidopsis thaliana
  misc_feature (1)..(497): Homolog of NCBI NO: 22328730 NR Description: growth regulator like protein
MLFSLGVISLFTGHVVSHLEWYSQQLSKRSLLDMSRREPIDVWKSKYSKFFYGCSERGRNFLPAVQEQSSNGYLLIAASGGLNQQRTGITDAVVVARILNATLVVPELDHHSYWKDDSDFSDIFDVNWFISSLAKDVTIVKRVPDRVMRAMEKPPYTTRVPRKSTLEYYLDQVLPILTRRHVLQLTKFDYRLANDLDEDMQKLRCRVNYHALRFTKRIQSVGMKVVKRMRKMAKRFIAVHLRFEPDMLAFSGCDFGGGEKERAELAEIRKRWDTLPDLDPLEERKRGKCPLTPHEVGLMLRALGFTNDTYIYVASGEIYGGEKTLKPLRELFPNFYTKEMLANDELKPLLPYSSRLAAIDYIVSDESDVFITNNNGNMAKILAGRRRYMGHKRTIRPNAKKLSALFMDREKMEWQTFAKKVKSCQRGFMGDPDEFKPGRGEFHEYPQSCICQRPFSYDKTSTDDEEEDMSEENHNSTSPGHVHLSSADNERDEVFPD

SEQ ID NO: 48433 - DNA, 2219 bp, Arabidopsis thaliana
  misc_feature (1)..(2219): Ceres Seq. ID no. 13591741
  misc_feature: MA Experiment ID: 20000173 Result: Down-regulated in Transcription
  misc_feature: MA Experiment 20000173 PARAMETER Experiment Name: At_42deg_Heat_P Parameter: Age (day) Value: 14
  misc_feature: MA Experiment 20000173 PARAMETER Experiment Name: At_42deg_Heat_P Parameter: Organism Value: A. thaliana
  misc_feature: MA Experiment 20000173 PARAMETER Experiment Name: At_42deg_Heat_P Parameter: Plant Line Value: WS
  misc_feature: MA Experiment 20000173 PARAMETER Experiment Name: At_42deg_Heat_P Parameter: Temperature (deg C) Value: 42 vs. 22
  misc_feature: MA Experiment 20000173 PARAMETER Experiment Name: At_42deg_Heat_P Parameter: Timepoint (hr) Value: 6
  misc_feature: MA Experiment 20000173 PARAMETER Experiment Name: At_42deg_Heat_P Parameter: Tissue Value: Aerial
  misc_feature: MA Experiment ID: 20000184 Result: Down-regulated in Transcription
  misc_feature: MA Experiment 20000184 PARAMETER Experiment Name: At_Shoots__P Parameter: Age (day) Value: 7
  misc_feature: MA Experiment 20000184 PARAMETER Experiment Name: At_Shoots__P Parameter: Tissue Value: Shoots vs. Whole Plant
aaaaacccaaaacaaaaaaaaaacacaaaggcacgacaaaaaaatgtcacaaatctccatttcttctcgtctctcttcgtattaaccaatttacccaatatttcgtgcccaattctcgggtcaaatccatctaaaagtttgtgcttttcgtattgggattagttcgatttctaaatctgatttagggttttaatcaatttggcaatcgggtctcttgcgatgaagttttcggagatttattgatttcatggtgggtttttgttttcgaaggtcgttgatgaagaattgacttctggaatctcaatctctgaagggtttttcgatgttaaatccgtgaatctgagttttaaatgctgaattggaaaacagatccaggggctaattaacgaaaaaaggaggtttctttttgatatcgatttttgggaattttgaggtttgagagagatcggagaagatggatctcgtgatcggtgggaaatttaagcttgggaagaaaattggtagtggatcatttggagagctttatctaggtgtaaatgtccaaacaggagaagaagttgctgtcaagctggaaaatgtgaagaccaaacatccacaacttcattatgagtcaaagttgtatatgctgcttcaaggaggatctggtattccgaacatcaagtggtttggagttgaaggtgactacagcgtaatggttattgaccttctaggtcctagtcttgaagacttgtttaactactgcaacagaaagttaacattgaaaactgttctcatgcttgccgaccaattacttaacagggttgagtttatgcatactcgaggtttccttcaccgtgatataaaacctgacaactttttaatgggccttggacgcaaagcaaatcaggtgtatatcattgattttggactagggaagaaatacagagaccttcagactcacaagcacattccttacagagaaaacaaaaatcttactgggacagctcggtatgcaagtgttaacactcaccttggagtcgaacaaagtcgaagggatgatttggaatcacttggttatgttcttatgtattttctcaaaggaagcttaccttggcagggattaaaagctgggacaaagaagcagaagtatgacagaatcagcgagaaaaaagtgtcaactcctatagaggtattgtgtaaaaaccaaccgtccgagttcgtttcatactttcattactgccgatctttacggtttgatgacaaacctgattactcttacctcaagaggcttttccgtgacttgtttatccgagaaggttatcaattcgattatgtatttgactggacagtcttaaagtatcctcaaatcggatccagctctggttctagttcacgaacaaggcatcatacaacagcgaaacccggattcaacgcagatcctattgaaagacaagagaggatcctaggaaaggaaacaacccgatataaaatcccaggtgcagtggaggcattctccagaagacacccgactacaacttcttcgcctcgagatcgttctagatcaagaaactcagacgacggacctttctctaagcagacacatggagactccgaaagagcaaacagttcctcaagatatagagcatcttcttctaggaaagccgttgctgcttcaagctcccggccaagttctgcaggtggaccaagcgaaagccgaacttcaagtcgtctggtttcctcaagcggtggtggtggcagcggcagtggaaatggccgtccctcaactagccagagagtgcaagctggatatgaatccaagactctgtctttctctcgtgcaacagcggcaagaaacactcgggaagatcaattaagaagcttcgagcttctctctcttcggaaataaaggaaaatgatggagagagagacagcaaactccatgaaaacccaaagaaattacctctgaagaaagatgagaatcttggtttgagggaattcatatatttgaacctgatgaaatcctcagatctttttacatgtaatttcagcttcagcttgcagagatctttttcactcgttttgtttatgtaatcgtgatatgtgttagacaaacataacaatcaaaaatgtagagagagtttccatgtaaaaacggtaaaatttctatccgtatattcgattacttcgaacctatctgtactggtactgtaataaacaaaacaatcaactgctctttggtc

SEQ ID NO: 48434 - protein, 476 aa, Arabidopsis thaliana
  peptide (1)..(476): Ceres Seq. ID no. 13591742
  misc_feature (1)..(456): Homolog of NCBI NO: 15236471 NR Description: casein kinase I (CKI1) [Arabidopsis thaliana]
  misc_feature (1)..(474): Homolog of NCBI NO: 27754653 NR Description: putative casein kinase I [Arabidopsis thaliana]
  misc_feature (1)..(474): Homolog of NCBI NO: 15219733 NR Description: casein kinase, putative [Arabidopsis thaliana]
  misc_feature (1)..(474): Homolog of NCBI NO: 15239840 NR Description: casein kinase I, putative [Arabidopsis thaliana]
  misc_feature (1)..(309): Homolog of NCBI NO: 1076386 NR Description: protein kinase ADK1 - Arabidopsis thaliana
  misc_feature (1)..(476): Homolog of NCBI NO: 21536851 NR Description: protein kinase ADK1-like protein [Arabidopsis
  misc_feature (1)..(476): Homolog of NCBI NO: 18417216 NR Description: casein kinase, putative [Arabidopsis thaliana]
  misc_feature (1)..(476): Homolog of NCBI NO: 30678728 NR Description: protein kinase (ADK1) [Arabidopsis thaliana]
  misc_feature (1)..(476): Homolog of NCBI NO: 18087640 NR Description: AT5g44100/MLN1_2 [Arabidopsis thaliana]
  misc_feature (1)..(476): Homolog of NCBI NO: 15240091 NR Description: casein kinase, putative [Arabidopsis thaliana]
MDLVIGGKFKLGKKIGSGSFGELYLGVNVQTGEEVAVKLENVKTKHPQLHYESKLYMLLQGGSGIPNIKWFGVEGDYSVMVIDLLGPSLEDLFNYCNRKLTLKTVLMLADQLLNRVEFMHTRGFLHRDIKPDNFLMGLGRKANQVYIIDFGLGKKYRDLQTHKHIPYRENKNLTGTARYASVNTHLGVEQSRRDDLESLGYVLMYFLKGSLPWQGLKAGTKKQKYDRISEKKVSTPIEVLCKNQPSEFVSYFHYCRSLRFDDKPDYSYLKRLFRDLFIREGYQFDYVFDWTVLKYPQIGSSSGSSSRTRHHTTAKPGFNADPIERQERILGKETTRYKIPGAVEAFSRRHPTTTSSPRDRSRSRNSDDGPFSKQTHGDSERANSSSRYRASSSRKAVAASSSRPSSAGGPSESRTSSRLVSSSGGGGSGSGNGRPSTSQRVQAGYESKTLSFSRATAARNTREDQLRSFELLSLRK

SEQ ID NO: 48435 - protein, 420 aa, Arabidopsis thaliana
  peptide (1)..(420): Ceres Seq. ID no. 13591743
  misc_feature (1)..(400): Homolog of NCBI NO: 15236471 NR Description: casein kinase I (CKI1) [Arabidopsis thaliana]
  misc_feature (1)..(418): Homolog of NCBI NO: 27754653 NR Description: putative casein kinase I [Arabidopsis thaliana]
  misc_feature (1)..(418): Homolog of NCBI NO: 15219733 NR Description: casein kinase, putative [Arabidopsis thaliana]
  misc_feature (1)..(418): Homolog of NCBI NO: 15239840 NR Description: casein kinase I, putative [Arabidopsis thaliana]
  misc_feature (1)..(253): Homolog of NCBI NO: 1076386 NR Description: protein kinase ADK1 - Arabidopsis thaliana
  misc_feature (1)..(420): Homolog of NCBI NO: 21536851 NR Description: protein kinase ADK1-like protein [Arabidopsis
  misc_feature (1)..(420): Homolog of NCBI NO: 18417216 NR Description: casein kinase, putative [Arabidopsis thaliana]
  misc_feature (1)..(420): Homolog of NCBI NO: 30678728 NR Description: protein kinase (ADK1) [Arabidopsis thaliana]
  misc_feature (1)..(420): Homolog of NCBI NO: 18087640 NR Description: AT5g44100/MLN1_2 [Arabidopsis thaliana]
  misc_feature (1)..(420): Homolog of NCBI NO: 15240091 NR Description: casein kinase, putative [Arabidopsis thaliana]
MLLQGGSGIPNIKWFGVEGDYSVMVIDLLGPSLEDLFNYCNRKLTLKTVLMLADQLLNRVEFMHTRGFLHRDIKPDNFLMGLGRKANQVYIIDFGLGKKYRDLQTHKHIPYRENKNLTGTARYASVNTHLGVEQSRRDDLESLGYVLMYFLKGSLPWQGLKAGTKKQKYDRISEKKVSTPIEVLCKNQPSEFVSYFHYCRSLRFDDKPDYSYLKRLFRDLFIREGYQFDYVFDWTVLKYPQIGSSSGSSSRTRHHTTAKPGFNADPIERQERILGKETTRYKIPGAVEAFSRRHPTTTSSPRDRSRSRNSDDGPFSKQTHGDSERANSSSRYRASSSRKAVAASSSRPSSAGGPSESRTSSRLVSSSGGGGSGSGNGRPSTSQRVQAGYESKTLSFSRATAARNTREDQLRSFELLSLRK

SEQ ID NO: 48436 - protein, 397 aa, Arabidopsis thaliana
  peptide (1)..(397): Ceres Seq. ID no. 13591744
  misc_feature (1)..(377): Homolog of NCBI NO: 15236471 NR Description: casein kinase I (CKI1) [Arabidopsis thaliana]
  misc_feature (1)..(395): Homolog of NCBI NO: 27754653 NR Description: putative casein kinase I [Arabidopsis thaliana]
  misc_feature (1)..(395): Homolog of NCBI NO: 15219733 NR Description: casein kinase, putative [Arabidopsis thaliana]
  misc_feature (1)..(395): Homolog of NCBI NO: 15239840 NR Description: casein kinase I, putative [Arabidopsis thaliana]
  misc_feature (1)..(230): Homolog of NCBI NO: 1076386 NR Description: protein kinase ADK1 - Arabidopsis thaliana
  misc_feature (1)..(397): Homolog of NCBI NO: 21536851 NR Description: protein kinase ADK1-like protein [Arabidopsis
  misc_feature (1)..(397): Homolog of NCBI NO: 18417216 NR Description: casein kinase, putative [Arabidopsis thaliana]
  misc_feature (1)..(397): Homolog of NCBI NO: 30678728 NR Description: protein kinase (ADK1) [Arabidopsis thaliana]
  misc_feature (1)..(397): Homolog of NCBI NO: 18087640 NR Description: AT5g44100/MLN1_2 [Arabidopsis thaliana]
  misc_feature (1)..(397): Homolog of NCBI NO: 15240091 NR Description: casein kinase, putative [Arabidopsis thaliana]
MVIDLLGPSLEDLFNYCNRKLTLKTVLMLADQLLNRVEFMHTRGFLHRDIKPDNFLMGLGRKANQVYIIDFGLGKKYRDLQTHKHIPYRENKNLTGTARYASVNTHLGVEQSRRDDLESLGYVLMYFLKGSLPWQGLKAGTKKQKYDRISEKKVSTPIEVLCKNQPSEFVSYFHYCRSLRFDDKPDYSYLKRLFRDLFIREGYQFDYVFDWTVLKYPQIGSSSGSSSRTRHHTTAKPGFNADPIERQERILGKETTRYKIPGAVEAFSRRHPTTTSSPRDRSRSRNSDDGPFSKQTHGDSERANSSSRYRASSSRKAVAASSSRPSSAGGPSESRTSSRLVSSSGGGGSGSGNGRPSTSQRVQAGYESKTLSFSRATAARNTREDQLRSFELLSLRK

SEQ ID NO: 48437 - DNA, 2452 bp, Arabidopsis thaliana
  misc_feature (1)..(2452): Ceres Seq. ID no. 12639042
  misc_feature: MA Experiment ID: 20000173 Result: Down-regulated in Transcription
  misc_feature: MA Experiment 20000173 PARAMETER Experiment Name: At_42deg_Heat_P Parameter: Age (day) Value: 14
  misc_feature: MA Experiment 20000173 PARAMETER Experiment Name: At_42deg_Heat_P Parameter: Organism Value: A. thaliana
  misc_feature: MA Experiment 20000173 PARAMETER Experiment Name: At_42deg_Heat_P Parameter: Plant Line Value: WS
  misc_feature: MA Experiment 20000173 PARAMETER Experiment Name: At_42deg_Heat_P Parameter: Temperature (deg C) Value: 42 vs. 22
  misc_feature: MA Experiment 20000173 PARAMETER Experiment Name: At_42deg_Heat_P Parameter: Timepoint (hr) Value: 6
  misc_feature: MA Experiment 20000173 PARAMETER Experiment Name: At_42deg_Heat_P Parameter: Tissue Value: Aerial
  misc_feature: MA Experiment ID: 20000180 Result: Down-regulated in Transcription
  misc_feature: MA Experiment 20000180 PARAMETER Experiment Name: At_Germinating_Seeds_P Parameter: Age (hr) Value: 24 vs. 0
  misc_feature: MA Experiment 20000180 PARAMETER Experiment Name: At_Germinating_Seeds_P Parameter: Tissue Value: Germinating Seeds
  misc_feature: MA Experiment ID: 20000182 Result: Up-regulated in Transcription
  misc_feature: MA Experiment 20000182 PARAMETER Experiment Name: At_2mM_SA_P Parameter: Age (day) Value: 14
  misc_feature: MA Experiment 20000182 PARAMETER Experiment Name: At_2mM_SA_P Parameter: Organism Value: A. thaliana
  misc_feature: MA Experiment 20000182 PARAMETER Experiment Name: At_2mM_SA_P Parameter: Plant Line Value: WS
  misc_feature: MA Experiment 20000182 PARAMETER Experiment Name: At_2mM_SA_P Parameter: Timepoint (hr) Value: 6
  misc_feature: MA Experiment 20000182 PARAMETER Experiment Name: At_2mM_SA_P Parameter: Tissue Value: Aerial
  misc_feature: MA Experiment 20000182 PARAMETER Experiment Name: At_2mM_SA_P Parameter: Treatment Value: 2mM SA vs. No Treatment
  misc_feature: MA Experiment ID: 20000184 Result: Down-regulated in Transcription
  misc_feature: MA Experiment 20000184 PARAMETER Experiment Name: At_Shoots__P Parameter: Age (day) Value: 7
  misc_feature: MA Experiment 20000184 PARAMETER Experiment Name: At_Shoots__P Parameter: Tissue Value: Shoots vs. Whole Plant
  misc_feature: MA Experiment ID: 20001451 Result: Down-regulated in Transcription
  misc_feature: MA Experiment 20001451 PARAMETER Experiment Name: At_Far-red-induction_P Parameter: Age (day) Value: 7
  misc_feature: MA Experiment 20001451 PARAMETER Experiment Name: At_Far-red-induction_P Parameter: Light Value: Far-red vs. White
  misc_feature: MA Experiment 20001451 PARAMETER Experiment Name: At_Far-red-induction_P Parameter: Organism Value: A. thaliana
  misc_feature: MA Experiment 20001451 PARAMETER Experiment Name: At_Far-red-induction_P Parameter: Plant Line Value: Columbia
  misc_feature: MA Experiment 20001451 PARAMETER Experiment Name: At_Far-red-induction_P Parameter: Timepoint (hr) Value: 24
  misc_feature: MA Experiment 20001451 PARAMETER Experiment Name: At_Far-red-induction_P Parameter: Tissue Value: Whole Plant
  misc_feature: MA Experiment ID: 20001560 Result: Down-regulated in Transcription
  misc_feature: MA Experiment 20001560 PARAMETER Experiment Name: At_Drought_Soil_Dry_P Parameter: Age (day) Value: 28
  misc_feature: MA Experiment 20001560 PARAMETER Experiment Name: At_Drought_Soil_Dry_P Parameter: Organism Value: A. thaliana
  misc_feature: MA Experiment 20001560 PARAMETER Experiment Name: At_Drought_Soil_Dry_P Parameter: Plant Line Value: WS
  misc_feature: MA Experiment 20001560 PARAMETER Experiment Name: At_Drought_Soil_Dry_P Parameter: Post Timepoint (hr) Value: None
  misc_feature: MA Experiment 20001560 PARAMETER Experiment Name: At_Drought_Soil_Dry_P Parameter: Post-Treatment Value: None
  misc_feature: MA Experiment 20001560 PARAMETER Experiment Name: At_Drought_Soil_Dry_P Parameter: Timepoint (day) Value: 14
  misc_feature: MA Experiment 20001560 PARAMETER Experiment Name: At_Drought_Soil_Dry_P Parameter: Treatment Value: Drought vs. No Drought
aactaaaaacgcgggtcttcttctccaaaacccatttcctcacaaaatccatctgagaaaaagagcaacaagtttcattttcatggtggtgatgacgaacaaattcttcgaattaatcggcggagctccgtcgtattcttcagtatccgtcgctgttaaaggatccgtcggtgacgccgtaggaggaactgctagtcgtcgtgctcttcgttggacaatcgaaaatttccttcctaaaatcgatagattagttcttgttcatgtcatgcctacagttactactattccatctccttctggatcgaagattccaatagaggaattggatgagagtgttgtgtctatgtataaacgagatttgagaaaagaatttgaacaagtttttgttccgtttaagaggatctgcaaatccaacaaagttgagactttgttgttggaacatcatgatcctgcaaaggctcttttgaagtatatgtcagatactgatgttgagtgtttagtgattggctcttgctcttctaatttcctcacaaggaaaaaaggacaagaaatgccattaacggtgctaggagaagctccagagacatgtgagatatatgttgtttgtaaagatagaatcttaaccaaatcgacgaatcagtttaccgcagattcatcatctagtttccgtataccagaaggagctgaagcttatacagaatctttcagtcgcacacgctctgataagacagggttgtctgcttcatctataacatcttcaggcaggatgagaattggaaggcctggctctttaccgcatagtcatccgacctctcgagtgtattctgatgcacagtcttcttcaactgatattgttttggtcgatgacgaacactgtcgttctatccttaggcatagtactgtttccactagtaaaatacagatggatcctagacctcacttaaaaacaccaaagtcaggtgtaagagctgaggtagagcagctaaggaaagaagtgcaaaccactctttccatgtacaaacaagcttgtgaagagctagttcataaacaaacacaggtccagtctctttcctctgagtgtatcaaagaaacagaaagggtcatcactgctctggaaaaagaagaaatgcgaaggaaagcagcagcagaagagaaagaaaagcatctaaaagctgtaaaagaagtcgaggaagcaaaatcaatgctagccaaagagttctgcgagaggcaattagccgagctagatgctctcaaacagtccatagagaaacagaaagtcattgagcaactcttcttgagagacgggcgatacagaaagtacacaaaagaagaaatagctgcagctacagataatttctcttcccgtaaaataatcggcgaaggaggatatggaaaagtatacaaatgcagtcttgatcataccccagtagctcttaaagttctcaaacctgattctgttgaaaagaaagaggaattcttgaaagagatctcagtcttaagccagcttcgtcatccccatgtggttcttctccttggtgcttgtcctgaaaatggatgccttgtctatgagtacatggaaaatggtagcttagattgtcacatctctcccaaaaaagggaaaccatctctctcatggtttatcagattccgaatcatctatgaaacagcttgtggtttagctttcctccacaactctaagcctgagcccatcgtccaccgtgacctcaaaccaggcaacattctcttagacagaaactttgtcagcaaaatcggtgacgttggactcgcaaaactcatgtcagacgaagcaccagacagtgtgacggtttacagaaactcgattatcgccggtacactctactacatggacccggaataccaacgaaccggcacaatcagaccgaaatcagatctttacgcatttggaatcataattctccagcttttaaccgctcgacatcccaacggtcttcttttctgcgttgaagatgcagtaaagagaggctgttttgaagatatgttagatggatcagtcaaagactggcccatagccgaagcgaaagaactagctcgcattgcaatcaggtgttcgcagctcaaatgcagagacagaccagatcttagcacacaagtcttgcctgctctcaaacgtattcttgaatctgcaaatagtagactcaagacagaacaagctaacgcacgagcaccaactcactattactgtccaattcttaaggaaataatggaagatccacaaatagcagcagatggattcacatacgaacgaaaagcgataaaagaatggattcaaaaacatcaagatgtgtctcctgttactaagcatcggctcaaacattctgatcttacaccgaaccacactctcagatcggctatacgagagtggcgatctcgttcacgcttagacctctccactactcttggctcctactga

SEQ ID NO: 48438 - protein, 816 aa, Arabidopsis thaliana
  peptide (1)..(816): Ceres Seq. ID no. 12639043
  misc_feature (734)..(806): Pfam Name: U-box domain Pfam Description: U-box domain
  misc_feature (734)..(806): Pfam Name: U-box domain Pfam Description: U-box domain
  misc_feature (324)..(804): Homolog of NCBI NO: 30697549 NR Description: protein kinase family [Arabidopsis thaliana]
  misc_feature (324)..(804): Homolog of NCBI NO: 9758471 NR Description: contains similarity to receptor-like protein
  misc_feature (54)..(206): Homolog of NCBI NO: 25518361 NR Description: hypothetical protein F17F16.3 [imported] -
  misc_feature (225)..(726): Homolog of NCBI NO: 25518361 NR Description: hypothetical protein F17F16.3 [imported] -
  misc_feature (43)..(223): Homolog of NCBI NO: 15224129 NR Description: putative protein kinase; protein id: At2g24370.1
  misc_feature (324)..(804): Homolog of NCBI NO: 30697549 NR Description: protein kinase family [Arabidopsis thaliana]
  misc_feature (54)..(206): Homolog of NCBI NO: 25518361 NR Description: hypothetical protein F17F16.3 [imported] -
  misc_feature (43)..(223): Homolog of NCBI NO: 15224129 NR Description: putative protein kinase; protein id: At2g24370.1
  misc_feature (48)..(806): Homolog of NCBI NO: 15224775 NR Description: putative protein kinase; protein id: At2g19410.1
  misc_feature (324)..(806): Homolog of NCBI NO: 15240280 NR Description: putative protein; protein id: At5g61550.1
  misc_feature (55)..(305): Homolog of NCBI NO: 15240280 NR Description: putative protein; protein id: At5g61550.1
  misc_feature (55)..(806): Homolog of NCBI NO: 37536860 NR Description: putative protein kinase [Oryza sativa (japonica
  misc_feature (217)..(718): Homolog of NCBI NO: 15224129 NR Description: putative protein kinase; protein id: At2g24370.1
  misc_feature (225)..(726): Homolog of NCBI NO: 25518361 NR Description: hypothetical protein F17F16.3 [imported] -
  misc_feature (324)..(804): Homolog of NCBI NO: 9758471 NR Description: contains similarity to receptor-like protein
  misc_feature (217)..(718): Homolog of NCBI NO: 15224129 NR Description: putative protein kinase; protein id: At2g24370.1
  misc_feature (55)..(806): Homolog of NCBI NO: 37536860 NR Description: putative protein kinase [Oryza sativa (japonica
  misc_feature (55)..(305): Homolog of NCBI NO: 15240280 NR Description: putative protein; protein id: At5g61550.1
  misc_feature (324)..(806): Homolog of NCBI NO: 15240280 NR Description: putative protein; protein id: At5g61550.1
  misc_feature (48)..(806): Homolog of NCBI NO: 15224775 NR Description: putative protein kinase; protein id: At2g19410.1
TKNAGLLLQNPFPHKIHLRKRATSFIFMVVMTNKFFELIGGAPSYSSVSVAVKGSVGDAVGGTASRRALRWTIENFLPKIDRLVLVHVMPTVTTIPSPSGSKIPIEELDESVVSMYKRDLRKEFEQVFVPFKRICKSNKVETLLLEHHDPAKALLKYMSDTDVECLVIGSCSSNFLTRKKGQEMPLTVLGEAPETCEIYVVCKDRILTKSTNQFTADSSSSFRIPEGAEAYTESFSRTRSDKTGLSASSITSSGRMRIGRPGSLPHSHPTSRVYSDAQSSSTDIVLVDDEHCRSILRHSTVSTSKIQMDPRPHLKTPKSGVRAEVEQLRKEVQTTLSMYKQACEELVHKQTQVQSLSSECIKETERVITALEKEEMRRKAAAEEKEKHLKAVKEVEEAKSMLAKEFCERQLAELDALKQSIEKQKVIEQLFLRDGRYRKYTKEEIAAATDNFSSRKIIGEGGYGKVYKCSLDHTPVALKVLKPDSVEKKEEFLKEISVLSQLRHPHVVLLLGACPENGCLVYEYMENGSLDCHISPKKGKPSLSWFIRFRIIYETACGLAFLHNSKPEPIVHRDLKPGNILLDRNFVSKIGDVGLAKLMSDEAPDSVTVYRNSIIAGTLYYMDPEYQRTGTIRPKSDLYAFGIIILQLLTARHPNGLLFCVEDAVKRGCFEDMLDGSVKDWPIAEAKELARIAIRCSQLKCRDRPDLSTQVLPALKRILESANSRLKTEQANARAPTHYYCPILKEIMEDPQIAADGFTYERKAIKEWIQKHQDVSPVTKHRLKHSDLTPNHTLRSAIREWRSRSRLDLSTTLGSY

SEQ ID NO: 48439 - protein, 789 aa, Arabidopsis thaliana
  peptide (1)..(789): Ceres Seq. ID no. 12639044
  misc_feature (707)..(779): Pfam Name: U-box domain Pfam Description: U-box domain
  misc_feature (707)..(779): Pfam Name: U-box domain Pfam Description: U-box domain
  misc_feature (297)..(777): Homolog of NCBI NO: 30697549 NR Description: protein kinase family [Arabidopsis thaliana]
  misc_feature (297)..(777): Homolog of NCBI NO: 9758471 NR Description: contains similarity to receptor-like protein
  misc_feature (27)..(179): Homolog of NCBI NO: 25518361 NR Description: hypothetical protein F17F16.3 [imported] -
  misc_feature (198)..(699): Homolog of NCBI NO: 25518361 NR Description: hypothetical protein F17F16.3 [imported] -
  misc_feature (16)..(196): Homolog of NCBI NO: 15224129 NR Description: putative protein kinase; protein id: At2g24370.1
  misc_feature (297)..(777): Homolog of NCBI NO: 30697549 NR Description: protein kinase family [Arabidopsis thaliana]
  misc_feature (27)..(179): Homolog of NCBI NO: 25518361 NR Description: hypothetical protein F17F16.3 [imported] -
  misc_feature (16)..(196): Homolog of NCBI NO: 15224129 NR Description: putative protein kinase; protein id: At2g24370.1
  misc_feature (21)..(779): Homolog of NCBI NO: 15224775 NR Description: putative protein kinase; protein id: At2g19410.1
  misc_feature (297)..(779): Homolog of NCBI NO: 15240280 NR Description: putative protein; protein id: At5g61550.1
  misc_feature (28)..(278): Homolog of NCBI NO: 15240280 NR Description: putative protein; protein id: At5g61550.1
  misc_feature (28)..(779): Homolog of NCBI NO: 37536860 NR Description: putative protein kinase [Oryza sativa (japonica
  misc_feature (190)..(691): Homolog of NCBI NO: 15224129 NR Description: putative protein kinase; protein id: At2g24370.1
  misc_feature (198)..(699): Homolog of NCBI NO: 25518361 NR Description: hypothetical protein F17F16.3 [imported] -
  misc_feature (297)..(777): Homolog of NCBI NO: 9758471 NR Description: contains similarity to receptor-like protein
  misc_feature (190)..(691): Homolog of NCBI NO: 15224129 NR Description: putative protein kinase; protein id: At2g24370.1
  misc_feature (28)..(779): Homolog of NCBI NO: 37536860 NR Description: putative protein kinase [Oryza sativa (japonica
  misc_feature (28)..(278): Homolog of NCBI NO: 15240280 NR Description: putative protein; protein id: At5g61550.1
  misc_feature (297)..(779): Homolog of NCBI NO: 15240280 NR Description: putative protein; protein id: At5g61550.1
  misc_feature (21)..(779): Homolog of NCBI NO: 15224775 NR Description: putative protein kinase; protein id: At2g19410.1
MVVMTNKFFELIGGAPSYSSVSVAVKGSVGDAVGGTASRRALRWTIENFLPKIDRLVLVHVMPTVTTIPSPSGSKIPIEELDESVVSMYKRDLRKEFEQVFVPFKRICKSNKVETLLLEHHDPAKALLKYMSDTDVECLVIGSCSSNFLTRKKGQEMPLTVLGEAPETCEIYVVCKDRILTKSTNQFTADSSSSFRIPEGAEAYTESFSRTRSDKTGLSASSITSSGRMRIGRPGSLPHSHPTSRVYSDAQSSSTDIVLVDDEHCRSILRHSTVSTSKIQMDPRPHLKTPKSGVRAEVEQLRKEVQTTLSMYKQACEELVHKQTQVQSLSSECIKETERVITALEKEEMRRKAAAEEKEKHLKAVKEVEEAKSMLAKEFCERQLAELDALKQSIEKQKVIEQLFLRDGRYRKYTKEEIAAATDNFSSRKIIGEGGYGKVYKCSLDHTPVALKVLKPDSVEKKEEFLKEISVLSQLRHPHVVLLLGACPENGCLVYEYMENGSLDCHISPKKGKPSLSWFIRFRIIYETACGLAFLHNSKPEPIVHRDLKPGNILLDRNFVSKIGDVGLAKLMSDEAPDSVTVYRNSIIAGTLYYMDPEYQRTGTIRPKSDLYAFGIIILQLLTARHPNGLLFCVEDAVKRGCFEDMLDGSVKDWPIAEAKELARIAIRCSQLKCRDRPDLSTQVLPALKRILESANSRLKTEQANARAPTHYYCPILKEIMEDPQIAADGFTYERKAIKEWIQKHQDVSPVTKHRLKHSDLTPNHTLRSAIREWRSRSRLDLSTTLGSY

SEQ ID NO: 48440 - protein, 786 aa, Arabidopsis thaliana
  peptide (1)..(786): Ceres Seq. ID no. 12639045
  misc_feature (704)..(776): Pfam Name: U-box domain Pfam Description: U-box domain
  misc_feature (704)..(776): Pfam Name: U-box domain Pfam Description: U-box domain
  misc_feature (294)..(774): Homolog of NCBI NO: 30697549 NR Description: protein kinase family [Arabidopsis thaliana]
  misc_feature (294)..(774): Homolog of NCBI NO: 9758471 NR Description: contains similarity to receptor-like protein
  misc_feature (24)..(176): Homolog of NCBI NO: 25518361 NR Description: hypothetical protein F17F16.3 [imported] -
  misc_feature (195)..(696): Homolog of NCBI NO: 25518361 NR Description: hypothetical protein F17F16.3 [imported] -
  misc_feature (13)..(193): Homolog of NCBI NO: 15224129 NR Description: putative protein kinase; protein id: At2g24370.1
  misc_feature (294)..(774): Homolog of NCBI NO: 30697549 NR Description: protein kinase family [Arabidopsis thaliana]
  misc_feature (24)..(176): Homolog of NCBI NO: 25518361 NR Description: hypothetical protein F17F16.3 [imported] -
  misc_feature (13)..(193): Homolog of NCBI NO: 15224129 NR Description: putative protein kinase; protein id: At2g24370.1
  misc_feature (18)..(776): Homolog of NCBI NO: 15224775 NR Description: putative protein kinase; protein id: At2g19410.1
  misc_feature (294)..(776): Homolog of NCBI NO: 15240280 NR Description: putative protein; protein id: At5g61550.1
  misc_feature (25)..(275): Homolog of NCBI NO: 15240280 NR Description: putative protein; protein id: At5g61550.1
  misc_feature (25)..(776): Homolog of NCBI NO: 37536860 NR Description: putative protein kinase [Oryza sativa (japonica
  misc_feature (187)..(688): Homolog of NCBI NO: 15224129 NR Description: putative protein kinase; protein id: At2g24370.1
  misc_feature (195)..(696): Homolog of NCBI NO: 25518361 NR Description: hypothetical protein F17F16.3 [imported] -
  misc_feature (294)..(774): Homolog of NCBI NO: 9758471 NR Description: contains similarity to receptor-like protein
  misc_feature (187)..(688): Homolog of NCBI NO: 15224129 NR Description: putative protein kinase; protein id: At2g24370.1
  misc_feature (25)..(776): Homolog of NCBI NO: 37536860 NR Description: putative protein kinase [Oryza sativa (japonica
  misc_feature (25)..(275): Homolog of NCBI NO: 15240280 NR Description: putative protein; protein id: At5g61550.1
  misc_feature (294)..(776): Homolog of NCBI NO: 15240280 NR Description: putative protein; protein id: At5g61550.1
  misc_feature (18)..(776): Homolog of NCBI NO: 15224775 NR Description: putative protein kinase; protein id: At2g19410.1
MTNKFFELIGGAPSYSSVSVAVKGSVGDAVGGTASRRALRWTIENFLPKIDRLVLVHVMPTVTTIPSPSGSKIPIEELDESVVSMYKRDLRKEFEQVFVPFKRICKSNKVETLLLEHHDPAKALLKYMSDTDVECLVIGSCSSNFLTRKKGQEMPLTVLGEAPETCEIYVVCKDRILTKSTNQFTADSSSSFRIPEGAEAYTESFSRTRSDKTGLSASSITSSGRMRIGRPGSLPHSHPTSRVYSDAQSSSTDIVLVDDEHCRSILRHSTVSTSKIQMDPRPHLKTPKSGVRAEVEQLRKEVQTTLSMYKQACEELVHKQTQVQSLSSECIKETERVITALEKEEMRRKAAAEEKEKHLKAVKEVEEAKSMLAKEFCERQLAELDALKQSIEKQKVIEQLFLRDGRYRKYTKEEIAAATDNFSSRKIIGEGGYGKVYKCSLDHTPVALKVLKPDSVEKKEEFLKEISVLSQLRHPHVVLLLGACPENGCLVYEYMENGSLDCHISPKKGKPSLSWFIRFRIIYETACGLAFLHNSKPEPIVHRDLKPGNILLDRNFVSKIGDVGLAKLMSDEAPDSVTVYRNSIIAGTLYYMDPEYQRTGTIRPKSDLYAFGIIILQLLTARHPNGLLFCVEDAVKRGCFEDMLDGSVKDWPIAEAKELARIAIRCSQLKCRDRPDLSTQVLPALKRILESANSRLKTEQANARAPTHYYCPILKEIMEDPQIAADGFTYERKAIKEWIQKHQDVSPVTKHRLKHSDLTPNHTLRSAIREWRSRSRLDLSTTLGSY

SEQ ID NO: 48441 - DNA, 2071 bp, Arabidopsis thaliana
  misc_feature (1)..(2071): Ceres Seq. ID no. 12600712
  misc_feature: MA Experiment ID: 20000185 Result: Down-regulated in Transcription
  misc_feature: MA Experiment 20000185 PARAMETER Experiment Name: At_Roots__P Parameter: Age (day) Value: 7 vs. 21
  misc_feature: MA Experiment 20000185 PARAMETER Experiment Name: At_Roots__P Parameter: Organism Value: A. thaliana
  misc_feature: MA Experiment 20000185 PARAMETER Experiment Name: At_Roots__P Parameter: Tissue Value: Roots vs. Whole Plant
  misc_feature: MA Experiment ID: 20000439 Result: Down-regulated in Transcription
  misc_feature: MA Experiment 20000439 PARAMETER Experiment Name: At_Roots__P Parameter: Age (day) Value: 14 vs. 21
  misc_feature: MA Experiment 20000439 PARAMETER Experiment Name: At_Roots__P Parameter: Organism Value: A. thaliana
  misc_feature: MA Experiment 20000439 PARAMETER Experiment Name: At_Roots__P Parameter: Tissue Value: Roots vs. Whole Plant
gttgcgacattcgtcgtatccattgcttagggagagaagagataatgctgagagcttcgctgctctgttcttcgacctcaatcactttcacaccaattcaactattcaatcccaatagttcccatcgtttcccaagattcgaactatctcgtcctgtctcggctttgtctcgtaccaaatgtcacttgagtctcctgagagctcgtgggaaatccagcttcctcactcgcagcaccgctactgatgaagctgttgaaactagtagtaacagtggattggatttggttgaggttggattcttgtctggtgttcatggccttcaaggcgagatttgcataaaaccaaacactgattttcctgatttacgtttctctaagcctggtagaagatggttaaaacaacaattgttgggacaagataagattgatgaggttgaattagtcgaaggaagacctcatcctgcgcagaagagttggattcttaagtttcgagggttggacgatgttgatcaggtgagacaactcgttggtgcaactctgcttgctgaggacgatgatcgtcctgagcttgatgaaggagaattttactctcgagatcttgtaggcatgagagttcttctcaaggagaccggtcaacttgttggaactgttgctaatattttcgacaatggaggaaatgatcttctacatgttttgcttgactcatccatggaagtctgcaatgggaatgcaaagaccaatcagcttgtttggataccttttgtagatgcaattgttcctgatgttgatttggaaagaaaggagatgtatataactccaccgaagggactcctcgaggtgaatatgcgagcagatgatcggtccaagaaagaaaggcggcagcttgtgaggaatggaaagaaagaaaaaaacagcagaagcgccttattgctgctaaaaagaagttatgtgaaatggagcaaaagcatgtgtttgatggattaaggtttggagaaaagtctcaaaggaatttacttgctgatcatatccttaacgtaaactccacactacttcagaaagctttgcaaagtattgacacctcatcgaagagatggaatgtaactgaggaaatcaatgcactgagagctagagtatcggaatgtaatctgagtgtgtcacgagaatgccttagttttgatgcaagcaaagagaacatgggtgataacttcagtttccttcaacaagggcaaaatctgttctctgagggtaaagtttctatttgtttggttctcaatgatcacgagaatgaagaaccagaaggtgagaatggtgtagtctcgtaccttcacgcactacttgatgaggagcagaggttcataaaggaagaagatcgcgcttgcgtgccacttgtcatagtttcccctgaacataccattgaagctctgcagaagctatttcaggataatgatcattttggatttgagtcagaaaagatctggattctcaaagaagaaacgcttccagtagtttgcagctcaccagaggaaccgaaaaagcacaaaattttgatgaaatctccatgggagatacttgagtccccggttggctctggaggagtcttgagcatccttgcttcacatggaactacagactctctttccaccctgggaatcaattatcttcaggtacacagtattgaaacaaaaccacaaccgtcacaacattacatcaatcccatgcttgttggtttcgtgagcgcaagaggagcagagattgggatccaagtgaccgaagaatctgaactcaagaacttggaaatgacattctcaatgaagtttctgaagagattaaagggaaaaatcgagtttgaagctgtcatgaagatgaattcacatgttcagaatgttgaaaaggagtgggttgagtcagtaccatcagaaccaaactcgtttgagtttcgttctgatatttacagagtcttgagtgaatgttcttcatcagctaagatttgtttgatgaacattaccgtttagaacttgtacattttgctacttagttgtttgtcctcacatctaaaaagcttctagagacgc

SEQ ID NO: 48442 - protein, 352 aa, Arabidopsis thaliana
  peptide (1)..(352): Ceres Seq. ID no. 12600713
  misc_feature (132)..(276): Pfam Name: UTP--glucose-1-phosphate uridylyltransferase Pfam Description: UTP--glucose-1-phosphate uridylyltransferase
  misc_feature (1)..(352): Homolog of NCBI NO: 18422672 NR Description: putative protein
MEQKHVFDGLRFGEKSQRNLLADHILNVNSTLLQKALQSIDTSSKRWNVTEEINALRARVSECNLSVSRECLSFDASKENMGDNFSFLQQGQNLFSEGKVSICLVLNDHENEEPEGENGVVSYLHALLDEEQRFIKEEDRACVPLVIVSPEHTIEALQKLFQDNDHFGFESEKIWILKEETLPVVCSSPEEPKKHKILMKSPWEILESPVGSGGVLSILASHGTTDSLSTLGINYLQVHSIETKPQPSQHYINPMLVGFVSARGAEIGIQVTEESELKNLEMTFSMKFLKRLKGKIEFEAVMKMNSHVQNVEKEWVESVPSEPNSFEFRSDIYRVLSECSSSAKICLMNITV

SEQ ID NO: 48443 - protein, 326 aa, Arabidopsis thaliana
  peptide (1)..(326): Ceres Seq. ID no. 12600714
  misc_feature (96)..(185): Pfam Name: RimM N-terminal domain Pfam Description: RimM N-terminal domain
  misc_feature (92)..(277): Homolog of NCBI NO: 23335825 NR Description: hypothetical protein [Bifidobacterium longum
  misc_feature (95)..(278): Homolog of NCBI NO: 37521074 NR Description: probable 16S rRNA processing protein [Gloeobacter
  misc_feature (97)..(279): Homolog of NCBI NO: 33241213 NR Description: RimM protein, required for 16S rRNA processing
  misc_feature (97)..(277): Homolog of NCBI NO: 22298609 NR Description: 16S rRNA processing protein RimM
  misc_feature (242)..(279): Homolog of NCBI NO: 23040973 NR Description: hypothetical protein [Trichodesmium erythraeum
  misc_feature (95)..(230): Homolog of NCBI NO: 23040973 NR Description: hypothetical protein [Trichodesmium erythraeum
  misc_feature (95)..(279): Homolog of NCBI NO: 17230304 NR Description: probable 16S rRNA processing protein [Nostoc sp.
  misc_feature (89)..(279): Homolog of NCBI NO: 33864216 NR Description: possible 16S rRNA processing protein RimM
  misc_feature (95)..(280): Homolog of NCBI NO: 23125796 NR Description: hypothetical protein [Nostoc punctiforme]
  misc_feature (93)..(279): Homolog of NCBI NO: 33864685 NR Description: possible 16S rRNA processing protein RimM
CDIRRIHCLGREEIMLRASLLCSSTSITFTPIQLFNPNSSHRFPRFELSRPVSALSRTKCHLSLLRARGKSSFLTRSTATDEAVETSSNSGLDLVEVGFLSGVHGLQGEICIKPNTDFPDLRFSKPGRRWLKQQLLGQDKIDEVELVEGRPHPAQKSWILKFRGLDDVDQVRQLVGATLLAEDDDRPELDEGEFYSRDLVGMRVLLKETGQLVGTVANIFDNGGNDLLHVLLDSSMEVCNGNAKTNQLVWIPFVDAIVPDVDLERKEMYITPPKGLLEVNMRADDRSKKERRQLVRNGKKEKNSRSALLLLKRSYVKWSKSMCLMD

SEQ ID NO: 48444 - protein, 312 aa, Arabidopsis thaliana
  peptide (1)..(312): Ceres Seq. ID no. 12600715
  misc_feature (82)..(171): Pfam Name: RimM N-terminal domain Pfam Description: RimM N-terminal domain
  misc_feature (78)..(263): Homolog of NCBI NO: 23335825 NR Description: hypothetical protein [Bifidobacterium longum
  misc_feature (81)..(264): Homolog of NCBI NO: 37521074 NR Description: probable 16S rRNA processing protein [Gloeobacter
  misc_feature (83)..(265): Homolog of NCBI NO: 33241213 NR Description: RimM protein, required for 16S rRNA processing
  misc_feature (83)..(263): Homolog of NCBI NO: 22298609 NR Description: 16S rRNA processing protein RimM
  misc_feature (228)..(265): Homolog of NCBI NO: 23040973 NR Description: hypothetical protein [Trichodesmium erythraeum
  misc_feature (81)..(216): Homolog of NCBI NO: 23040973 NR Description: hypothetical protein [Trichodesmium erythraeum
  misc_feature (81)..(265): Homolog of NCBI NO: 17230304 NR Description: probable 16S rRNA processing protein [Nostoc sp.
  misc_feature (75)..(265): Homolog of NCBI NO: 33864216 NR Description: possible 16S rRNA processing protein RimM
  misc_feature (81)..(266): Homolog of NCBI NO: 23125796 NR Description: hypothetical protein [Nostoc punctiforme]
  misc_feature (79)..(265): Homolog of NCBI NO: 33864685 NR Description: possible 16S rRNA processing protein RimM
MLRASLLCSSTSITFTPIQLFNPNSSHRFPRFELSRPVSALSRTKCHLSLLRARGKSSFLTRSTATDEAVETSSNSGLDLVEVGFLSGVHGLQGEICIKPNTDFPDLRFSKPGRRWLKQQLLGQDKIDEVELVEGRPHPAQKSWILKFRGLDDVDQVRQLVGATLLAEDDDRPELDEGEFYSRDLVGMRVLLKETGQLVGTVANIFDNGGNDLLHVLLDSSMEVCNGNAKTNQLVWIPFVDAIVPDVDLERKEMYITPPKGLLEVNMRADDRSKKERRQLVRNGKKEKNSRSALLLLKRSYVKWSKSMCLMD

SEQ ID NO: 48445 - DNA, 1684 bp, Arabidopsis thaliana
  misc_feature (1)..(1684): Ceres Seq. ID no. 12575729
  misc_feature: MA Experiment ID: 20000182 Result: Up-regulated in Transcription
  misc_feature: MA Experiment 20000182 PARAMETER Experiment Name: At_2mM_SA_P Parameter: Age (day) Value: 14
  misc_feature: MA Experiment 20000182 PARAMETER Experiment Name: At_2mM_SA_P Parameter: Organism Value: A. thaliana
  misc_feature: MA Experiment 20000182 PARAMETER Experiment Name: At_2mM_SA_P Parameter: Plant Line Value: WS
  misc_feature: MA Experiment 20000182 PARAMETER Experiment Name: At_2mM_SA_P Parameter: Timepoint (hr) Value: 6
  misc_feature: MA Experiment 20000182 PARAMETER Experiment Name: At_2mM_SA_P Parameter: Tissue Value: Aerial
  misc_feature: MA Experiment 20000182 PARAMETER Experiment Name: At_2mM_SA_P Parameter: Treatment Value: 2mM SA vs. No Treatment
  misc_feature: MA Experiment ID: 20000185 Result: Up-regulated in Transcription
  misc_feature: MA Experiment 20000185 PARAMETER Experiment Name: At_Roots__P Parameter: Age (day) Value: 7 vs. 21
  misc_feature: MA Experiment 20000185 PARAMETER Experiment Name: At_Roots__P Parameter: Organism Value: A. thaliana
  misc_feature: MA Experiment 20000185 PARAMETER Experiment Name: At_Roots__P Parameter: Tissue Value: Roots vs. Whole Plant
  misc_feature: MA Experiment ID: 20000235 Result: Down-regulated in Transcription
  misc_feature: MA Experiment 20000235 PARAMETER Experiment Name: At_Siliques_P Parameter: Age (day) Value: 21
  misc_feature: MA Experiment 20000235 PARAMETER Experiment Name: At_Siliques_P Parameter: Organism Value: A. thaliana
  misc_feature: MA Experiment 20000235 PARAMETER Experiment Name: At_Siliques_P Parameter: Plant Line Value: WS
  misc_feature: MA Experiment 20000235 PARAMETER Experiment Name: At_Siliques_P Parameter: Tissue Value: 5-10mm Siliques vs. Whole Plant
  misc_feature: MA Experiment ID: 20000438 Result: Down-regulated in Transcription
  misc_feature: MA Experiment 20000438 PARAMETER Experiment Name: At_Shoots__P Parameter: Age (day) Value: 14
  misc_feature: MA Experiment 20000438 PARAMETER Experiment Name: At_Shoots__P Parameter: Tissue Value: Shoots vs. Whole Plant
  misc_feature: MA Experiment ID: 20000439 Result: Up-regulated in Transcription
  misc_feature: MA Experiment 20000439 PARAMETER Experiment Name: At_Roots__P Parameter: Age (day) Value: 14 vs. 21
  misc_feature: MA Experiment 20000439 PARAMETER Experiment Name: At_Roots__P Parameter: Organism Value: A. thaliana
  misc_feature: MA Experiment 20000439 PARAMETER Experiment Name: At_Roots__P Parameter: Tissue Value: Roots vs. Whole Plant
  misc_feature: MA Experiment ID: 20000573 Result: Down-regulated in Transcription
  misc_feature: MA Experiment 20000573 PARAMETER Experiment Name: At_100uM_ABA_Mutants__P Parameter: Organism Value: A. thaliana
  misc_feature: MA Experiment 20000573 PARAMETER Experiment Name: At_100uM_ABA_Mutants__P Parameter: Plant Line Value: CS22 vs. Ler wt
  misc_feature: MA Experiment 20000573 PARAMETER Experiment Name: At_100uM_ABA_Mutants__P Parameter: Timepoint (hr) Value: N/A
  misc_feature: MA Experiment 20000573 PARAMETER Experiment Name: At_100uM_ABA_Mutants__P Parameter: Tissue Value: Whole Plant
  misc_feature: MA Experiment 20000573 PARAMETER Experiment Name: At_100uM_ABA_Mutants__P Parameter: Treatment Value: None
  misc_feature: MA Experiment ID: 20001248 Result: Up-regulated in Transcription
  misc_feature: MA Experiment 20001248 PARAMETER Experiment Name: At_Far-red-induction_P Parameter: Age (day) Value: 7
  misc_feature: MA Experiment 20001248 PARAMETER Experiment Name: At_Far-red-induction_P Parameter: Light Value: Far-red vs. White
  misc_feature: MA Experiment 20001248 PARAMETER Experiment Name: At_Far-red-induction_P Parameter: Organism Value: A. thaliana
  misc_feature: MA Experiment 20001248 PARAMETER Experiment Name: At_Far-red-induction_P Parameter: Plant Line Value: Columbia
  misc_feature: MA Experiment 20001248 PARAMETER Experiment Name: At_Far-red-induction_P Parameter: Timepoint (hr) Value: 4
  misc_feature: MA Experiment 20001248 PARAMETER Experiment Name: At_Far-red-induction_P Parameter: Tissue Value: Whole Plant
  misc_feature: MA Experiment ID: 20001450 Result: Up-regulated in Transcription
  misc_feature: MA Experiment 20001450 PARAMETER Experiment Name: At_Far-red-induction_P Parameter: Age (day) Value: 7
  misc_feature: MA Experiment 20001450 PARAMETER Experiment Name: At_Far-red-induction_P Parameter: Light Value: Far-red vs. White
  misc_feature: MA Experiment 20001450 PARAMETER Experiment Name: At_Far-red-induction_P Parameter: Organism Value: A. thaliana
  misc_feature: MA Experiment 20001450 PARAMETER Experiment Name: At_Far-red-induction_P Parameter: Plant Line Value: Columbia
  misc_feature: MA Experiment 20001450 PARAMETER Experiment Name: At_Far-red-induction_P Parameter: Timepoint (hr) Value: 8
  misc_feature: MA Experiment 20001450 PARAMETER Experiment Name: At_Far-red-induction_P Parameter: Tissue Value: Whole Plant
gacttcaaatcggagaaccgccaacgaagaatcgtcgtcttcttcgtcatctccgtcgctgatcgatctcattctttcttaaggtagagctggtggtttctgtaatcgccggtggtgatggcttctaacgatccaaaaaacggcggcggtttcttcgcctctcttgcttcatccatcaccaatttcggatcggccatgagtaaatcagtgaacggtttgatgggatatgaagggcttgaagtgattaatccagaaggaagtacagacgatgcagaggaagaagcagggagaggaagatggaagcaagaggaacgtgatggctattggaagatgatgcagaagtatatagggtctgatgttacatctatggttactcttcctgtgatcatttttgaacccatgacaatgttgcagaaaatggctgagttgatggaatactcatatttgctagacatggctgacaaaactgaagatccttacatgcgtatggtatatgcatcatcatgggctatatctgtgtattacgcctaccagcgtacctggaagccgttcaatccaattctcggtgagacttatgagatgactaatcataatgggatcaattttatagctgaacaggtctgccatcacccaccaatgagtgctggtcatgctgaaaacgagcatttcgcttacgattgcacttcaaaactgaaaacgaaattcctaggcaactcaattgatgtctacccagtaggaaggacacgagtgacacttaaaagagatggtgtcgttcttgatcttgtacctccactgacaaaggttcataaccttatcttcggtcgaacatgggtcgattcgccaggagagatggtcatgacgaacctgaccactggtgacaaagtggtgctttactttcaaccatgtggctggtttggatctggacgatatgaagtggacggttacgtgtataattcagctgaagagcccaagatgctaatgaccggaaaatggaacgagtccttgagttatcagccatgtgatgcggaaggcgaacctcttccaggcaccgaactgaaggaggtgtggaaggttgctgaagctccaaagaacgataaataccaatacacacattttgctcacaagatcaatagttttgacactgcccctaaaaagctactgtcatctgattcacgtctacgtcctgatagatacgcgctggagatgggtgatatgtccaaatctggattcgaaaagagcagcctagaggatagacaaagagctgagaagaaaagcagagaagagaaaggccaaaaatttgctccaaaatggtttgatgaaacagaagaagtcactcctacaccatggggtgatctcgaagtttaccaattcaatggaaagtactcggtgcaccgcgccacagctgaaaactctgaggatacaaccgatgtgaagttgacccaattcaacccttggcaattccaagatctctctgcttaatcctttggtgccatttgttgtgtaatgcgttgttactttcttagatctttcatttgtttttggtattaatcaccagtttcattgtaattttccataagaaagagtctatattttgataatctactctctttgtaaggctttaaagctgattactgattttctgagttgtcttgaaagcaattttatgaattgaagtgacgtcgtt

SEQ ID NO: 48446 - protein, 453 aa, Arabidopsis thaliana
  peptide (1)..(453): Ceres Seq. ID no. 12575730
  misc_feature (24)..(427): Pfam Name: Oxysterol-binding protein Pfam Description: Oxysterol-binding protein
  misc_feature (274)..(422): Homolog of NCBI NO: 19718746 NR Description: oxysterol-binding protein-like 1A isoform A
  misc_feature (70)..(300): Homolog of NCBI NO: 19718746 NR Description: oxysterol-binding protein-like 1A isoform A
  misc_feature (274)..(422): Homolog of NCBI NO: 17529997 NR Description: oxysterol-binding protein-like protein OSBPL1A
  misc_feature (70)..(300): Homolog of NCBI NO: 17529997 NR Description: oxysterol-binding protein-like protein OSBPL1A
  misc_feature (77)..(295): Homolog of NCBI NO: 38639321 NR Description: putative oxysterol-binding protein [Solanum
  misc_feature (1)..(450): Homolog of NCBI NO: 38639323 NR Description: oxysterol-binding protein [Solanum tuberosum]
  misc_feature (1)..(452): Homolog of NCBI NO: 8885548 NR Description: oxysterol-binding protein [Arabidopsis thaliana]
  misc_feature (1)..(452): Homolog of NCBI NO: 15238398 NR Description: oxysterol-binding protein - like
  misc_feature (1)..(452): Homolog of NCBI NO: 15232633 NR Description: putative oxysterol-binding protein
  misc_feature (1)..(453): Homolog of NCBI NO: 15241681 NR Description: putative protein
MASNDPKNGGGFFASLASSITNFGSAMSKSVNGLMGYEGLEVINPEGSTDDAEEEAGRGRWKQEERDGYWKMMQKYIGSDVTSMVTLPVIIFEPMTMLQKMAELMEYSYLLDMADKTEDPYMRMVYASSWAISVYYAYQRTWKPFNPILGETYEMTNHNGINFIAEQVCHHPPMSAGHAENEHFAYDCTSKLKTKFLGNSIDVYPVGRTRVTLKRDGVVLDLVPPLTKVHNLIFGRTWVDSPGEMVMTNLTTGDKVVLYFQPCGWFGSGRYEVDGYVYNSAEEPKMLMTGKWNESLSYQPCDAEGEPLPGTELKEVWKVAEAPKNDKYQYTHFAHKINSFDTAPKKLLSSDSRLRPDRYALEMGDMSKSGFEKSSLEDRQRAEKKSREEKGQKFAPKWFDETEEVTPTPWGDLEVYQFNGKYSVHRATAENSEDTTDVKLTQFNPWQFQDLSA

SEQ ID NO: 48447 - protein, 427 aa, Arabidopsis thaliana
  peptide (1)..(427): Ceres Seq. ID no. 12575731
  misc_feature (1)..(401): Pfam Name: Oxysterol-binding protein Pfam Description: Oxysterol-binding protein
  misc_feature (248)..(396): Homolog of NCBI NO: 19718746 NR Description: oxysterol-binding protein-like 1A isoform A
  misc_feature (44)..(274): Homolog of NCBI NO: 19718746 NR Description: oxysterol-binding protein-like 1A isoform A
  misc_feature (248)..(396): Homolog of NCBI NO: 17529997 NR Description: oxysterol-binding protein-like protein OSBPL1A
  misc_feature (44)..(274): Homolog of NCBI NO: 17529997 NR Description: oxysterol-binding protein-like protein OSBPL1A
  misc_feature (51)..(269): Homolog of NCBI NO: 38639321 NR Description: putative oxysterol-binding protein [Solanum
  misc_feature (1)..(424): Homolog of NCBI NO: 38639323 NR Description: oxysterol-binding protein [Solanum tuberosum]
  misc_feature (1)..(426): Homolog of NCBI NO: 8885548 NR Description: oxysterol-binding protein [Arabidopsis thaliana]
  misc_feature (1)..(426): Homolog of NCBI NO: 15238398 NR Description: oxysterol-binding protein - like
  misc_feature (1)..(426): Homolog of NCBI NO: 15232633 NR Description: putative oxysterol-binding protein
  misc_feature (1)..(427): Homolog of NCBI NO: 15241681 NR Description: putative protein
MSKSVNGLMGYEGLEVINPEGSTDDAEEEAGRGRWKQEERDGYWKMMQKYIGSDVTSMVTLPVIIFEPMTMLQKMAELMEYSYLLDMADKTEDPYMRMVYASSWAISVYYAYQRTWKPFNPILGETYEMTNHNGINFIAEQVCHHPPMSAGHAENEHFAYDCTSKLKTKFLGNSIDVYPVGRTRVTLKRDGVVLDLVPPLTKVHNLIFGRTWVDSPGEMVMTNLTTGDKVVLYFQPCGWFGSGRYEVDGYVYNSAEEPKMLMTGKWNESLSYQPCDAEGEPLPGTELKEVWKVAEAPKNDKYQYTHFAHKINSFDTAPKKLLSSDSRLRPDRYALEMGDMSKSGFEKSSLEDRQRAEKKSREEKGQKFAPKWFDETEEVTPTPWGDLEVYQFNGKYSVHRATAENSEDTTDVKLTQFNPWQFQDLSA

SEQ ID NO: 48448 - protein, 419 aa, Arabidopsis thaliana
  peptide (1)..(419): Ceres Seq. ID no. 12575732
  misc_feature (1)..(393): Pfam Name: Oxysterol-binding protein Pfam Description: Oxysterol-binding protein
  misc_feature (240)..(388): Homolog of NCBI NO: 19718746 NR Description: oxysterol-binding protein-like 1A isoform A
  misc_feature (36)..(266): Homolog of NCBI NO: 19718746 NR Description: oxysterol-binding protein-like 1A isoform A
  misc_feature (240)..(388): Homolog of NCBI NO: 17529997 NR Description: oxysterol-binding protein-like protein OSBPL1A
  misc_feature (36)..(266): Homolog of NCBI NO: 17529997 NR Description: oxysterol-binding protein-like protein OSBPL1A
  misc_feature (43)..(261): Homolog of NCBI NO: 38639321 NR Description: putative oxysterol-binding protein [Solanum
  misc_feature (1)..(416): Homolog of NCBI NO: 38639323 NR Description: oxysterol-binding protein [Solanum tuberosum]
  misc_feature (1)..(418): Homolog of NCBI NO: 8885548 NR Description: oxysterol-binding protein [Arabidopsis thaliana]
  misc_feature (1)..(418): Homolog of NCBI NO: 15238398 NR Description: oxysterol-binding protein - like
  misc_feature (1)..(418): Homolog of NCBI NO: 15232633 NR Description: putative oxysterol-binding protein
  misc_feature (1)..(419): Homolog of NCBI NO: 15241681 NR Description: putative protein
MGYEGLEVINPEGSTDDAEEEAGRGRWKQEERDGYWKMMQKYIGSDVTSMVTLPVIIFEPMTMLQKMAELMEYSYLLDMADKTEDPYMRMVYASSWAISVYYAYQRTWKPFNPILGETYEMTNHNGINFIAEQVCHHPPMSAGHAENEHFAYDCTSKLKTKFLGNSIDVYPVGRTRVTLKRDGVVLDLVPPLTKVHNLIFGRTWVDSPGEMVMTNLTTGDKVVLYFQPCGWFGSGRYEVDGYVYNSAEEPKMLMTGKWNESLSYQPCDAEGEPLPGTELKEVWKVAEAPKNDKYQYTHFAHKINSFDTAPKKLLSSDSRLRPDRYALEMGDMSKSGFEKSSLEDRQRAEKKSREEKGQKFAPKWFDETEEVTPTPWGDLEVYQFNGKYSVHRATAENSEDTTDVKLTQFNPWQFQDLSA

SEQ ID NO: 48449 - DNA, 1312 bp, Arabidopsis thaliana; identical to SEQ ID NO: 47650
  misc_feature (1)..(1312): Ceres Seq. ID no. 13579070
  misc_feature: MA Experiment ID: 20000265 Result: Up-regulated in Transcription
  misc_feature: MA Experiment 20000265 PARAMETER Experiment Name: At_Open_Flower_P Parameter: Age (day) Value: 21
  misc_feature: MA Experiment 20000265 PARAMETER Experiment Name: At_Open_Flower_P Parameter: Plant Line Value: WS
  misc_feature: MA Experiment 20000265 PARAMETER Experiment Name: At_Open_Flower_P Parameter: Tissue Value: Closed Flower vs. Whole Plant
  misc_feature: MA Experiment ID: 20000286 Result: Up-regulated in Transcription
  misc_feature: MA Experiment 20000286 PARAMETER Experiment Name: At_Open_Flower_P Parameter: Age (day) Value: 21
  misc_feature: MA Experiment 20000286 PARAMETER Experiment Name: At_Open_Flower_P Parameter: Plant Line Value: WS
  misc_feature: MA Experiment 20000286 PARAMETER Experiment Name: At_Open_Flower_P Parameter: Tissue Value: Half Open vs. Whole Plant
  misc_feature: MA Experiment ID: 20000495 Result: Up-regulated in Transcription
  misc_feature: MA Experiment 20000495 PARAMETER Experiment Name: At_Guard_Cells_P Parameter: Harvest Date Value: 8/2/2002
  misc_feature: MA Experiment 20000495 PARAMETER Experiment Name: At_Guard_Cells_P Parameter: Organism Value: A. thaliana
  misc_feature: MA Experiment 20000495 PARAMETER Experiment Name: At_Guard_Cells_P Parameter: Tissue Value: Guard Cells vs. Leaves
  misc_feature: MA Experiment ID: 20001451 Result: Up-regulated in Transcription
  misc_feature: MA Experiment 20001451 PARAMETER Experiment Name: At_Far-red-induction_P Parameter: Age (day) Value: 7
  misc_feature: MA Experiment 20001451 PARAMETER Experiment Name: At_Far-red-induction_P Parameter: Light Value: Far-red vs. White
  misc_feature: MA Experiment 20001451 PARAMETER Experiment Name: At_Far-red-induction_P Parameter: Organism Value: A. thaliana
  misc_feature: MA Experiment 20001451 PARAMETER Experiment Name: At_Far-red-induction_P Parameter: Plant Line Value: Columbia
  misc_feature: MA Experiment 20001451 PARAMETER Experiment Name: At_Far-red-induction_P Parameter: Timepoint (hr) Value: 24
  misc_feature: MA Experiment 20001451 PARAMETER Experiment Name: At_Far-red-induction_P Parameter: Tissue Value: Whole Plant

SEQ ID NO: 48450 - protein, 395 aa, Arabidopsis thaliana; identical to SEQ ID NO: 47651
  peptide (1)..(395): Ceres Seq. ID no. 13579071
  misc_feature (10)..(236): Pfam Name: Chalcone and stilbene synthases, N-terminal domain Pfam Description: Chalcone and stilbene synthases, N-terminal
  misc_feature (10)..(236): Pfam Name: Chalcone and stilbene synthases, N-terminal domain Pfam Description: Chalcone and stilbene synthases, N-terminal
  misc_feature (12)..(392): Homolog of NCBI NO: 34902722 NR Description: putative chalcone synthase
  misc_feature (13)..(392): Homolog of NCBI NO: 7433785 NR Description: chalcone synthase homolog - rice
  misc_feature (13)..(392): Homolog of NCBI NO: 37535500 NR Description: anther-specific protein YY2
  misc_feature (17)..(392): Homolog of NCBI NO: 7433787 NR Description: anther-specific protein homolog T11I11.90 -
  misc_feature (17)..(392): Homolog of NCBI NO: 18418528 NR Description: chalcone and stilbene synthase family
  misc_feature (12)..(392): Homolog of NCBI NO: 34902722 NR Description: putative chalcone synthase
  misc_feature (13)..(392): Homolog of NCBI NO: 37535500 NR Description: anther-specific protein YY2
  misc_feature (17)..(392): Homolog of NCBI NO: 18418528 NR Description: chalcone and stilbene synthase family
  misc_feature (1)..(395): Homolog of NCBI NO: 15217605 NR Description: chalcone and stilbene synthase family
  misc_feature (18)..(392): Homolog of NCBI NO: 21554288 NR Description: putative chalcone synthase [Arabidopsis thaliana]
  misc_feature (18)..(392): Homolog of NCBI NO: 15236691 NR Description: chalcone and stilbene synthase family
  misc_feature (31)..(392): Homolog of NCBI NO: 7433783 NR Description: anther-specific protein - wood tobacco
  misc_feature (4)..(392): Homolog of NCBI NO: 7433790 NR Description: chalcone synthase homolog ChS1 - Monterey pine
  misc_feature (17)..(392): Homolog of NCBI NO: 7433787 NR Description: anther-specific protein homolog T11I11.90 -
  misc_feature (13)..(392): Homolog of NCBI NO: 7433785 NR Description: chalcone synthase homolog - rice
  misc_feature (4)..(392): Homolog of NCBI NO: 7433790 NR Description: chalcone synthase homolog ChS1 - Monterey pine
  misc_feature (31)..(392): Homolog of NCBI NO: 7433783 NR Description: anther-specific protein - wood tobacco
  misc_feature (18)..(392): Homolog of NCBI NO: 15236691 NR Description: chalcone and stilbene synthase family
  misc_feature (18)..(392): Homolog of NCBI NO: 21554288 NR Description: putative chalcone synthase [Arabidopsis thaliana]
  misc_feature (1)..(395): Homolog of NCBI NO: 15217605 NR Description: chalcone and stilbene synthase family

SEQ ID NO: 48451 - protein, 390 aa, Arabidopsis thaliana; identical to SEQ ID NO: 47652
  peptide (1)..(390): Ceres Seq. ID no. 13579072
  misc_feature (5)..(231): Pfam Name: Chalcone and stilbene synthases, N-terminal domain Pfam Description: Chalcone and stilbene synthases, N-terminal
  misc_feature (5)..(231): Pfam Name: Chalcone and stilbene synthases, N-terminal domain Pfam Description: Chalcone and stilbene synthases, N-terminal
  misc_feature (7)..(387): Homolog of NCBI NO: 34902722 NR Description: putative chalcone synthase
  misc_feature (8)..(387): Homolog of NCBI NO: 7433785 NR Description: chalcone synthase homolog - rice
  misc_feature (8)..(387): Homolog of NCBI NO: 37535500 NR Description: anther-specific protein YY2
  misc_feature (12)..(387): Homolog of NCBI NO: 7433787 NR Description: anther-specific protein homolog T11I11.90 -
  misc_feature (12)..(387): Homolog of NCBI NO: 18418528 NR Description: chalcone and stilbene synthase family
  misc_feature (7)..(387): Homolog of NCBI NO: 34902722 NR Description: putative chalcone synthase
  misc_feature (8)..(387): Homolog of NCBI NO: 37535500 NR Description: anther-specific protein YY2
  misc_feature (12)..(387): Homolog of NCBI NO: 18418528 NR Description: chalcone and stilbene synthase family
  misc_feature (1)..(390): Homolog of NCBI NO: 15217605 NR Description: chalcone and stilbene synthase family
  misc_feature (13)..(387): Homolog of NCBI NO: 21554288 NR Description: putative chalcone synthase [Arabidopsis thaliana]
  misc_feature (13)..(387): Homolog of NCBI NO: 15236691 NR Description: chalcone and stilbene synthase family
  misc_feature (26)..(387): Homolog of NCBI NO: 7433783 NR Description: anther-specific protein - wood tobacco
  misc_feature (1)..(387): Homolog of NCBI NO: 7433790 NR Description: chalcone synthase homolog ChS1 - Monterey pine
  misc_feature (12)..(387): Homolog of NCBI NO: 7433787 NR Description: anther-specific protein homolog T11I11.90 -
  misc_feature (8)..(387): Homolog of NCBI NO: 7433785 NR Description: chalcone synthase homolog - rice
  misc_feature (1)..(387): Homolog of NCBI NO: 7433790 NR Description: chalcone synthase homolog ChS1 - Monterey pine
  misc_feature (26)..(387): Homolog of NCBI NO: 7433783 NR Description: anther-specific protein - wood tobacco
  misc_feature (13)..(387): Homolog of NCBI NO: 15236691 NR Description: chalcone and stilbene synthase family
  misc_feature (13)..(387): Homolog of NCBI NO: 21554288 NR Description: putative chalcone synthase [Arabidopsis thaliana]
  misc_feature (1)..(390): Homolog of NCBI NO: 15217605 NR Description: chalcone and stilbene synthase family

SEQ ID NO: 48452 - protein, 283 aa, Arabidopsis thaliana; identical to SEQ ID NO: 47653
  peptide (1)..(283): Ceres Seq. ID no. 13579073
  misc_feature (1)..(124): Pfam Name: Chalcone and stilbene synthases, N-terminal domain Pfam Description: Chalcone and stilbene synthases, N-terminal
  misc_feature (1)..(124): Pfam Name: Chalcone and stilbene synthases, N-terminal domain Pfam Description: Chalcone and stilbene synthases, N-terminal
  misc_feature (1)..(280): Homolog of NCBI NO: 34902722 NR Description: putative chalcone synthase
  misc_feature (1)..(280): Homolog of NCBI NO: 7433785 NR Description: chalcone synthase homolog - rice
  misc_feature (1)..(280): Homolog of NCBI NO: 37535500 NR Description: anther-specific protein YY2
  misc_feature (1)..(280): Homolog of NCBI NO: 7433787 NR Description: anther-specific protein homolog T11I11.90 -
  misc_feature (1)..(280): Homolog of NCBI NO: 18418528 NR Description: chalcone and stilbene synthase family
  misc_feature (1)..(280): Homolog of NCBI NO: 34902722 NR Description: putative chalcone synthase
  misc_feature (1)..(280): Homolog of NCBI NO: 37535500 NR Description: anther-specific protein YY2
  misc_feature (1)..(280): Homolog of NCBI NO: 18418528 NR Description: chalcone and stilbene synthase family
  misc_feature (1)..(283): Homolog of NCBI NO: 15217605 NR Description: chalcone and stilbene synthase family
  misc_feature (1)..(280): Homolog of NCBI NO: 21554288 NR Description: putative chalcone synthase [Arabidopsis thaliana]
  misc_feature (1)..(280): Homolog of NCBI NO: 15236691 NR Description: chalcone and stilbene synthase family
  misc_feature (1)..(280): Homolog of NCBI NO: 7433783 NR Description: anther-specific protein - wood tobacco
  misc_feature (1)..(280): Homolog of NCBI NO: 7433790 NR Description: chalcone synthase homolog ChS1 - Monterey pine
  misc_feature (1)..(280): Homolog of NCBI NO: 7433787 NR Description: anther-specific protein homolog T11I11.90 -
  misc_feature (1)..(280): Homolog of NCBI NO: 7433785 NR Description: chalcone synthase homolog - rice
  misc_feature (1)..(280): Homolog of NCBI NO: 7433790 NR Description: chalcone synthase homolog ChS1 - Monterey pine
  misc_feature (1)..(280): Homolog of NCBI NO: 7433783 NR Description: anther-specific protein - wood tobacco
  misc_feature (1)..(280): Homolog of NCBI NO: 15236691 NR Description: chalcone and stilbene synthase family
  misc_feature (1)..(280): Homolog of NCBI NO: 21554288 NR Description: putative chalcone synthase [Arabidopsis thaliana]
  misc_feature (1)..(283): Homolog of NCBI NO: 15217605 NR Description: chalcone and stilbene synthase family

SEQ ID NO: 48453 - DNA, 2610 bp, Arabidopsis thaliana
  misc_feature (1)..(2610): Ceres Seq. ID no. 12601023
  misc_feature: MA Experiment ID: 20000328 Result: Down-regulated in Transcription
  misc_feature: MA Experiment 20000328 PARAMETER Experiment Name: At_42deg_Heat_Sub_P Parameter: Age (day) Value: 14
  misc_feature: MA Experiment 20000328 PARAMETER Experiment Name: At_42deg_Heat_Sub_P Parameter: Organism Value: A. thaliana
  misc_feature: MA Experiment 20000328 PARAMETER Experiment Name: At_42deg_Heat_Sub_P Parameter: Plant Line Value: WS
  misc_feature: MA Experiment 20000328 PARAMETER Experiment Name: At_42deg_Heat_Sub_P Parameter: Temperature (deg C) Value: 42 vs. 22
  misc_feature: MA Experiment 20000328 PARAMETER Experiment Name: At_42deg_Heat_Sub_P Parameter: Timepoint (hr) Value: 6
  misc_feature: MA Experiment 20000328 PARAMETER Experiment Name: At_42deg_Heat_Sub_P Parameter: Tissue Value: Aerial
aagaggagaaagaaaagcaaaggaagggcatgtgactgatcacggctttgcctccaccgcataaagctcccttcacagatacatacactctctttctctctcttccggcgtttattcttcttatttcgccaccgtcctccgccgccgtggtggacttatatctctgcgtttcacgacctgccgccaccgccggcgataggtttcaatgatgaattaaggcgttggccagagagagaagagagattgagatctgtcgatatgctagcgaagaatcggctgccgggaagcggccacactactccgtctcctccggcatctcctcgccgttctcctcgttatcgtcacggtcggtctaaagccgccgccggtagtagatttcctacggttcaaccaagtcggaccctcgctcatcgcctctcgtggatcctcttatcggttcttctccgtcgtcaggggattttcttattcgctcctctaatctatatctcttgtatgctgctttacatgggaaccgtctccttcgacgttgttccaatcattcagcgtcgacctcctccaggatccgtttacaaaagccctcaggtttacgccaagctccgtcctgagatggacgccgataattccaccgctgatgccataacaaccatctggaaacattcctataaaggtggtgaatggaagccgtacgtgaacaagtctactggagacttgcctgagtcaaacggttacatatatgttgaggcaaatggaggcttgaatcagcagcggacatcgatatgcaatgcggttgctgtggcaggatatcttaatgcaactctagtaattcccaactttcactatcacagcatatggagagatccaagtaaatttggggacatctacgatgaagagttctttgtcagtaccttatcaaatgatgtgcgggtggttgatacaattcctgaatatctaatggagcgttttgaccataacatgacaaatgtctataacttcagagttaaagcatggtcacctattcaatattatcgagactcgatcttgccgaaacttcttgaggagaagattatacgaatatctccatttgcaaatagactttcttttgatgctcctcaagctgtccagagacttagatgtttggcgaattacgaagccctgaagttttcgaaaaccatactaaccctaggagaaacactggtgaagagaatgaaagagcaaagtgcaaaccacggtgcaaaatacgtgtctgtacatctgcgttttgaagaggacatggtagctttctcctgttgcatatttgatggtgggaaccaagaaaaacaagatatgattgcagcaagagaacgaggatggaaaggaaagttcacaaaaccaggccgtgttatacgacctggtgctatcaggcaaaacggaaaatgccctttaactcctttagaggtgggtttaatgcttagaggaatggggttcaacaaaagcacatatattttcctcgcgtctggtgaaatatatgatgcgaatcgaactatggccccgctactagagatgttcccaaatttacaaactaaggagatgcttgcatcagaggaggaacttgctccatataagaatttctcttccagaatggctgcaatagattacacggtctgtctccacagtgaggtatttgtgaccacgcaaggtggaaactttcctcatttcctcatgggtcatcggagatatatgtttggaggacattccaagaccattagaccagacaagcgaaagttagcaatcctctttgacaatccaaacatcggatggcggagttttaaacgtcagatgctaaacatgaggtctcatagtgactcaaaggggtttgagctaaaacgacctaatgactccatttacacattcccttgccctgactgcatgtcccgtaggaacaaaacaacaaccccagaatcgagaccacctcctgccacctgaaaacacacatttgattaccggccttccagaatctgcttctacaggctacgttcattccttgtaattctaattctttcaaatcagacacaggaccttagtgactcggcctgcccagaattttagggaagacagcgtttgaatgggccgtggaatcatctatttattctccggcgaggagtaacagccacaacattgtttgatacctttgacacattgaagctgatgtatctaacaggaaagacgagattgaagttttaacacattccctagctgctgctgggcaaagaataggacagcgtttggattttggtgtttttttcttggggtgttttggtggtttgaagaagcgtttgcgttttgtacattttgtgaacgcaggctttgtgttaggagatatgtagagagagacggacaagggggagaaaagaagctgccctaaaagttttgtacattgatttggttagagatcattgtctcttcttttcttttcttttctctgatcatagggttttttaattgtttcatcatcatattcttatgattcttttctttcacaagataattttttcaatagtgatttaattcatttttgcttcttccagtcgtgttcatgtttttcatttgttcttatatcagttttaaatttat

SEQ ID NO: 48454 - protein, 567 aa, Arabidopsis thaliana
  peptide (1)..(567): Ceres Seq. ID no. 12601024
  misc_feature (159)..(516): Pfam Name: Plant protein family Pfam Description: Plant protein family
  misc_feature (9)..(549): Homolog of NCBI NO: 22329977 NR Description: similar to growth regulator, putative; protein
  misc_feature (228)..(395): Homolog of NCBI NO: 25403440 NR Description: protein F15O4.45 [imported] - Arabidopsis
  misc_feature (393)..(566): Homolog of NCBI NO: 25403440 NR Description: protein F15O4.45 [imported] - Arabidopsis
  misc_feature (1)..(200): Homolog of NCBI NO: 25403440 NR Description: protein F15O4.45 [imported] - Arabidopsis
  misc_feature (17)..(566): Homolog of NCBI NO: 15293043 NR Description: putative growth regulator protein [Arabidopsis
  misc_feature (15)..(566): Homolog of NCBI NO: 18399706 NR Description: growth regulator, putative
  misc_feature (9)..(561): Homolog of NCBI NO: 34908166 NR Description: axi 1-like protein [Oryza sativa (japonica
  misc_feature (79)..(557): Homolog of NCBI NO: 8778220 NR Description: F10B6.36 [Arabidopsis thaliana]
  misc_feature (1)..(557): Homolog of NCBI NO: 15221017 NR Description: auxin-independent growth promoter, putative
  misc_feature (1)..(567): Homolog of NCBI NO: 15226282 NR Description: similar to axi 1 protein from Nicotiana tabacum
MLAKNRLPGSGHTTPSPPASPRRSPRYRHGRSKAAAGSRFPTVQPSRTLAHRLSWILLSVLLRRQGIFLFAPLIYISCMLLYMGTVSFDVVPIIQRRPPPGSVYKSPQVYAKLRPEMDADNSTADAITTIWKHSYKGGEWKPYVNKSTGDLPESNGYIYVEANGGLNQQRTSICNAVAVAGYLNATLVIPNFHYHSIWRDPSKFGDIYDEEFFVSTLSNDVRVVDTIPEYLMERFDHNMTNVYNFRVKAWSPIQYYRDSILPKLLEEKIIRISPFANRLSFDAPQAVQRLRCLANYEALKFSKTILTLGETLVKRMKEQSANHGAKYVSVHLRFEEDMVAFSCCIFDGGNQEKQDMIAARERGWKGKFTKPGRVIRPGAIRQNGKCPLTPLEVGLMLRGMGFNKSTYIFLASGEIYDANRTMAPLLEMFPNLQTKEMLASEEELAPYKNFSSRMAAIDYTVCLHSEVFVTTQGGNFPHFLMGHRRYMFGGHSKTIRPDKRKLAILFDNPNIGWRSFKRQMLNMRSHSDSKGFELKRPNDSIYTFPCPDCMSRRNKTTTPESRPPPAT

SEQ ID NO: 48455 - protein, 489 aa, Arabidopsis thaliana
  peptide (1)..(489): Ceres Seq. ID no. 12601025
  misc_feature (81)..(438): Pfam Name: Plant protein family Pfam Description: Plant protein family
  misc_feature (1)..(471): Homolog of NCBI NO: 22329977 NR Description: similar to growth regulator, putative; protein
  misc_feature (150)..(317): Homolog of NCBI NO: 25403440 NR Description: protein F15O4.45 [imported] - Arabidopsis
  misc_feature (315)..(488): Homolog of NCBI NO: 25403440 NR Description: protein F15O4.45 [imported] - Arabidopsis
  misc_feature (1)..(122): Homolog of NCBI NO: 25403440 NR Description: protein F15O4.45 [imported] - Arabidopsis
  misc_feature (1)..(488): Homolog of NCBI NO: 15293043 NR Description: putative growth regulator protein [Arabidopsis
  misc_feature (1)..(488): Homolog of NCBI NO: 18399706 NR Description: growth regulator, putative
  misc_feature (1)..(483): Homolog of NCBI NO: 34908166 NR Description: axi 1-like protein [Oryza sativa (japonica
  misc_feature (1)..(479): Homolog of NCBI NO: 8778220 NR Description: F10B6.36 [Arabidopsis thaliana]
  misc_feature (1)..(479): Homolog of NCBI NO: 15221017 NR Description: auxin-independent growth promoter, putative
  misc_feature (1)..(489): Homolog of NCBI NO: 15226282 NR Description: similar to axi 1 protein from Nicotiana tabacum
MLLYMGTVSFDVVPIIQRRPPPGSVYKSPQVYAKLRPEMDADNSTADAITTIWKHSYKGGEWKPYVNKSTGDLPESNGYIYVEANGGLNQQRTSICNAVAVAGYLNATLVIPNFHYHSIWRDPSKFGDIYDEEFFVSTLSNDVRVVDTIPEYLMERFDHNMTNVYNFRVKAWSPIQYYRDSILPKLLEEKIIRISPFANRLSFDAPQAVQRLRCLANYEALKFSKTILTLGETLVKRMKEQSANHGAKYVSVHLRFEEDMVAFSCCIFDGGNQEKQDMIAARERGWKGKFTKPGRVIRPGAIRQNGKCPLTPLEVGLMLRGMGFNKSTYIFLASGEIYDANRTMAPLLEMFPNLQTKEMLASEEELAPYKNFSSRMAAIDYTVCLHSEVFVTTQGGNFPHFLMGHRRYMFGGHSKTIRPDKRKLAILFDNPNIGWRSFKRQMLNMRSHSDSKGFELKRPNDSIYTFPCPDCMSRRNKTTTPESRPPPAT

SEQ ID NO: 48456 - protein, 485 aa, Arabidopsis thaliana
  peptide (1)..(485): Ceres Seq. ID no. 12601026
  misc_feature (77)..(434): Pfam Name: Plant protein family Pfam Description: Plant protein family
  misc_feature (1)..(467): Homolog of NCBI NO: 22329977 NR Description: similar to growth regulator, putative; protein
  misc_feature (146)..(313): Homolog of NCBI NO: 25403440 NR Description: protein F15O4.45 [imported] - Arabidopsis
  misc_feature (311)..(484): Homolog of NCBI NO: 25403440 NR Description: protein F15O4.45 [imported] - Arabidopsis
  misc_feature (1)..(118): Homolog of NCBI NO: 25403440 NR Description: protein F15O4.45 [imported] - Arabidopsis
  misc_feature (1)..(484): Homolog of NCBI NO: 15293043 NR Description: putative growth regulator protein [Arabidopsis
  misc_feature (1)..(484): Homolog of NCBI NO: 18399706 NR Description: growth regulator, putative
  misc_feature (1)..(479): Homolog of NCBI NO: 34908166 NR Description: axi 1-like protein [Oryza sativa (japonica
  misc_feature (1)..(475): Homolog of NCBI NO: 8778220 NR Description: F10B6.36 [Arabidopsis thaliana]
  misc_feature (1)..(475): Homolog of NCBI NO: 15221017 NR Description: auxin-independent growth promoter, putative
  misc_feature (1)..(485): Homolog of NCBI NO: 15226282 NR Description: similar to axi 1 protein from Nicotiana tabacum
MGTVSFDVVPIIQRRPPPGSVYKSPQVYAKLRPEMDADNSTADAITTIWKHSYKGGEWKPYVNKSTGDLPESNGYIYVEANGGLNQQRTSICNAVAVAGYLNATLVIPNFHYHSIWRDPSKFGDIYDEEFFVSTLSNDVRVVDTIPEYLMERFDHNMTNVYNFRVKAWSPIQYYRDSILPKLLEEKIIRISPFANRLSFDAPQAVQRLRCLANYEALKFSKTILTLGETLVKRMKEQSANHGAKYVSVHLRFEEDMVAFSCCIFDGGNQEKQDMIAARERGWKGKFTKPGRVIRPGAIRQNGKCPLTPLEVGLMLRGMGFNKSTYIFLASGEIYDANRTMAPLLEMFPNLQTKEMLASEEELAPYKNFSSRMAAIDYTVCLHSEVFVTTQGGNFPHFLMGHRRYMFGGHSKTIRPDKRKLAILFDNPNIGWRSFKRQMLNMRSHSDSKGFELKRPNDSIYTFPCPDCMSRRNKTTTPESRPPPAT

SEQ ID NO: 48457 - DNA, 1514 bp, Arabidopsis thaliana
  misc_feature (1)..(1514): Ceres Seq. ID no. 13591887
  misc_feature: MA Experiment ID: 20000437 Result: Up-regulated in Transcription
  misc_feature: MA Experiment 20000437 PARAMETER Experiment Name: At_Drought_P Parameter: Age (day) Value: 8
  misc_feature: MA Experiment 20000437 PARAMETER Experiment Name: At_Drought_P Parameter: Organism Value: A. thaliana
  misc_feature: MA Experiment 20000437 PARAMETER Experiment Name: At_Drought_P Parameter: Plant Line Value: WS
  misc_feature: MA Experiment 20000437 PARAMETER Experiment Name: At_Drought_P Parameter: Timepoint (hr) Value: 24
  misc_feature: MA Experiment 20000437 PARAMETER Experiment Name: At_Drought_P Parameter: Tissue Value: Whole Plant
  misc_feature: MA Experiment 20000437 PARAMETER Experiment Name: At_Drought_P Parameter: Treatment Value: Drought vs. No Drought
  misc_feature: MA Experiment ID: 20000495 Result: Up-regulated in Transcription
  misc_feature: MA Experiment 20000495 PARAMETER Experiment Name: At_Guard_Cells_P Parameter: Harvest Date Value: 8/2/2002
  misc_feature: MA Experiment 20000495 PARAMETER Experiment Name: At_Guard_Cells_P Parameter: Organism Value: A. thaliana
  misc_feature: MA Experiment 20000495 PARAMETER Experiment Name: At_Guard_Cells_P Parameter: Tissue Value: Guard Cells vs. Leaves
  misc_feature: MA Experiment ID: 20000794 Result: Up-regulated in Transcription
  misc_feature: MA Experiment 20000794 PARAMETER Experiment Name: At_Petals_P Parameter: Age (day) Value: 23-25 days
  misc_feature: MA Experiment 20000794 PARAMETER Experiment Name: At_Petals_P Parameter: Plant Line Value: WS
  misc_feature: MA Experiment 20000794 PARAMETER Experiment Name: At_Petals_P Parameter: Tissue Value: Petals vs. Whole plant
  misc_feature: MA Experiment ID: 20001451 Result: Up-regulated in Transcription
  misc_feature: MA Experiment 20001451 PARAMETER Experiment Name: At_Far-red-induction_P Parameter: Age (day) Value: 7
  misc_feature: MA Experiment 20001451 PARAMETER Experiment Name: At_Far-red-induction_P Parameter: Light Value: Far-red vs. White
  misc_feature: MA Experiment 20001451 PARAMETER Experiment Name: At_Far-red-induction_P Parameter: Organism Value: A. thaliana
  misc_feature: MA Experiment 20001451 PARAMETER Experiment Name: At_Far-red-induction_P Parameter: Plant Line Value: Columbia
  misc_feature: MA Experiment 20001451 PARAMETER Experiment Name: At_Far-red-induction_P Parameter: Timepoint (hr) Value: 24
  misc_feature: MA Experiment 20001451 PARAMETER Experiment Name: At_Far-red-induction_P Parameter: Tissue Value: Whole Plant
  misc_feature: MA Experiment ID: 20001911 Result: Up-regulated in Transcription
  misc_feature: MA Experiment 20001911 PARAMETER Experiment Name: At_Drought_Reproduction_P Parameter: Age (day) Value: 40
  misc_feature: MA Experiment 20001911 PARAMETER Experiment Name: At_Drought_Reproduction_P Parameter: Organism Value: A. thaliana
  misc_feature: MA Experiment 20001911 PARAMETER Experiment Name: At_Drought_Reproduction_P Parameter: Plant Line Value: WS
  misc_feature: MA Experiment 20001911 PARAMETER Experiment Name: At_Drought_Reproduction_P Parameter: Timepoint (day) Value: 10
  misc_feature: MA Experiment 20001911 PARAMETER Experiment Name: At_Drought_Reproduction_P Parameter: Tissue Value: Flowers
  misc_feature: MA Experiment 20001911 PARAMETER Experiment Name: At_Drought_Reproduction_P Parameter: Treatment Value: Drought vs. No Drought
tcctctcgatctctgatctccctgtcttctgtctacgcttcgtcgccggccgatttctcccagactcgtcttaccgcctccggtcgaaaccctagattcccggaggacgaaattcgttttttcgccggaactaaattaaggagatttgagaggctatgggtacaacaacgacaacaagcgctgtgtatatccatgttatcgaggatgtcgtcaacaaagttcgtgaggagttcattaacaacggaggtcctggcgagagtgttctcagcgagcttcaaggaatttgggagacgaagatgatgcaagccggagtcttgaatggaccaatagagaggtcatcggctcagaagccaacacctggtggtccactgactcatgatttgaatgttccttatgaaggtacagaggagtacgagactcccactgctgaaatgctcttccctcctacaccattgcagactccccttccaacgccgcttcccggtactgctgataactcatccatgtataacatccctaccggctcaagtgattatcccactcctggaactgagaatggagtcaacattgatgttaaagcaagacctagtccttatatgccaccgccttctccgtggacaaatcctagacttgatgtcaatgttgcttatgtggatggccgtgatgagcctgagagaggaaactctaaccagcagtttacgcaggatttatttgtgccatcctctgggaaacgaaaacgtgatgattcttctggacattatcaaaatggtggatctatacctcaacaggatggtgcaggcgatgctatccctgaggcaaactttgagtgtgatgcattccgcataacctctattggcgatagaaaggtaccacgagacttcttcagctcatcatcgaagattcctcaggttgatgggccaatgcctgacccttatgatgaaatgctctctacaccaaatatatatagttatcaaggacccagtgaagagtttaacgaggccagaactcctgctccaaacgagatccaaacgagcactcctgttgctgtacaaaacgatatcattgaagatgatgaagagctgttgaacgaagatgatgatgatgacgagttggacgacctagaaagtggcgaggatatgaacacacaacacctggttttagctcaatttgacaaggtgacgcgcacaaagagcaggtggaagtgcagtctgaaagacgggatcatgcatataaacgataaggacattctcttcaacaaagcagcaggcgagtttgacttctgatcttaacactagcaatgatgcttctaggaaagtccttcaaatgtccagtgtctttctttttaccttatgatttaagaccgaccgagagagacatgagtattcatgggaaagtgtactctggttggcttgttgtacaaaaagaaaagttttttctgtcgaagaaggcgtatcaactttcaccttgtttcatgaactcttattgtctttcacgcaatggaaaattaacttccc

SEQ ID NO: 48458 - protein, 375 aa, Arabidopsis thaliana
  peptide (1)..(375): Ceres Seq. ID no. 13591888
  misc_feature (1)..(375): Pfam Name: Transcription factor IIA, alpha/beta subunit Pfam Description: Transcription factor IIA, alpha/beta subunit
  misc_feature (303)..(375): Homolog of NCBI NO: 15237841 NR Description: hypothetical protein [Arabidopsis thaliana]
  misc_feature (1)..(148): Homolog of NCBI NO: 25406976 NR Description: protein F22G5.18 [imported] - Arabidopsis
  misc_feature (59)..(368): Homolog of NCBI NO: 25406978 NR Description: protein F22G5.14 [imported] - Arabidopsis
  misc_feature (163)..(375): Homolog of NCBI NO: 17065294 NR Description: similar to TFIIA [Arabidopsis thaliana]
  misc_feature (59)..(374): Homolog of NCBI NO: 25406976 NR Description: protein F22G5.18 [imported] - Arabidopsis
  misc_feature (222)..(375): Homolog of NCBI NO: 1429226 NR Description: TFIIA [Arabidopsis thaliana]
  misc_feature (1)..(174): Homolog of NCBI NO: 1429226 NR Description: TFIIA [Arabidopsis thaliana]
  misc_feature (1)..(375): Homolog of NCBI NO: 18390773 NR Description: transcription factor IIA large subunit
  misc_feature (1)..(375): Homolog of NCBI NO: 30680148 NR Description: transcription factor IIA large subunit
  misc_feature (1)..(341): Homolog of NCBI NO: 25406978 NR Description: protein F22G5.14 [imported] - Arabidopsis
MGTTTTTSAVYIHVIEDVVNKVREEFINNGGPGESVLSELQGIWETKMMQAGVLNGPIERSSAQKPTPGGPLTHDLNVPYEGTEEYETPTAEMLFPPTPLQTPLPTPLPGTADNSSMYNIPTGSSDYPTPGTENGVNIDVKARPSPYMPPPSPWTNPRLDVNVAYVDGRDEPERGNSNQQFTQDLFVPSSGKRKRDDSSGHYQNGGSIPQQDGAGDAIPEANFECDAFRITSIGDRKVPRDFFSSSSKIPQVDGPMPDPYDEMLSTPNIYSYQGPSEEFNEARTPAPNEIQTSTPVAVQNDIIEDDEELLNEDDDDDELDDLESGEDMNTQHLVLAQFDKVTRTKSRWKCSLKDGIMHINDKDILFNKAAGEFDF

SEQ ID NO: 48459 - protein, 328 aa, Arabidopsis thaliana
  peptide (1)..(328): Ceres Seq. ID no. 13591889
  misc_feature (1)..(328): Pfam Name: Transcription factor IIA, alpha/beta subunit Pfam Description: Transcription factor IIA, alpha/beta subunit
  misc_feature (256)..(328): Homolog of NCBI NO: 15237841 NR Description: hypothetical protein [Arabidopsis thaliana]
  misc_feature (1)..(101): Homolog of NCBI NO: 25406976 NR Description: protein F22G5.18 [imported] - Arabidopsis
  misc_feature (12)..(321): Homolog of NCBI NO: 25406978 NR Description: protein F22G5.14 [imported] - Arabidopsis
  misc_feature (116)..(328): Homolog of NCBI NO: 17065294 NR Description: similar to TFIIA [Arabidopsis thaliana]
  misc_feature (12)..(327): Homolog of NCBI NO: 25406976 NR Description: protein F22G5.18 [imported] - Arabidopsis
  misc_feature (175)..(328): Homolog of NCBI NO: 1429226 NR Description: TFIIA [Arabidopsis thaliana]
  misc_feature (1)..(127): Homolog of NCBI NO: 1429226 NR Description: TFIIA [Arabidopsis thaliana]
  misc_feature (1)..(328): Homolog of NCBI NO: 18390773 NR Description: transcription factor IIA large subunit
  misc_feature (1)..(328): Homolog of NCBI NO: 30680148 NR Description: transcription factor IIA large subunit
  misc_feature (1)..(294): Homolog of NCBI NO: 25406978 NR Description: protein F22G5.14 [imported] - Arabidopsis
MMQAGVLNGPIERSSAQKPTPGGPLTHDLNVPYEGTEEYETPTAEMLFPPTPLQTPLPTPLPGTADNSSMYNIPTGSSDYPTPGTENGVNIDVKARPSPYMPPPSPWTNPRLDVNVAYVDGRDEPERGNSNQQFTQDLFVPSSGKRKRDDSSGHYQNGGSIPQQDGAGDAIPEANFECDAFRITSIGDRKVPRDFFSSSSKIPQVDGPMPDPYDEMLSTPNIYSYQGPSEEFNEARTPAPNEIQTSTPVAVQNDIIEDDEELLNEDDDDDELDDLESGEDMNTQHLVLAQFDKVTRTKSRWKCSLKDGIMHINDKDILFNKAAGEFDF

SEQ ID NO: 48460 - protein, 327 aa, Arabidopsis thaliana
  peptide (1)..(327): Ceres Seq. ID no. 13591890
  misc_feature (1)..(327): Pfam Name: Transcription factor IIA, alpha/beta subunit Pfam Description: Transcription factor IIA, alpha/beta subunit
  misc_feature (255)..(327): Homolog of NCBI NO: 15237841 NR Description: hypothetical protein [Arabidopsis thaliana]
  misc_feature (1)..(100): Homolog of NCBI NO: 25406976 NR Description: protein F22G5.18 [imported] - Arabidopsis
  misc_feature (11)..(320): Homolog of NCBI NO: 25406978 NR Description: protein F22G5.14 [imported] - Arabidopsis
  misc_feature (115)..(327): Homolog of NCBI NO: 17065294 NR Description: similar to TFIIA [Arabidopsis thaliana]
  misc_feature (11)..(326): Homolog of NCBI NO: 25406976 NR Description: protein F22G5.18 [imported] - Arabidopsis
  misc_feature (174)..(327): Homolog of NCBI NO: 1429226 NR Description: TFIIA [Arabidopsis thaliana]
  misc_feature (1)..(126): Homolog of NCBI NO: 1429226 NR Description: TFIIA [Arabidopsis thaliana]
  misc_feature (1)..(327): Homolog of NCBI NO: 18390773 NR Description: transcription factor IIA large subunit
  misc_feature (1)..(327): Homolog of NCBI NO: 30680148 NR Description: transcription factor IIA large subunit
  misc_feature (1)..(293): Homolog of NCBI NO: 25406978 NR Description: protein F22G5.14 [imported] - Arabidopsis
MQAGVLNGPIERSSAQKPTPGGPLTHDLNVPYEGTEEYETPTAEMLFPPTPLQTPLPTPLPGTADNSSMYNIPTGSSDYPTPGTENGVNIDVKARPSPYMPPPSPWTNPRLDVNVAYVDGRDEPERGNSNQQFTQDLFVPSSGKRKRDDSSGHYQNGGSIPQQDGAGDAIPEANFECDAFRITSIGDRKVPRDFFSSSSKIPQVDGPMPDPYDEMLSTPNIYSYQGPSEEFNEARTPAPNEIQTSTPVAVQNDIIEDDEELLNEDDDDDELDDLESGEDMNTQHLVLAQFDKVTRTKSRWKCSLKDGIMHINDKDILFNKAAGEFDF

SEQ ID NO: 48461 - DNA, 2889 bp, Arabidopsis thaliana
  misc_feature (1)..(2889): Ceres Seq. ID no. 13579098
  misc_feature: MA Experiment ID: 108473 Result: Down-regulated in Transcription
  misc_feature: MA Experiment 108473 PARAMETER Experiment Name: At_Drought_Flowers_cDNA_P Parameter: Timepoint (hr) Value: 7 d
  misc_feature: MA Experiment 108473 PARAMETER Experiment Name: At_Drought_Flowers_cDNA_P Parameter: Tissue Value: Flower
  misc_feature: MA Experiment 108473 PARAMETER Experiment Name: At_Drought_Flowers_cDNA_P Parameter: Treatment Value: Drought vs. No Drought
  misc_feature: MA Experiment ID: 108501 Result: Down-regulated in Transcription
  misc_feature: MA Experiment 108501 PARAMETER Experiment Name: At_ap2_floral_buds_cDNA_P Parameter: Plant Line Value: ap2 (Ler.)
  misc_feature: MA Experiment 108501 PARAMETER Experiment Name: At_ap2_floral_buds_cDNA_P Parameter: Tissue Value: Closed Flower
  misc_feature: MA Experiment ID: 20000171 Result: Up-regulated in Transcription
  misc_feature: MA Experiment 20000171 PARAMETER Experiment Name: At_42deg_Heat_P Parameter: Age (day) Value: 14
  misc_feature: MA Experiment 20000171 PARAMETER Experiment Name: At_42deg_Heat_P Parameter: Organism Value: A. thaliana
  misc_feature: MA Experiment 20000171 PARAMETER Experiment Name: At_42deg_Heat_P Parameter: Plant Line Value: WS
  misc_feature: MA Experiment 20000171 PARAMETER Experiment Name: At_42deg_Heat_P Parameter: Temperature (deg C) Value: 42 vs. 22
  misc_feature: MA Experiment 20000171 PARAMETER Experiment Name: At_42deg_Heat_P Parameter: Timepoint (hr) Value: 1
  misc_feature: MA Experiment 20000171 PARAMETER Experiment Name: At_42deg_Heat_P Parameter: Tissue Value: Aerial
  misc_feature: MA Experiment ID: 20000184 Result: Down-regulated in Transcription
  misc_feature: MA Experiment 20000184 PARAMETER Experiment Name: At_Shoots__P Parameter: Age (day) Value: 7
  misc_feature: MA Experiment 20000184 PARAMETER Experiment Name: At_Shoots__P Parameter: Tissue Value: Shoots vs. Whole Plant
  misc_feature: MA Experiment ID: 20000185 Result: Down-regulated in Transcription
  misc_feature: MA Experiment 20000185 PARAMETER Experiment Name: At_Roots__P Parameter: Age (day) Value: 7 vs. 21
  misc_feature: MA Experiment 20000185 PARAMETER Experiment Name: At_Roots__P Parameter: Organism Value: A. thaliana
  misc_feature: MA Experiment 20000185 PARAMETER Experiment Name: At_Roots__P Parameter: Tissue Value: Roots vs. Whole Plant
  misc_feature: MA Experiment ID: 20000234 Result: Down-regulated in Transcription
  misc_feature: MA Experiment 20000234 PARAMETER Experiment Name: At_Siliques_P Parameter: Age (day) Value: 21
  misc_feature: MA Experiment 20000234 PARAMETER Experiment Name: At_Siliques_P Parameter: Organism Value: A. thaliana
  misc_feature: MA Experiment 20000234 PARAMETER Experiment Name: At_Siliques_P Parameter: Plant Line Value: WS
  misc_feature: MA Experiment 20000234 PARAMETER Experiment Name: At_Siliques_P Parameter: Tissue Value: Less Than 5mm Siliques vs. Whole Plant
  misc_feature: MA Experiment ID: 20000235 Result: Down-regulated in Transcription
  misc_feature: MA Experiment 20000235 PARAMETER Experiment Name: At_Siliques_P Parameter: Age (day) Value: 21
  misc_feature: MA Experiment 20000235 PARAMETER Experiment Name: At_Siliques_P Parameter: Organism Value: A. thaliana
  misc_feature: MA Experiment 20000235 PARAMETER Experiment Name: At_Siliques_P Parameter: Plant Line Value: WS
  misc_feature: MA Experiment 20000235 PARAMETER Experiment Name: At_Siliques_P Parameter: Tissue Value: 5-10mm Siliques vs. Whole Plant
  misc_feature: MA Experiment ID: 20000265 Result: Up-regulated in Transcription
  misc_feature: MA Experiment 20000265 PARAMETER Experiment Name: At_Open_Flower_P Parameter: Age (day) Value: 21
  misc_feature: MA Experiment 20000265 PARAMETER Experiment Name: At_Open_Flower_P Parameter: Plant Line Value: WS
  misc_feature: MA Experiment 20000265 PARAMETER Experiment Name: At_Open_Flower_P Parameter: Tissue Value: Closed Flower vs. Whole Plant
  misc_feature: MA Experiment ID: 20000286 Result: Up-regulated in Transcription
  misc_feature: MA Experiment 20000286 PARAMETER Experiment Name: At_Open_Flower_P Parameter: Age (day) Value: 21
  misc_feature: MA Experiment 20000286 PARAMETER Experiment Name: At_Open_Flower_P Parameter: Plant Line Value: WS
  misc_feature: MA Experiment 20000286 PARAMETER Experiment Name: At_Open_Flower_P Parameter: Tissue Value: Half Open vs. Whole Plant
  misc_feature: MA Experiment ID: 20000438 Result: Down-regulated in Transcription
  misc_feature: MA Experiment 20000438 PARAMETER Experiment Name: At_Shoots__P Parameter: Age (day) Value: 14
  misc_feature: MA Experiment 20000438 PARAMETER Experiment Name: At_Shoots__P Parameter: Tissue Value: Shoots vs. Whole Plant
  misc_feature: MA Experiment ID: 20000439 Result: Down-regulated in Transcription
  misc_feature: MA Experiment 20000439 PARAMETER Experiment Name: At_Roots__P Parameter: Age (day) Value: 14 vs. 21
  misc_feature: MA Experiment 20000439 PARAMETER Experiment Name: At_Roots__P Parameter: Organism Value: A. thaliana
  misc_feature: MA Experiment 20000439 PARAMETER Experiment Name: At_Roots__P Parameter: Tissue Value: Roots vs. Whole Plant
  misc_feature: MA Experiment ID: 20000709 Result: Down-regulated in Transcription
  misc_feature: MA Experiment 20000709 PARAMETER Experiment Name: At_15mM_NH4NO3_L-to-H_P Parameter: Age (hr) Value: 14
  misc_feature: MA Experiment 20000709 PARAMETER Experiment Name: At_15mM_NH4NO3_L-to-H_P Parameter: Organism Value: A. thaliana
  misc_feature: MA Experiment 20000709 PARAMETER Experiment Name: At_15mM_NH4NO3_L-to-H_P Parameter: Plant Line Value: WS
  misc_feature: MA Experiment 20000709 PARAMETER Experiment Name: At_15mM_NH4NO3_L-to-H_P Parameter: Timepoint (hr) Value: 4
  misc_feature: MA Experiment 20000709 PARAMETER Experiment Name: At_15mM_NH4NO3_L-to-H_P Parameter: Tissue Value: Aerial
  misc_feature: MA Experiment 20000709 PARAMETER Experiment Name: At_15mM_NH4NO3_L-to-H_P Parameter: Treatment Value: 15mM NH4NO3 vs. 30mM Mannitol
  misc_feature: MA Experiment ID: 20001771 Result: Up-regulated in Transcription
  misc_feature: MA Experiment 20001771 PARAMETER Experiment Name: At_Far-red-enriched-adult_P Parameter: Age (day) Value: 28
  misc_feature: MA Experiment 20001771 PARAMETER Experiment Name: At_Far-red-enriched-adult_P Parameter: Light Value: Far-red enriched vs. White
  misc_feature: MA Experiment 20001771 PARAMETER Experiment Name: At_Far-red-enriched-adult_P Parameter: Organism Value: A. thaliana
  misc_feature: MA Experiment 20001771 PARAMETER Experiment Name: At_Far-red-enriched-adult_P Parameter: Plant Line Value: Columbia
  misc_feature: MA Experiment 20001771 PARAMETER Experiment Name: At_Far-red-enriched-adult_P Parameter: Timepoint (hr) Value: 16
  misc_feature: MA Experiment 20001771 PARAMETER Experiment Name: At_Far-red-enriched-adult_P Parameter: Tissue Value: Aerial
  misc_feature: MA Experiment ID: 20001773 Result: Up-regulated in Transcription
  misc_feature: MA Experiment 20001773 PARAMETER Experiment Name: At_Far-red-enriched-adult_P Parameter: Age (day) Value: 30
  misc_feature: MA Experiment 20001773 PARAMETER Experiment Name: At_Far-red-enriched-adult_P Parameter: Light Value: Far-red enriched vs. White
  misc_feature: MA Experiment 20001773 PARAMETER Experiment Name: At_Far-red-enriched-adult_P Parameter: Organism Value: A. thaliana
  misc_feature: MA Experiment 20001773 PARAMETER Experiment Name: At_Far-red-enriched-adult_P Parameter: Plant Line Value: Columbia
  misc_feature: MA Experiment 20001773 PARAMETER Experiment Name: At_Far-red-enriched-adult_P Parameter: Timepoint (hr) Value: 48
  misc_feature: MA Experiment 20001773 PARAMETER Experiment Name: At_Far-red-enriched-adult_P Parameter: Tissue Value: Aerial
  misc_feature: MA Experiment ID: 20001910 Result: Down-regulated in Transcription
  misc_feature: MA Experiment 20001910 PARAMETER Experiment Name: At_Drought_Reproduction_P Parameter: Age (day) Value: 37
  misc_feature: MA Experiment 20001910 PARAMETER Experiment Name: At_Drought_Reproduction_P Parameter: Organism Value: A. thaliana
  misc_feature: MA Experiment 20001910 PARAMETER Experiment Name: At_Drought_Reproduction_P Parameter: Plant Line Value: WS
  misc_feature: MA Experiment 20001910 PARAMETER Experiment Name: At_Drought_Reproduction_P Parameter: Timepoint (day) Value: 7
  misc_feature: MA Experiment 20001910 PARAMETER Experiment Name: At_Drought_Reproduction_P Parameter: Tissue Value: Flowers
  misc_feature: MA Experiment 20001910 PARAMETER Experiment Name: At_Drought_Reproduction_P Parameter: Treatment Value: Drought vs. No Drought
atgtttaggggaaaaatatttgtgttatcattattttctatttacgtcctctcatcagcggctgaaaaaaatacatcattttctgcgctttttgcttttggtgattcagtcttagatacgggaaacaataattttcttcttactcttctcaaaggaaattattggccatatggtttgagttttgactataaatttccgacgggaagattcggaaatggaagagttttcaccgatatagttgccgaaggtttacagatcaaaagacttgtaccagcttatagcaagattcgtcgcatcagttctgaagaccttaagactggcgtttgttttgcatcaggtggttcaggaattgacgatcttacatcccgaacactgagagttttatcggcaggtgaccaagtaaaagactttaaagactatttgaagaaactaagaagagtagtgaaacgtaagaaaaaagtaaaagaaatagtttcaaacgctgtgtttcttatttctgaaggaaataatgatcttggatactttgtcgctcccgctcttcttcgattacagtccacaacaacatacaccagtaaaatggttgtttggaccagaaagtttctaaaagatttatacgatcttggagcgagaaaatttgcggtgatgggagtgatgcctgtgggatgtttgcctatccatcgagcctcattcggtggggtattcggatggtgtaacttcctcttgaatagaattacggaggacttcaacatgaaattgcagaaaggtcttacaagttacgcagtagaatatgatttcaaagatgcaaagtttgtttacgtcgacatatacggtactcttatggatcttgtcaaaaatcctatggcctatgggtttacagaagcgaaaaaagcttgttgttgtatgccgaatgcaataataccatgcttccatccagataaatacgtcttctatgactttgctcacccttcccagaaagcctacgaacaaaaatcccttccaacatatttgccatttacacttcttcaagttttccatatactaatggggaggtttcataaatttcctctcctaggtttagttctgttcctcggtctgaccggctcacttatcgccgccaatgagtatgcctgttctagtaccgatatacactttactcgtgccaatttccctaaaggtttcatttttggtaccgcaactgctgcttttcaggttgaaggagctgtaaatgaaggatgtagaggtccaagcatgtgggacgtatacaccaagaaattcccacataaatgtaattatcacaatgccgacgttgctgtcgatttctaccatcgttacaaggaagatatcaagttgatgaaaaatctgaacactgatggctttagattttccattgcatggcccagaatattcccccatggtaggatggagaaaggaataagcaaagcaggtgtgcagtattaccacgatctgatcgatgagctcctcgcaaatggtataacaccattagtaactgtttttcactgggacactcctcaagacttagaagatgaatatggtggctttttaagcgaccgcataataaaggattttacggagtatgcaaacttcacattccaagagtacggagacaaagtgaagcattggatcacatttaacgaaccatgggtgttcagtcgagctggctacgacattgggaacaaagcaccgggacgttgttctaagtacatcaaagaacatggagagatgtgtcacgatggacggtcaggacacgaagcttatatcgttagtcataacatgctcttggcacatgccgatgccgttgatgcctttaggaaatgcgacaagtgcaaaggtggtaaaattgggattgctcacagtccagcttggtttgaggctcatgagctctcggatgaagagcacgaaactcctgtaactggcctgattgacttcatattgggatggcatttgcatccgaccacatatggagattatccacaatcaatgaaggatcacatcggacatcgactgccgaaattcacagaggcacagaaagagaagttgaaaaattcagctgattttgtaggaatcaactattacacatcagtgtttgcattgcacgacgaagagccagatccttcgcaaccaagttggcagagtgattctctcgtggactgggaaccaaggtatgtggataaattcaatgcttttgctaacaagcctgatgttgctaaagtggaagtctacgcaaagggtttgaggagcctcttgaaatatatcaaggacaaatacggcaatcctgaaatcatgatcaccgagaatggatacggagaggatctaggtgagcaagacacaagccttgtagtggcgctgtcagatcagcacagaacatactatatccagaaacatctcttgagcttgcacgaagcaatttgcgatgataaagtaaacgttacagggtattttcattggtcattgatggacaattttgaatggcaagatggatacaaggcgagatttgggctctactacgtcgattacaaaaataatttgacgcgccacgaaaaattatcagcccagtggtactcgagtttcctccacgatggatcaaaagagttcgaaatcgagcacgagttcgaacacgatgagttgtagagtgaattctctacaaacagactttgaaaatttgagtcatatatatattatatattcataaactatttgtttacagtttgctgcagtgaatgcatttccatattcaagtaaataaatcagatactcaatatacagacaagtaaagtttggattgtgttgtagtaagtatttggatagttgaatattgagatcaagggtattcacgaagattccgtactagttattgatattttctattgc

SEQ ID NO: 48462 - protein, 882 aa, Arabidopsis thaliana
  peptide (1)..(882): Ceres Seq. ID no. 13579099
  misc_feature (30)..(334): Pfam Name: GDSL-like Lipase/Acylhydrolase Pfam Description: GDSL-like Lipase/Acylhydrolase
  misc_feature (380)..(864): Homolog of NCBI NO: 15224886 NR Description: glycosyl hydrolase family 1 [Arabidopsis
  misc_feature (348)..(864): Homolog of NCBI NO: 23397037 NR Description: putative beta-glucosidase [Arabidopsis thaliana]
  misc_feature (348)..(864): Homolog of NCBI NO: 12229686 NR Description: Beta-glucosidase homolog precursor
  misc_feature (348)..(864): Homolog of NCBI NO: 15218992 NR Description: glycosyl hydrolase family 1, beta-glucosidase
  misc_feature (348)..(864): Homolog of NCBI NO: 12043529 NR Description: beta-glucosidase 1 [Arabidopsis thaliana]
  misc_feature (353)..(869): Homolog of NCBI NO: 16604493 NR Description: AT3g21370/MHC9_5 [Arabidopsis thaliana]
  misc_feature (353)..(869): Homolog of NCBI NO: 22331243 NR Description: glycosyl hydrolase family 1 [Arabidopsis
  misc_feature (382)..(882): Homolog of NCBI NO: 18377977 NR Description: putative beta-glucosidase [Arabidopsis thaliana]
  misc_feature (348)..(882): Homolog of NCBI NO: 25289457 NR Description: probable beta-glucosidase (EC 3.2.1.21) ATA27
  misc_feature (348)..(882): Homolog of NCBI NO: 15222905 NR Description: glycosyl hydrolase family 1,
MFRGKIFVLSLFSIYVLSSAAEKNTSFSALFAFGDSVLDTGNNNFLLTLLKGNYWPYGLSFDYKFPTGRFGNGRVFTDIVAEGLQIKRLVPAYSKIRRISSEDLKTGVCFASGGSGIDDLTSRTLRVLSAGDQVKDFKDYLKKLRRVVKRKKKVKEIVSNAVFLISEGNNDLGYFVAPALLRLQSTTTYTSKMVVWTRKFLKDLYDLGARKFAVMGVMPVGCLPIHRASFGGVFGWCNFLLNRITEDFNMKLQKGLTSYAVEYDFKDAKFVYVDIYGTLMDLVKNPMAYGFTEAKKACCCMPNAIIPCFHPDKYVFYDFAHPSQKAYEQKSLPTYLPFTLLQVFHILMGRFHKFPLLGLVLFLGLTGSLIAANEYACSSTDIHFTRANFPKGFIFGTATAAFQVEGAVNEGCRGPSMWDVYTKKFPHKCNYHNADVAVDFYHRYKEDIKLMKNLNTDGFRFSIAWPRIFPHGRMEKGISKAGVQYYHDLIDELLANGITPLVTVFHWDTPQDLEDEYGGFLSDRIIKDFTEYANFTFQEYGDKVKHWITFNEPWVFSRAGYDIGNKAPGRCSKYIKEHGEMCHDGRSGHEAYIVSHNMLLAHADAVDAFRKCDKCKGGKIGIAHSPAWFEAHELSDEEHETPVTGLIDFILGWHLHPTTYGDYPQSMKDHIGHRLPKFTEAQKEKLKNSADFVGINYYTSVFALHDEEPDPSQPSWQSDSLVDWEPRYVDKFNAFANKPDVAKVEVYAKGLRSLLKYIKDKYGNPEIMITENGYGEDLGEQDTSLVVALSDQHRTYYIQKHLLSLHEAICDDKVNVTGYFHWSLMDNFEWQDGYKARFGLYYVDYKNNLTRHEKLSAQWYSSFLHDGSKEFEIEHEFEHDEL

SEQ ID NO: 48463 - protein, 690 aa, Arabidopsis thaliana
  peptide (1)..(690): Ceres Seq. ID no. 13579100
  misc_feature (1)..(142): Pfam Name: GDSL-like Lipase/Acylhydrolase Pfam Description: GDSL-like Lipase/Acylhydrolase
  misc_feature (188)..(672): Homolog of NCBI NO: 15224886 NR Description: glycosyl hydrolase family 1 [Arabidopsis
  misc_feature (156)..(672): Homolog of NCBI NO: 23397037 NR Description: putative beta-glucosidase [Arabidopsis thaliana]
  misc_feature (156)..(672): Homolog of NCBI NO: 12229686 NR Description: Beta-glucosidase homolog precursor
  misc_feature (156)..(672): Homolog of NCBI NO: 15218992 NR Description: glycosyl hydrolase family 1, beta-glucosidase
  misc_feature (156)..(672): Homolog of NCBI NO: 12043529 NR Description: beta-glucosidase 1 [Arabidopsis thaliana]
  misc_feature (161)..(677): Homolog of NCBI NO: 16604493 NR Description: AT3g21370/MHC9_5 [Arabidopsis thaliana]
  misc_feature (161)..(677): Homolog of NCBI NO: 22331243 NR Description: glycosyl hydrolase family 1 [Arabidopsis
  misc_feature (190)..(690): Homolog of NCBI NO: 18377977 NR Description: putative beta-glucosidase [Arabidopsis thaliana]
  misc_feature (156)..(690): Homolog of NCBI NO: 25289457 NR Description: probable beta-glucosidase (EC 3.2.1.21) ATA27
  misc_feature (156)..(690): Homolog of NCBI NO: 15222905 NR Description: glycosyl hydrolase family 1,
MVVWTRKFLKDLYDLGARKFAVMGVMPVGCLPIHRASFGGVFGWCNFLLNRITEDFNMKLQKGLTSYAVEYDFKDAKFVYVDIYGTLMDLVKNPMAYGFTEAKKACCCMPNAIIPCFHPDKYVFYDFAHPSQKAYEQKSLPTYLPFTLLQVFHILMGRFHKFPLLGLVLFLGLTGSLIAANEYACSSTDIHFTRANFPKGFIFGTATAAFQVEGAVNEGCRGPSMWDVYTKKFPHKCNYHNADVAVDFYHRYKEDIKLMKNLNTDGFRFSIAWPRIFPHGRMEKGISKAGVQYYHDLIDELLANGITPLVTVFHWDTPQDLEDEYGGFLSDRIIKDFTEYANFTFQEYGDKVKHWITFNEPWVFSRAGYDIGNKAPGRCSKYIKEHGEMCHDGRSGHEAYIVSHNMLLAHADAVDAFRKCDKCKGGKIGIAHSPAWFEAHELSDEEHETPVTGLIDFILGWHLHPTTYGDYPQSMKDHIGHRLPKFTEAQKEKLKNSADFVGINYYTSVFALHDEEPDPSQPSWQSDSLVDWEPRYVDKFNAFANKPDVAKVEVYAKGLRSLLKYIKDKYGNPEIMITENGYGEDLGEQDTSLVVALSDQHRTYYIQKHLLSLHEAICDDKVNVTGYFHWSLMDNFEWQDGYKARFGLYYVDYKNNLTRHEKLSAQWYSSFLHDGSKEFEIEHEFEHDEL

SEQ ID NO: 48464 - protein, 668 aa, Arabidopsis thaliana
  peptide (1)..(668): Ceres Seq. ID no. 13579101
  misc_feature (1)..(120): Pfam Name: GDSL-like Lipase/Acylhydrolase Pfam Description: GDSL-like Lipase/Acylhydrolase
  misc_feature (166)..(650): Homolog of NCBI NO: 15224886 NR Description: glycosyl hydrolase family 1 [Arabidopsis
  misc_feature (134)..(650): Homolog of NCBI NO: 23397037 NR Description: putative beta-glucosidase [Arabidopsis thaliana]
  misc_feature (134)..(650): Homolog of NCBI NO: 12229686 NR Description: Beta-glucosidase homolog precursor
  misc_feature (134)..(650): Homolog of NCBI NO: 15218992 NR Description: glycosyl hydrolase family 1, beta-glucosidase
  misc_feature (134)..(650): Homolog of NCBI NO: 12043529 NR Description: beta-glucosidase 1 [Arabidopsis thaliana]
  misc_feature (139)..(655): Homolog of NCBI NO: 16604493 NR Description: AT3g21370/MHC9_5 [Arabidopsis thaliana]
  misc_feature (139)..(655): Homolog of NCBI NO: 22331243 NR Description: glycosyl hydrolase family 1 [Arabidopsis
  misc_feature (168)..(668): Homolog of NCBI NO: 18377977 NR Description: putative beta-glucosidase [Arabidopsis thaliana]
  misc_feature (134)..(668): Homolog of NCBI NO: 25289457 NR Description: probable beta-glucosidase (EC 3.2.1.21) ATA27
  misc_feature (134)..(668): Homolog of NCBI NO: 15222905 NR Description: glycosyl hydrolase family 1,
MGVMPVGCLPIHRASFGGVFGWCNFLLNRITEDFNMKLQKGLTSYAVEYDFKDAKFVYVDIYGTLMDLVKNPMAYGFTEAKKACCCMPNAIIPCFHPDKYVFYDFAHPSQKAYEQKSLPTYLPFTLLQVFHILMGRFHKFPLLGLVLFLGLTGSLIAANEYACSSTDIHFTRANFPKGFIFGTATAAFQVEGAVNEGCRGPSMWDVYTKKFPHKCNYHNADVAVDFYHRYKEDIKLMKNLNTDGFRFSIAWPRIFPHGRMEKGISKAGVQYYHDLIDELLANGITPLVTVFHWDTPQDLEDEYGGFLSDRIIKDFTEYANFTFQEYGDKVKHWITFNEPWVFSRAGYDIGNKAPGRCSKYIKEHGEMCHDGRSGHEAYIVSHNMLLAHADAVDAFRKCDKCKGGKIGIAHSPAWFEAHELSDEEHETPVTGLIDFILGWHLHPTTYGDYPQSMKDHIGHRLPKFTEAQKEKLKNSADFVGINYYTSVFALHDEEPDPSQPSWQSDSLVDWEPRYVDKFNAFANKPDVAKVEVYAKGLRSLLKYIKDKYGNPEIMITENGYGEDLGEQDTSLVVALSDQHRTYYIQKHLLSLHEAICDDKVNVTGYFHWSLMDNFEWQDGYKARFGLYYVDYKNNLTRHEKLSAQWYSSFLHDGSKEFEIEHEFEHDEL

SEQ ID NO: 48465 - DNA, 1577 bp, Arabidopsis thaliana; identical to SEQ ID NO: 21528
  misc_feature (1)..(1577): Ceres Seq. ID no. 12575042
  misc_feature: MA Experiment ID: 108434 Result: Up-regulated in Transcription
  misc_feature: MA Experiment 108434 PARAMETER Experiment Name: At_Root_Tips_cDNA_P Parameter: Tissue Value: Root Tips
  misc_feature: MA Experiment ID: 108461 Result: Down-regulated in Transcription
  misc_feature: MA Experiment 108461 PARAMETER Experiment Name: At_Germinating_Seeds_cDNA_P Parameter: Age (day) Value: 1 vs. 0
  misc_feature: MA Experiment 108461 PARAMETER Experiment Name: At_Germinating_Seeds_cDNA_P Parameter: Tissue Value: Germinating Seeds
  misc_feature: MA Experiment ID: 108462 Result: Down-regulated in Transcription
  misc_feature: MA Experiment 108462 PARAMETER Experiment Name: At_Germinating_Seeds_cDNA_P Parameter: Age (day) Value: 2 vs. 0
  misc_feature: MA Experiment 108462 PARAMETER Experiment Name: At_Germinating_Seeds_cDNA_P Parameter: Tissue Value: Germinating Seeds
  misc_feature: MA Experiment ID: 108463 Result: Down-regulated in Transcription
  misc_feature: MA Experiment 108463 PARAMETER Experiment Name: At_Germinating_Seeds_cDNA_P Parameter: Age (day) Value: 3 vs. 0
  misc_feature: MA Experiment 108463 PARAMETER Experiment Name: At_Germinating_Seeds_cDNA_P Parameter: Tissue Value: Germinating Seeds
  misc_feature: MA Experiment ID: 108464 Result: Down-regulated in Transcription
  misc_feature: MA Experiment 108464 PARAMETER Experiment Name: At_Germinating_Seeds_cDNA_P Parameter: Age (day) Value: 4 vs. 0
  misc_feature: MA Experiment 108464 PARAMETER Experiment Name: At_Germinating_Seeds_cDNA_P Parameter: Tissue Value: Germinating Seeds
  misc_feature: MA Experiment ID: 108595 Result: Down-regulated in Transcription
  misc_feature: MA Experiment 108595 PARAMETER Experiment Name: At_Ler-pi_Ovule_cDNA_P Parameter: Plant Line Value: null
  misc_feature: MA Experiment ID: 20000087 Result: Down-regulated in Transcription
  misc_feature: MA Experiment 20000087 PARAMETER Experiment Name: At_100uM_ABA_Mutants_cDNA_P Parameter: Plant Line Value: WS
  misc_feature: MA Experiment 20000087 PARAMETER Experiment Name: At_100uM_ABA_Mutants_cDNA_P Parameter: Timepoint (hr) Value: 6
  misc_feature: MA Experiment 20000087 PARAMETER Experiment Name: At_100uM_ABA_Mutants_cDNA_P Parameter: Tissue Value: Aerial
  misc_feature: MA Experiment 20000087 PARAMETER Experiment Name: At_100uM_ABA_Mutants_cDNA_P Parameter: Treatment Value: 100uM ABA vs. No Treatment
  misc_feature: MA Experiment ID: 20000111 Result: Up-regulated in Transcription
  misc_feature: MA Experiment 20000111 PARAMETER Experiment Name: At_42deg_Heat_cDNA_P Parameter: Temperature (deg C) Value: 42 vs. 22
  misc_feature: MA Experiment 20000111 PARAMETER Experiment Name: At_42deg_Heat_cDNA_P Parameter: Timepoint (hr) Value: 6
  misc_feature: MA Experiment 20000111 PARAMETER Experiment Name: At_42deg_Heat_cDNA_P Parameter: Tissue Value: Aerial
  misc_feature: MA Experiment ID: 20000180 Result: Down-regulated in Transcription
  misc_feature: MA Experiment 20000180 PARAMETER Experiment Name: At_Germinating_Seeds_P Parameter: Age (hr) Value: 24 vs. 0
  misc_feature: MA Experiment 20000180 PARAMETER Experiment Name: At_Germinating_Seeds_P Parameter: Tissue Value: Germinating Seeds
  misc_feature: MA Experiment ID: 20000495 Result: Down-regulated in Transcription
  misc_feature: MA Experiment 20000495 PARAMETER Experiment Name: At_Guard_Cells_P Parameter: Harvest Date Value: 8/2/2002
  misc_feature: MA Experiment 20000495 PARAMETER Experiment Name: At_Guard_Cells_P Parameter: Organism Value: A. thaliana
  misc_feature: MA Experiment 20000495 PARAMETER Experiment Name: At_Guard_Cells_P Parameter: Tissue Value: Guard Cells vs. Leaves
  misc_feature: MA Experiment ID: 20000496 Result: Down-regulated in Transcription
  misc_feature: MA Experiment 20000496 PARAMETER Experiment Name: At_Guard_Cells_P Parameter: Harvest Date Value: 7/19/2002
  misc_feature: MA Experiment 20000496 PARAMETER Experiment Name: At_Guard_Cells_P Parameter: Organism Value: Canola
  misc_feature: MA Experiment 20000496 PARAMETER Experiment Name: At_Guard_Cells_P Parameter: Tissue Value: Guard Cells vs. Leaves
  misc_feature: MA Experiment ID: 20001451 Result: Down-regulated in Transcription
  misc_feature: MA Experiment 20001451 PARAMETER Experiment Name: At_Far-red-induction_P Parameter: Age (day) Value: 7
  misc_feature: MA Experiment 20001451 PARAMETER Experiment Name: At_Far-red-induction_P Parameter: Light Value: Far-red vs. White
  misc_feature: MA Experiment 20001451 PARAMETER Experiment Name: At_Far-red-induction_P Parameter: Organism Value: A. thaliana
  misc_feature: MA Experiment 20001451 PARAMETER Experiment Name: At_Far-red-induction_P Parameter: Plant Line Value: Columbia
  misc_feature: MA Experiment 20001451 PARAMETER Experiment Name: At_Far-red-induction_P Parameter: Timepoint (hr) Value: 24
  misc_feature: MA Experiment 20001451 PARAMETER Experiment Name: At_Far-red-induction_P Parameter: Tissue Value: Whole Plant
  misc_feature: MA Experiment ID: 20001558 Result: Up-regulated in Transcription
  misc_feature: MA Experiment 20001558 PARAMETER Experiment Name: At_Drought_Soil_Dry_P Parameter: Age (day) Value: 27
  misc_feature: MA Experiment 20001558 PARAMETER Experiment Name: At_Drought_Soil_Dry_P Parameter: Organism Value: A. thaliana
  misc_feature: MA Experiment 20001558 PARAMETER Experiment Name: At_Drought_Soil_Dry_P Parameter: Plant Line Value: WS
  misc_feature: MA Experiment 20001558 PARAMETER Experiment Name: At_Drought_Soil_Dry_P Parameter: Post Timepoint (hr) Value: 6
  misc_feature: MA Experiment 20001558 PARAMETER Experiment Name: At_Drought_Soil_Dry_P Parameter: Post-Treatment Value: Re-Water vs. No Drought
  misc_feature: MA Experiment 20001558 PARAMETER Experiment Name: At_Drought_Soil_Dry_P Parameter: Timepoint (day) Value: 13
  misc_feature: MA Experiment 20001558 PARAMETER Experiment Name: At_Drought_Soil_Dry_P Parameter: Treatment Value: Drought vs. No Drought
  misc_feature: MA Experiment ID: 20001757 Result: Up-regulated in Transcription
  misc_feature: MA Experiment 20001757 PARAMETER Experiment Name: At_50mM_NH4NO3_L-to-H_P Parameter: Timepoint (hr) Value: 6
  misc_feature: MA Experiment 20001757 PARAMETER Experiment Name: At_50mM_NH4NO3_L-to-H_P Parameter: Tissue Value: Leaf
  misc_feature: MA Experiment 20001757 PARAMETER Experiment Name: At_50mM_NH4NO3_L-to-H_P Parameter: Treatment Value: 50mM NH4NO3 vs 100mM Mannitol

SEQ ID NO: 48466 - protein, 465 aa, Arabidopsis thaliana; identical to SEQ ID NO: 21529
  peptide (1)..(465): Ceres Seq. ID no. 12575043
  misc_feature (312)..(428): Pfam Name: PCI domain Pfam Description: PCI domain
  misc_feature (312)..(428): Pfam Name: PCI domain Pfam Description: PCI domain
  misc_feature (32)..(451): Homolog of NCBI NO: 17389740 NR Description: eukaryotic translation initiation factor 3,
  misc_feature (32)..(459): Homolog of NCBI NO: 38494387 NR Description: Murine mammary tumor integration site 6 [Silurana
  misc_feature (32)..(451): Homolog of NCBI NO: 34866211 NR Description: similar to Eukaryotic translation initiation
  misc_feature (32)..(451): Homolog of NCBI NO: 12847562 NR Description: unnamed protein product [Mus musculus]
  misc_feature (32)..(451): Homolog of NCBI NO: 4503521 NR Description: murine mammary tumor integration site 6 (oncogene
  misc_feature (32)..(451): Homolog of NCBI NO: 17389740 NR Description: eukaryotic translation initiation factor 3,
  misc_feature (32)..(451): Homolog of NCBI NO: 34866211 NR Description: similar to Eukaryotic translation initiation
  misc_feature (32)..(451): Homolog of NCBI NO: 4503521 NR Description: murine mammary tumor integration site 6 (oncogene
  misc_feature (25)..(465): Homolog of NCBI NO: 18410687 NR Description: translation initiation factor 3 -like protein
  misc_feature (25)..(465): Homolog of NCBI NO: 7689381 NR Description: eIF3e [Arabidopsis thaliana]
  misc_feature (32)..(465): Homolog of NCBI NO: 34900328 NR Description: putative translation initiation factor 3
  misc_feature (32)..(457): Homolog of NCBI NO: 34394686 NR Description: putative eukaryotic initiation factor 3E
  misc_feature (144)..(465): Homolog of NCBI NO: 34900030 NR Description: putative eIF3e [Oryza sativa (japonica
  misc_feature (32)..(451): Homolog of NCBI NO: 12847562 NR Description: unnamed protein product [Mus musculus]
  misc_feature (32)..(459): Homolog of NCBI NO: 38494387 NR Description: Murine mammary tumor integration site 6 [Silurana
  misc_feature (144)..(465): Homolog of NCBI NO: 34900030 NR Description: putative eIF3e [Oryza sativa (japonica
  misc_feature (32)..(457): Homolog of NCBI NO: 34394686 NR Description: putative eukaryotic initiation factor 3E
  misc_feature (32)..(465): Homolog of NCBI NO: 34900328 NR Description: putative translation initiation factor 3
  misc_feature (25)..(465): Homolog of NCBI NO: 7689381 NR Description: eIF3e [Arabidopsis thaliana]
  misc_feature (25)..(465): Homolog of NCBI NO: 18410687 NR Description: translation initiation factor 3 -like protein

SEQ ID NO: 48467 - protein, 441 aa, Arabidopsis thaliana; identical to SEQ ID NO: 21530
  peptide (1)..(441): Ceres Seq. ID no. 12575044
  misc_feature (288)..(404): Pfam Name: PCI domain Pfam Description: PCI domain
  misc_feature (288)..(404): Pfam Name: PCI domain Pfam Description: PCI domain
  misc_feature (8)..(427): Homolog of NCBI NO: 17389740 NR Description: eukaryotic translation initiation factor 3,
  misc_feature (8)..(435): Homolog of NCBI NO: 38494387 NR Description: Murine mammary tumor integration site 6 [Silurana
  misc_feature (8)..(427): Homolog of NCBI NO: 34866211 NR Description: similar to Eukaryotic translation initiation
  misc_feature (8)..(427): Homolog of NCBI NO: 12847562 NR Description: unnamed protein product [Mus musculus]
  misc_feature (8)..(427): Homolog of NCBI NO: 4503521 NR Description: murine mammary tumor integration site 6 (oncogene
  misc_feature (8)..(427): Homolog of NCBI NO: 17389740 NR Description: eukaryotic translation initiation factor 3,
  misc_feature (8)..(427): Homolog of NCBI NO: 34866211 NR Description: similar to Eukaryotic translation initiation
  misc_feature (8)..(427): Homolog of NCBI NO: 4503521 NR Description: murine mammary tumor integration site 6 (oncogene
  misc_feature (1)..(441): Homolog of NCBI NO: 18410687 NR Description: translation initiation factor 3 -like protein
  misc_feature (1)..(441): Homolog of NCBI NO: 7689381 NR Description: eIF3e [Arabidopsis thaliana]
  misc_feature (8)..(441): Homolog of NCBI NO: 34900328 NR Description: putative translation initiation factor 3
  misc_feature (8)..(433): Homolog of NCBI NO: 34394686 NR Description: putative eukaryotic initiation factor 3E
  misc_feature (120)..(441): Homolog of NCBI NO: 34900030 NR Description: putative eIF3e [Oryza sativa (japonica
  misc_feature (8)..(427): Homolog of NCBI NO: 12847562 NR Description: unnamed protein product [Mus musculus]
  misc_feature (8)..(435): Homolog of NCBI NO: 38494387 NR Description: Murine mammary tumor integration site 6 [Silurana
  misc_feature (120)..(441): Homolog of NCBI NO: 34900030 NR Description: putative eIF3e [Oryza sativa (japonica
  misc_feature (8)..(433): Homolog of NCBI NO: 34394686 NR Description: putative eukaryotic initiation factor 3E
  misc_feature (8)..(441): Homolog of NCBI NO: 34900328 NR Description: putative translation initiation factor 3
  misc_feature (1)..(441): Homolog of NCBI NO: 7689381 NR Description: eIF3e [Arabidopsis thaliana]
  misc_feature (1)..(441): Homolog of NCBI NO: 18410687 NR Description: translation initiation factor 3 -like protein

SEQ ID NO: 48468 - protein, 388 aa, Arabidopsis thaliana; identical to SEQ ID NO: 21531
  peptide (1)..(388): Ceres Seq. ID no. 12575045
  misc_feature (235)..(351): Pfam Name: PCI domain Pfam Description: PCI domain
  misc_feature (235)..(351): Pfam Name: PCI domain Pfam Description: PCI domain
  misc_feature (1)..(374): Homolog of NCBI NO: 17389740 NR Description: eukaryotic translation initiation factor 3,
  misc_feature (1)..(382): Homolog of NCBI NO: 38494387 NR Description: Murine mammary tumor integration site 6 [Silurana
  misc_feature (1)..(374): Homolog of NCBI NO: 34866211 NR Description: similar to Eukaryotic translation initiation
  misc_feature (1)..(374): Homolog of NCBI NO: 12847562 NR Description: unnamed protein product [Mus musculus]
  misc_feature (1)..(374): Homolog of NCBI NO: 4503521 NR Description: murine mammary tumor integration site 6 (oncogene
  misc_feature (1)..(374): Homolog of NCBI NO: 17389740 NR Description: eukaryotic translation initiation factor 3,
  misc_feature (1)..(374): Homolog of NCBI NO: 34866211 NR Description: similar to Eukaryotic translation initiation
  misc_feature (1)..(374): Homolog of NCBI NO: 4503521 NR Description: murine mammary tumor integration site 6 (oncogene
  misc_feature (1)..(388): Homolog of NCBI NO: 18410687 NR Description: translation initiation factor 3 -like protein
  misc_feature (1)..(388): Homolog of NCBI NO: 7689381 NR Description: eIF3e [Arabidopsis thaliana]
  misc_feature (1)..(388): Homolog of NCBI NO: 34900328 NR Description: putative translation initiation factor 3
  misc_feature (1)..(380): Homolog of NCBI NO: 34394686 NR Description: putative eukaryotic initiation factor 3E
  misc_feature (67)..(388): Homolog of NCBI NO: 34900030 NR Description: putative eIF3e [Oryza sativa (japonica
  misc_feature (1)..(374): Homolog of NCBI NO: 12847562 NR Description: unnamed protein product [Mus musculus]
  misc_feature (1)..(382): Homolog of NCBI NO: 38494387 NR Description: Murine mammary tumor integration site 6 [Silurana
  misc_feature (67)..(388): Homolog of NCBI NO: 34900030 NR Description: putative eIF3e [Oryza sativa (japonica
  misc_feature (1)..(380): Homolog of NCBI NO: 34394686 NR Description: putative eukaryotic initiation factor 3E
  misc_feature (1)..(388): Homolog of NCBI NO: 34900328 NR Description: putative translation initiation factor 3
  misc_feature (1)..(388): Homolog of NCBI NO: 7689381 NR Description: eIF3e [Arabidopsis thaliana]
  misc_feature (1)..(388): Homolog of NCBI NO: 18410687 NR Description: translation initiation factor 3 -like protein

SEQ ID NO: 48469 - DNA, 1389 bp, Arabidopsis thaliana
  misc_feature (1)..(1389): Ceres Seq. ID no. 13591846
  misc_feature: MA Experiment ID: 20000265 Result: Up-regulated in Transcription
  misc_feature: MA Experiment 20000265 PARAMETER Experiment Name: At_Open_Flower_P Parameter: Age (day) Value: 21
  misc_feature: MA Experiment 20000265 PARAMETER Experiment Name: At_Open_Flower_P Parameter: Plant Line Value: WS
  misc_feature: MA Experiment 20000265 PARAMETER Experiment Name: At_Open_Flower_P Parameter: Tissue Value: Closed Flower vs. Whole Plant
  misc_feature: MA Experiment ID: 20000794 Result: Down-regulated in Transcription
  misc_feature: MA Experiment 20000794 PARAMETER Experiment Name: At_Petals_P Parameter: Age (day) Value: 23-25 days
  misc_feature: MA Experiment 20000794 PARAMETER Experiment Name: At_Petals_P Parameter: Plant Line Value: WS
  misc_feature: MA Experiment 20000794 PARAMETER Experiment Name: At_Petals_P Parameter: Tissue Value: Petals vs. Whole plant
gaggtcagttctattcgtgaaatcgagtctcctcttattcgacgacctgccccaactataaacatgacttttacacacttgacataacttcgtttgtatcgcttttttgaaattctatatattattattgtttgagcagaaactaagacaaaattaagacttttctctcttcttcttctccactgggtcgatctttacgaggttcacttgtacggattcactttaacaacagattcgccatggccgccgccgtcgcagcaccgagactcatctccttgaaagccgtcgcgaagctaggtttccgtgagatctctcaaatccgacaattggctccgcttcactctgcgatacctcatttcggaatgctgcgatgtagatcgcggcagccgttttctacctctgttgtgaaagctcaagctactgctactgagcaatcaccaggggaagttgttcaaaaagtggaatctccagtggtcgttatcactggtgcctcgagagggattggtaaagcaattgctctagccttgggtaaagctggctgcaaggtcttggtgaattatgctaggtcagcaaaagaggctgaagaagttgctaaacagattgaagaatatggtggccaggctatcacttttgggggtgatgtctcgaaagcgactgatgtggatgcgatgatgaaaaccgctcttgacaaatggggaaccattgatgttgtggttaacaatgcaggaattactcgggataccttgttaatacgaatgaagcaatcacaatgggacgaagtgattgctttgaatctcactggtgtatttctctgtactcaggcagcagtaaagatcatgatgaagaaaaaaaggggaagaatcatcaatatctcgtcagttgttggtctcattggtaatattggtcaagcaaactacgcagcggctaaaggtggagttatttcgttttccaagactgctgccagagaaggtgcgagcaggaatataaatgtcaatgtggtttgccccggattcattgcatctgacatgactgcagagcttggagaagacatggaaaagaaaatcctgggaacaatcccattaggacggtatggaaaagctgaagaagtggctggcttggtagaattcttggctctcagtcctgcagccagttacataaccggacaggcattcaccattgatggaggtattgctatctagacatttggtatgagtcggcttttgtttagttaaaacaatttggtaaaagagacaaagttgagttctttttagcacttggtcggattgctattttgcggtttctgttaagaaatatgtaacacttactgcttaaactacgtatttggtcactttcagaaactagaaatcgattaatccaatctcgcattct

SEQ ID NO: 48470 - protein, 319 aa, Arabidopsis thaliana
  peptide (1)..(319): Ceres Seq. ID no. 13591847
  misc_feature (76)..(319): Homolog of NCBI NO: 13096234 NR Description: Chain A, The X-Ray Structure Of Beta-Keto Acyl
  misc_feature (61)..(319): Homolog of NCBI NO: 14422253 NR Description: 3-oxyacyl-[acyl carrier protein] reductase
  misc_feature (5)..(319): Homolog of NCBI NO: 14422247 NR Description: 3-oxyacyl-[acyl-carrier protein] reductase
  misc_feature (1)..(281): Homolog of NCBI NO: 7431035 NR Description: 3-oxoacyl-
  misc_feature (4)..(319): Homolog of NCBI NO: 14422249 NR Description: 3-oxyacyl-[acyl carrier protein] reductase
  misc_feature (1)..(319): Homolog of NCBI NO: 14422251 NR Description: 3-oxyacyl-[acyl carrier protein] reductase
  misc_feature (1)..(319): Homolog of NCBI NO: 14422263 NR Description: beta-oxyacyl-[acyl-carrier protein] reductase
  misc_feature (1)..(319): Homolog of NCBI NO: 25283414 NR Description: protein F21J9.2 [imported] - Arabidopsis thaliana
  misc_feature (1)..(319): Homolog of NCBI NO: 99753 NR Description: 3-oxoacyl-
  misc_feature (1)..(319): Homolog of NCBI NO: 18395461 NR Description: 3-oxoacyl-[acyl-carrier protein] reductase
MAAAVAAPRLISLKAVAKLGFREISQIRQLAPLHSAIPHFGMLRCRSRQPFSTSVVKAQATATEQSPGEVVQKVESPVVVITGASRGIGKAIALALGKAGCKVLVNYARSAKEAEEVAKQIEEYGGQAITFGGDVSKATDVDAMMKTALDKWGTIDVVVNNAGITRDTLLIRMKQSQWDEVIALNLTGVFLCTQAAVKIMMKKKRGRIINISSVVGLIGNIGQANYAAAKGGVISFSKTAAREGASRNINVNVVCPGFIASDMTAELGEDMEKKILGTIPLGRYGKAEEVAGLVEFLALSPAASYITGQAFTIDGGIAI

SEQ ID NO: 48471 - protein, 278 aa, Arabidopsis thaliana
  peptide (1)..(278): Ceres Seq. ID no. 13591848
  misc_feature (35)..(278): Homolog of NCBI NO: 13096234 NR Description: Chain A, The X-Ray Structure Of Beta-Keto Acyl
  misc_feature (20)..(278): Homolog of NCBI NO: 14422253 NR Description: 3-oxyacyl-[acyl carrier protein] reductase
  misc_feature (1)..(278): Homolog of NCBI NO: 14422247 NR Description: 3-oxyacyl-[acyl-carrier protein] reductase
  misc_feature (1)..(240): Homolog of NCBI NO: 7431035 NR Description: 3-oxoacyl-
  misc_feature (1)..(278): Homolog of NCBI NO: 14422249 NR Description: 3-oxyacyl-[acyl carrier protein] reductase
  misc_feature (1)..(278): Homolog of NCBI NO: 14422251 NR Description: 3-oxyacyl-[acyl carrier protein] reductase
  misc_feature (1)..(278): Homolog of NCBI NO: 14422263 NR Description: beta-oxyacyl-[acyl-carrier protein] reductase
  misc_feature (1)..(278): Homolog of NCBI NO: 25283414 NR Description: protein F21J9.2 [imported] - Arabidopsis thaliana
  misc_feature (1)..(278): Homolog of NCBI NO: 99753 NR Description: 3-oxoacyl-
  misc_feature (1)..(278): Homolog of NCBI NO: 18395461 NR Description: 3-oxoacyl-[acyl-carrier protein] reductase
MLRCRSRQPFSTSVVKAQATATEQSPGEVVQKVESPVVVITGASRGIGKAIALALGKAGCKVLVNYARSAKEAEEVAKQIEEYGGQAITFGGDVSKATDVDAMMKTALDKWGTIDVVVNNAGITRDTLLIRMKQSQWDEVIALNLTGVFLCTQAAVKIMMKKKRGRIINISSVVGLIGNIGQANYAAAKGGVISFSKTAAREGASRNINVNVVCPGFIASDMTAELGEDMEKKILGTIPLGRYGKAEEVAGLVEFLALSPAASYITGQAFTIDGGIAI

SEQ ID NO: 48472 - protein, 176 aa, Arabidopsis thaliana
  peptide (1)..(176): Ceres Seq. ID no. 13591849
  misc_feature (1)..(176): Homolog of NCBI NO: 13096234 NR Description: Chain A, The X-Ray Structure Of Beta-Keto Acyl
  misc_feature (1)..(176): Homolog of NCBI NO: 14422253 NR Description: 3-oxyacyl-[acyl carrier protein] reductase
  misc_feature (1)..(176): Homolog of NCBI NO: 14422247 NR Description: 3-oxyacyl-[acyl-carrier protein] reductase
  misc_feature (1)..(138): Homolog of NCBI NO: 7431035 NR Description: 3-oxoacyl-
  misc_feature (1)..(176): Homolog of NCBI NO: 14422249 NR Description: 3-oxyacyl-[acyl carrier protein] reductase
  misc_feature (1)..(176): Homolog of NCBI NO: 14422251 NR Description: 3-oxyacyl-[acyl carrier protein] reductase
  misc_feature (1)..(176): Homolog of NCBI NO: 14422263 NR Description: beta-oxyacyl-[acyl-carrier protein] reductase
  misc_feature (1)..(176): Homolog of NCBI NO: 25283414 NR Description: protein F21J9.2 [imported] - Arabidopsis thaliana
  misc_feature (1)..(176): Homolog of NCBI NO: 99753 NR Description: 3-oxoacyl-
  misc_feature (1)..(176): Homolog of NCBI NO: 18395461 NR Description: 3-oxoacyl-[acyl-carrier protein] reductase
MMKTALDKWGTIDVVVNNAGITRDTLLIRMKQSQWDEVIALNLTGVFLCTQAAVKIMMKKKRGRIINISSVVGLIGNIGQANYAAAKGGVISFSKTAAREGASRNINVNVVCPGFIASDMTAELGEDMEKKILGTIPLGRYGKAEEVAGLVEFLALSPAASYITGQAFTIDGGIAI

SEQ ID NO: 48473 - DNA, 2389 bp, Arabidopsis thaliana; identical to SEQ ID NO: 43744
  misc_feature (1)..(2389): Ceres Seq. ID no. 13591580
  misc_feature: MA Experiment ID: 108434 Result: Up-regulated in Transcription
  misc_feature: MA Experiment 108434 PARAMETER Experiment Name: At_Root_Tips_cDNA_P Parameter: Tissue Value: Root Tips
  misc_feature: MA Experiment ID: 108463 Result: Down-regulated in Transcription
  misc_feature: MA Experiment 108463 PARAMETER Experiment Name: At_Germinating_Seeds_cDNA_P Parameter: Age (day) Value: 3 vs. 0
  misc_feature: MA Experiment 108463 PARAMETER Experiment Name: At_Germinating_Seeds_cDNA_P Parameter: Tissue Value: Germinating Seeds
  misc_feature: MA Experiment ID: 108469 Result: Up-regulated in Transcription
  misc_feature: MA Experiment ID: 108573 Result: Down-regulated in Transcription
  misc_feature: MA Experiment 108573 PARAMETER Experiment Name: At_Drought_cDNA_P Parameter: Timepoint (hr) Value: 6
  misc_feature: MA Experiment 108573 PARAMETER Experiment Name: At_Drought_cDNA_P Parameter: Tissue Value: Aerial
  misc_feature: MA Experiment 108573 PARAMETER Experiment Name: At_Drought_cDNA_P Parameter: Treatment Value: Drought vs. No Drought
  misc_feature: MA Experiment ID: 108576 Result: Up-regulated in Transcription
  misc_feature: MA Experiment 108576 PARAMETER Experiment Name: At_42deg_Heat_cDNA_P Parameter: Temperature (deg C) Value: 42 vs. 22
  misc_feature: MA Experiment 108576 PARAMETER Experiment Name: At_42deg_Heat_cDNA_P Parameter: Timepoint (hr) Value: 1
  misc_feature: MA Experiment 108576 PARAMETER Experiment Name: At_42deg_Heat_cDNA_P Parameter: Tissue Value: Aerial
  misc_feature: MA Experiment ID: 108577 Result: Up-regulated in Transcription
  misc_feature: MA Experiment 108577 PARAMETER Experiment Name: At_42deg_Heat_cDNA_P Parameter: Temperature (deg C) Value: 42 vs. 22
  misc_feature: MA Experiment 108577 PARAMETER Experiment Name: At_42deg_Heat_cDNA_P Parameter: Timepoint (hr) Value: 6
  misc_feature: MA Experiment 108577 PARAMETER Experiment Name: At_42deg_Heat_cDNA_P Parameter: Tissue Value: Aerial
  misc_feature: MA Experiment ID: 108595 Result: Up-regulated in Transcription
  misc_feature: MA Experiment 108595 PARAMETER Experiment Name: At_Ler-pi_Ovule_cDNA_P Parameter: Plant Line Value: null
  misc_feature: MA Experiment ID: 108668 Result: Up-regulated in Transcription
  misc_feature: MA Experiment 108668 PARAMETER Experiment Name: At_2mM_SA_cDNA_P Parameter: Plant Line Value: WS
  misc_feature: MA Experiment 108668 PARAMETER Experiment Name: At_2mM_SA_cDNA_P Parameter: Timepoint (hr) Value: 6
  misc_feature: MA Experiment 108668 PARAMETER Experiment Name: At_2mM_SA_cDNA_P Parameter: Treatment Value: 2mM SA vs. No Treatment
  misc_feature: MA Experiment ID: 20000086 Result: Up-regulated in Transcription
  misc_feature: MA Experiment 20000086 PARAMETER Experiment Name: At_100uM_ABA_Mutants_cDNA_P Parameter: Plant Line Value: CS22
  misc_feature: MA Experiment 20000086 PARAMETER Experiment Name: At_100uM_ABA_Mutants_cDNA_P Parameter: Timepoint (hr) Value: 6
  misc_feature: MA Experiment 20000086 PARAMETER Experiment Name: At_100uM_ABA_Mutants_cDNA_P Parameter: Tissue Value: Aerial
  misc_feature: MA Experiment 20000086 PARAMETER Experiment Name: At_100uM_ABA_Mutants_cDNA_P Parameter: Treatment Value: 100uM ABA vs. No Treatment
  misc_feature: MA Experiment ID: 20000089 Result: Up-regulated in Transcription
  misc_feature: MA Experiment ID: 20000090 Result: Up-regulated in Transcription
  misc_feature: MA Experiment ID: 20000093 Result: Up-regulated in Transcription
  misc_feature: MA Experiment 20000093 PARAMETER Experiment Name: At_42deg_Heat_cDNA_P Parameter: Temperature (deg C) Value: 42 vs. 22
  misc_feature: MA Experiment 20000093 PARAMETER Experiment Name: At_42deg_Heat_cDNA_P Parameter: Timepoint (hr) Value: 0.5
  misc_feature: MA Experiment 20000093 PARAMETER Experiment Name: At_42deg_Heat_cDNA_P Parameter: Tissue Value: Aerial
  misc_feature: MA Experiment ID: 20000111 Result: Up-regulated in Transcription
  misc_feature: MA Experiment 20000111 PARAMETER Experiment Name: At_42deg_Heat_cDNA_P Parameter: Temperature (deg C) Value: 42 vs. 22
  misc_feature: MA Experiment 20000111 PARAMETER Experiment Name: At_42deg_Heat_cDNA_P Parameter: Timepoint (hr) Value: 6
  misc_feature: MA Experiment 20000111 PARAMETER Experiment Name: At_42deg_Heat_cDNA_P Parameter: Tissue Value: Aerial
  misc_feature: MA Experiment ID: 20000112 Result: Up-regulated in Transcription
  misc_feature: MA Experiment 20000112 PARAMETER Experiment Name: At_42deg_Heat_cDNA_P Parameter: Temperature (deg C) Value: 42 vs. 22
  misc_feature: MA Experiment 20000112 PARAMETER Experiment Name: At_42deg_Heat_cDNA_P Parameter: Timepoint (hr) Value: 2
  misc_feature: MA Experiment 20000112 PARAMETER Experiment Name: At_42deg_Heat_cDNA_P Parameter: Tissue Value: Aerial
  misc_feature: MA Experiment ID: 20000171 Result: Up-regulated in Transcription
  misc_feature: MA Experiment 20000171 PARAMETER Experiment Name: At_42deg_Heat_P Parameter: Age (day) Value: 14
  misc_feature: MA Experiment 20000171 PARAMETER Experiment Name: At_42deg_Heat_P Parameter: Organism Value: A. thaliana
  misc_feature: MA Experiment 20000171 PARAMETER Experiment Name: At_42deg_Heat_P Parameter: Plant Line Value: WS
  misc_feature: MA Experiment 20000171 PARAMETER Experiment Name: At_42deg_Heat_P Parameter: Temperature (deg C) Value: 42 vs. 22
  misc_feature: MA Experiment 20000171 PARAMETER Experiment Name: At_42deg_Heat_P Parameter: Timepoint (hr) Value: 1
  misc_feature: MA Experiment 20000171 PARAMETER Experiment Name: At_42deg_Heat_P Parameter: Tissue Value: Aerial
  misc_feature: MA Experiment ID: 20000173 Result: Up-regulated in Transcription
  misc_feature: MA Experiment 20000173 PARAMETER Experiment Name: At_42deg_Heat_P Parameter: Age (day) Value: 14
  misc_feature: MA Experiment 20000173 PARAMETER Experiment Name: At_42deg_Heat_P Parameter: Organism Value: A. thaliana
  misc_feature: MA Experiment 20000173 PARAMETER Experiment Name: At_42deg_Heat_P Parameter: Plant Line Value: WS
  misc_feature: MA Experiment 20000173 PARAMETER Experiment Name: At_42deg_Heat_P Parameter: Temperature (deg C) Value: 42 vs. 22
  misc_feature: MA Experiment 20000173 PARAMETER Experiment Name: At_42deg_Heat_P Parameter: Timepoint (hr) Value: 6
  misc_feature: MA Experiment 20000173 PARAMETER Experiment Name: At_42deg_Heat_P Parameter: Tissue Value: Aerial
  misc_feature: MA Experiment ID: 20000179 Result: Up-regulated in Transcription
  misc_feature: MA Experiment 20000179 PARAMETER Experiment Name: At_Germinating_Seeds_P Parameter: Age (hr) Value: 6 vs. 0
  misc_feature: MA Experiment 20000179 PARAMETER Experiment Name: At_Germinating_Seeds_P Parameter: Tissue Value: Germinating Seeds
  misc_feature: MA Experiment ID: 20000182 Result: Up-regulated in Transcription
  misc_feature: MA Experiment 20000182 PARAMETER Experiment Name: At_2mM_SA_P Parameter: Age (day) Value: 14
  misc_feature: MA Experiment 20000182 PARAMETER Experiment Name: At_2mM_SA_P Parameter: Organism Value: A. thaliana
  misc_feature: MA Experiment 20000182 PARAMETER Experiment Name: At_2mM_SA_P Parameter: Plant Line Value: WS
  misc_feature: MA Experiment 20000182 PARAMETER Experiment Name: At_2mM_SA_P Parameter: Timepoint (hr) Value: 6
  misc_feature: MA Experiment 20000182 PARAMETER Experiment Name: At_2mM_SA_P Parameter: Tissue Value: Aerial
  misc_feature: MA Experiment 20000182 PARAMETER Experiment Name: At_2mM_SA_P Parameter: Treatment Value: 2mM SA vs. No Treatment
  misc_feature: MA Experiment ID: 20000224 Result: Up-regulated in Transcription
  misc_feature: MA Experiment ID: 20000227 Result: Up-regulated in Transcription
  misc_feature: MA Experiment 20000227 PARAMETER Experiment Name: At_Root-Tips-vs-Tops_P Parameter: Tissue Value: Root Tips vs. Root Tops
  misc_feature: MA Experiment ID: 20000234 Result: Up-regulated in Transcription
  misc_feature: MA Experiment 20000234 PARAMETER Experiment Name: At_Siliques_P Parameter: Age (day) Value: 21
  misc_feature: MA Experiment 20000234 PARAMETER Experiment Name: At_Siliques_P Parameter: Organism Value: A. thaliana
  misc_feature: MA Experiment 20000234 PARAMETER Experiment Name: At_Siliques_P Parameter: Plant Line Value: WS
  misc_feature: MA Experiment 20000234 PARAMETER Experiment Name: At_Siliques_P Parameter: Tissue Value: Less Than 5mm Siliques vs. Whole Plant
  misc_feature: MA Experiment ID: 20000235 Result: Up-regulated in Transcription
  misc_feature: MA Experiment 20000235 PARAMETER Experiment Name: At_Siliques_P Parameter: Age (day) Value: 21
  misc_feature: MA Experiment 20000235 PARAMETER Experiment Name: At_Siliques_P Parameter: Organism Value: A. thaliana
  misc_feature: MA Experiment 20000235 PARAMETER Experiment Name: At_Siliques_P Parameter: Plant Line Value: WS
  misc_feature: MA Experiment 20000235 PARAMETER Experiment Name: At_Siliques_P Parameter: Tissue Value: 5-10mm Siliques vs. Whole Plant
  misc_feature: MA Experiment ID: 20000495 Result: Up-regulated in Transcription
  misc_feature: MA Experiment 20000495 PARAMETER Experiment Name: At_Guard_Cells_P Parameter: Harvest Date Value: 8/2/2002
  misc_feature: MA Experiment 20000495 PARAMETER Experiment Name: At_Guard_Cells_P Parameter: Organism Value: A. thaliana
  misc_feature: MA Experiment 20000495 PARAMETER Experiment Name: At_Guard_Cells_P Parameter: Tissue Value: Guard Cells vs. Leaves
  misc_feature: MA Experiment ID: 20000794 Result: Down-regulated in Transcription
  misc_feature: MA Experiment 20000794 PARAMETER Experiment Name: At_Petals_P Parameter: Age (day) Value: 23-25 days
  misc_feature: MA Experiment 20000794 PARAMETER Experiment Name: At_Petals_P Parameter: Plant Line Value: WS
  misc_feature: MA Experiment 20000794 PARAMETER Experiment Name: At_Petals_P Parameter: Tissue Value: Petals vs. Whole plant
  misc_feature: MA Experiment ID: 20001450 Result: Down-regulated in Transcription
  misc_feature: MA Experiment 20001450 PARAMETER Experiment Name: At_Far-red-induction_P Parameter: Age (day) Value: 7
  misc_feature: MA Experiment 20001450 PARAMETER Experiment Name: At_Far-red-induction_P Parameter: Light Value: Far-red vs. White
  misc_feature: MA Experiment 20001450 PARAMETER Experiment Name: At_Far-red-induction_P Parameter: Organism Value: A. thaliana
  misc_feature: MA Experiment 20001450 PARAMETER Experiment Name: At_Far-red-induction_P Parameter: Plant Line Value: Columbia
  misc_feature: MA Experiment 20001450 PARAMETER Experiment Name: At_Far-red-induction_P Parameter: Timepoint (hr) Value: 8
  misc_feature: MA Experiment 20001450 PARAMETER Experiment Name: At_Far-red-induction_P Parameter: Tissue Value: Whole Plant
  misc_feature: MA Experiment ID: 20001556 Result: Up-regulated in Transcription
  misc_feature: MA Experiment 20001556 PARAMETER Experiment Name: At_Drought_Soil_Dry_P Parameter: Age (day) Value: 26
  misc_feature: MA Experiment 20001556 PARAMETER Experiment Name: At_Drought_Soil_Dry_P Parameter: Organism Value: A. thaliana
  misc_feature: MA Experiment 20001556 PARAMETER Experiment Name: At_Drought_Soil_Dry_P Parameter: Plant Line Value: WS
  misc_feature: MA Experiment 20001556 PARAMETER Experiment Name: At_Drought_Soil_Dry_P Parameter: Post Timepoint (hr) Value: None
  misc_feature: MA Experiment 20001556 PARAMETER Experiment Name: At_Drought_Soil_Dry_P Parameter: Post-Treatment Value: None
  misc_feature: MA Experiment 20001556 PARAMETER Experiment Name: At_Drought_Soil_Dry_P Parameter: Timepoint (day) Value: 12
  misc_feature: MA Experiment 20001556 PARAMETER Experiment Name: At_Drought_Soil_Dry_P Parameter: Treatment Value: Drought vs. No Drought
  misc_feature: MA Experiment ID: 20001558 Result: Up-regulated in Transcription
  misc_feature: MA Experiment 20001558 PARAMETER Experiment Name: At_Drought_Soil_Dry_P Parameter: Age (day) Value: 27
  misc_feature: MA Experiment 20001558 PARAMETER Experiment Name: At_Drought_Soil_Dry_P Parameter: Organism Value: A. thaliana
  misc_feature: MA Experiment 20001558 PARAMETER Experiment Name: At_Drought_Soil_Dry_P Parameter: Plant Line Value: WS
  misc_feature: MA Experiment 20001558 PARAMETER Experiment Name: At_Drought_Soil_Dry_P Parameter: Post Timepoint (hr) Value: 6
  misc_feature: MA Experiment 20001558 PARAMETER Experiment Name: At_Drought_Soil_Dry_P Parameter: Post-Treatment Value: Re-Water vs. No Drought
  misc_feature: MA Experiment 20001558 PARAMETER Experiment Name: At_Drought_Soil_Dry_P Parameter: Timepoint (day) Value: 13
  misc_feature: MA Experiment 20001558 PARAMETER Experiment Name: At_Drought_Soil_Dry_P Parameter: Treatment Value: Drought vs. No Drought
  misc_feature: MA Experiment ID: 20001560 Result: Up-regulated in Transcription
  misc_feature: MA Experiment 20001560 PARAMETER Experiment Name: At_Drought_Soil_Dry_P Parameter: Age (day) Value: 28
  misc_feature: MA Experiment 20001560 PARAMETER Experiment Name: At_Drought_Soil_Dry_P Parameter: Organism Value: A. thaliana
  misc_feature: MA Experiment 20001560 PARAMETER Experiment Name: At_Drought_Soil_Dry_P Parameter: Plant Line Value: WS
  misc_feature: MA Experiment 20001560 PARAMETER Experiment Name: At_Drought_Soil_Dry_P Parameter: Post Timepoint (hr) Value: None
  misc_feature: MA Experiment 20001560 PARAMETER Experiment Name: At_Drought_Soil_Dry_P Parameter: Post-Treatment Value: None
  misc_feature: MA Experiment 20001560 PARAMETER Experiment Name: At_Drought_Soil_Dry_P Parameter: Timepoint (day) Value: 14
  misc_feature: MA Experiment 20001560 PARAMETER Experiment Name: At_Drought_Soil_Dry_P Parameter: Treatment Value: Drought vs. No Drought

SEQ ID NO: 48474 - protein, 669 aa, Arabidopsis thaliana; identical to SEQ ID NO: 25857
  peptide (1)..(669): Ceres Seq. ID no. 15221053
  misc_feature (34)..(655): Homolog of NCBI NO: 14423732 NR Description: Heat shock 70 kDa protein
  misc_feature (35)..(656): Homolog of NCBI NO: 21263753 NR Description: Heat shock cognate 71 kDa protein (Hsc70.1)
  misc_feature (199)..(669): Homolog of NCBI NO: 168424 NR Description: polypeptide chain-binding protein
  misc_feature (15)..(669): Homolog of NCBI NO: 23480384 NR Description: heat shock protein [Plasmodium yoelii yoelii]
  misc_feature (35)..(669): Homolog of NCBI NO: 29539338 NR Description: Heat shock 70 kDa protein [Cyanidioschyzon
  misc_feature (37)..(669): Homolog of NCBI NO: 1037176 NR Description: immunoglobulin heavy chain binding protein
  misc_feature (1)..(664): Homolog of NCBI NO: 13897312 NR Description: luminal binding protein, BiP [Scherffelia dubia]
  misc_feature (34)..(655): Homolog of NCBI NO: 14423732 NR Description: Heat shock 70 kDa protein
  misc_feature (35)..(656): Homolog of NCBI NO: 21263753 NR Description: Heat shock cognate 71 kDa protein (Hsc70.1)
  misc_feature (199)..(669): Homolog of NCBI NO: 168424 NR Description: polypeptide chain-binding protein
  misc_feature (15)..(669): Homolog of NCBI NO: 23480384 NR Description: heat shock protein [Plasmodium yoelii yoelii]
  misc_feature (35)..(669): Homolog of NCBI NO: 29539338 NR Description: Heat shock 70 kDa protein [Cyanidioschyzon
  misc_feature (37)..(669): Homolog of NCBI NO: 1037176 NR Description: immunoglobulin heavy chain binding protein
  misc_feature (1)..(664): Homolog of NCBI NO: 13897312 NR Description: luminal binding protein, BiP [Scherffelia dubia]
  misc_feature (34)..(655): Homolog of NCBI NO: 14423732 NR Description: Heat shock 70 kDa protein
  misc_feature (35)..(656): Homolog of NCBI NO: 21263753 NR Description: Heat shock cognate 71 kDa protein (Hsc70.1)
  misc_feature (199)..(669): Homolog of NCBI NO: 168424 NR Description: polypeptide chain-binding protein
  misc_feature (15)..(669): Homolog of NCBI NO: 23480384 NR Description: heat shock protein [Plasmodium yoelii yoelii]
  misc_feature (35)..(669): Homolog of NCBI NO: 29539338 NR Description: Heat shock 70 kDa protein [Cyanidioschyzon
  misc_feature (37)..(669): Homolog of NCBI NO: 1037176 NR Description: immunoglobulin heavy chain binding protein
  misc_feature (1)..(664): Homolog of NCBI NO: 13897312 NR Description: luminal binding protein, BiP [Scherffelia dubia]
  misc_feature (34)..(655): Homolog of NCBI NO: 14423732 NR Description: Heat shock 70 kDa protein
  misc_feature (35)..(656): Homolog of NCBI NO: 21263753 NR Description: Heat shock cognate 71 kDa protein (Hsc70.1)
  misc_feature (199)..(669): Homolog of NCBI NO: 168424 NR Description: polypeptide chain-binding protein
  misc_feature (15)..(669): Homolog of NCBI NO: 23480384 NR Description: heat shock protein [Plasmodium yoelii yoelii]
  misc_feature (35)..(669): Homolog of NCBI NO: 29539338 NR Description: Heat shock 70 kDa protein [Cyanidioschyzon
  misc_feature (37)..(669): Homolog of NCBI NO: 1037176 NR Description: immunoglobulin heavy chain binding protein
  misc_feature (1)..(664): Homolog of NCBI NO: 13897312 NR Description: luminal binding protein, BiP [Scherffelia dubia]
  misc_feature (34)..(655): Homolog of NCBI NO: 14423732 NR Description: Heat shock 70 kDa protein
  misc_feature (35)..(656): Homolog of NCBI NO: 21263753 NR Description: Heat shock cognate 71 kDa protein (Hsc70.1)
  misc_feature (199)..(669): Homolog of NCBI NO: 168424 NR Description: polypeptide chain-binding protein
  misc_feature (15)..(669): Homolog of NCBI NO: 23480384 NR Description: heat shock protein [Plasmodium yoelii yoelii]
  misc_feature (35)..(669): Homolog of NCBI NO: 29539338 NR Description: Heat shock 70 kDa protein [Cyanidioschyzon
  misc_feature (37)..(669): Homolog of NCBI NO: 1037176 NR Description: immunoglobulin heavy chain binding protein
  misc_feature (1)..(664): Homolog of NCBI NO: 13897312 NR Description: luminal binding protein, BiP [Scherffelia dubia]

SEQ ID NO: 48475 - protein, 516 aa, Arabidopsis thaliana; identical to SEQ ID NO: 25858
  peptide (1)..(516): Ceres Seq. ID no. 15221054
  misc_feature (1)..(502): Homolog of NCBI NO: 14423732 NR Description: Heat shock 70 kDa protein
  misc_feature (1)..(503): Homolog of NCBI NO: 21263753 NR Description: Heat shock cognate 71 kDa protein (Hsc70.1)
  misc_feature (46)..(516): Homolog of NCBI NO: 168424 NR Description: polypeptide chain-binding protein
  misc_feature (1)..(516): Homolog of NCBI NO: 23480384 NR Description: heat shock protein [Plasmodium yoelii yoelii]
  misc_feature (1)..(516): Homolog of NCBI NO: 29539338 NR Description: Heat shock 70 kDa protein [Cyanidioschyzon
  misc_feature (1)..(516): Homolog of NCBI NO: 1037176 NR Description: immunoglobulin heavy chain binding protein
  misc_feature (1)..(511): Homolog of NCBI NO: 13897312 NR Description: luminal binding protein, BiP [Scherffelia dubia]
  misc_feature (1)..(502): Homolog of NCBI NO: 14423732 NR Description: Heat shock 70 kDa protein
  misc_feature (1)..(503): Homolog of NCBI NO: 21263753 NR Description: Heat shock cognate 71 kDa protein (Hsc70.1)
  misc_feature (46)..(516): Homolog of NCBI NO: 168424 NR Description: polypeptide chain-binding protein
  misc_feature (1)..(516): Homolog of NCBI NO: 23480384 NR Description: heat shock protein [Plasmodium yoelii yoelii]
  misc_feature (1)..(516): Homolog of NCBI NO: 29539338 NR Description: Heat shock 70 kDa protein [Cyanidioschyzon
  misc_feature (1)..(516): Homolog of NCBI NO: 1037176 NR Description: immunoglobulin heavy chain binding protein
  misc_feature (1)..(511): Homolog of NCBI NO: 13897312 NR Description: luminal binding protein, BiP [Scherffelia dubia]
  misc_feature (1)..(502): Homolog of NCBI NO: 14423732 NR Description: Heat shock 70 kDa protein
  misc_feature (1)..(503): Homolog of NCBI NO: 21263753 NR Description: Heat shock cognate 71 kDa protein (Hsc70.1)
  misc_feature (46)..(516): Homolog of NCBI NO: 168424 NR Description: polypeptide chain-binding protein
  misc_feature (1)..(516): Homolog of NCBI NO: 23480384 NR Description: heat shock protein [Plasmodium yoelii yoelii]
  misc_feature (1)..(516): Homolog of NCBI NO: 29539338 NR Description: Heat shock 70 kDa protein [Cyanidioschyzon
  misc_feature (1)..(516): Homolog of NCBI NO: 1037176 NR Description: immunoglobulin heavy chain binding protein
  misc_feature (1)..(511): Homolog of NCBI NO: 13897312 NR Description: luminal binding protein, BiP [Scherffelia dubia]
  misc_feature (1)..(502): Homolog of NCBI NO: 14423732 NR Description: Heat shock 70 kDa protein
  misc_feature (1)..(503): Homolog of NCBI NO: 21263753 NR Description: Heat shock cognate 71 kDa protein (Hsc70.1)
  misc_feature (46)..(516): Homolog of NCBI NO: 168424 NR Description: polypeptide chain-binding protein
  misc_feature (1)..(516): Homolog of NCBI NO: 23480384 NR Description: heat shock protein [Plasmodium yoelii yoelii]
  misc_feature (1)..(516): Homolog of NCBI NO: 29539338 NR Description: Heat shock 70 kDa protein [Cyanidioschyzon
  misc_feature (1)..(516): Homolog of NCBI NO: 1037176 NR Description: immunoglobulin heavy chain binding protein
  misc_feature (1)..(511): Homolog of NCBI NO: 13897312 NR Description: luminal binding protein, BiP [Scherffelia dubia]
  misc_feature (1)..(502): Homolog of NCBI NO: 14423732 NR Description: Heat shock 70 kDa protein
  misc_feature (1)..(503): Homolog of NCBI NO: 21263753 NR Description: Heat shock cognate 71 kDa protein (Hsc70.1)
  misc_feature (46)..(516): Homolog of NCBI NO: 168424 NR Description: polypeptide chain-binding protein
  misc_feature (1)..(516): Homolog of NCBI NO: 23480384 NR Description: heat shock protein [Plasmodium yoelii yoelii]
  misc_feature (1)..(516): Homolog of NCBI NO: 29539338 NR Description: Heat shock 70 kDa protein [Cyanidioschyzon
  misc_feature (1)..(516): Homolog of NCBI NO: 1037176 NR Description: immunoglobulin heavy chain binding protein
  misc_feature (1)..(511): Homolog of NCBI NO: 13897312 NR Description: luminal binding protein, BiP [Scherffelia dubia]

SEQ ID NO: 48476 - protein, 511 aa, Arabidopsis thaliana; identical to SEQ ID NO: 43747
  peptide (1)..(511): Ceres Seq. ID no. 15221055
  misc_feature (1)..(497): Homolog of NCBI NO: 14423732 NR Description: Heat shock 70 kDa protein
  misc_feature (1)..(498): Homolog of NCBI NO: 21263753 NR Description: Heat shock cognate 71 kDa protein (Hsc70.1)
  misc_feature (41)..(511): Homolog of NCBI NO: 168424 NR Description: polypeptide chain-binding protein
  misc_feature (1)..(511): Homolog of NCBI NO: 23480384 NR Description: heat shock protein [Plasmodium yoelii yoelii]
  misc_feature (1)..(511): Homolog of NCBI NO: 29539338 NR Description: Heat shock 70 kDa protein [Cyanidioschyzon
  misc_feature (1)..(511): Homolog of NCBI NO: 1037176 NR Description: immunoglobulin heavy chain binding protein
  misc_feature (1)..(506): Homolog of NCBI NO: 13897312 NR Description: luminal binding protein, BiP [Scherffelia dubia]
  misc_feature (1)..(497): Homolog of NCBI NO: 14423732 NR Description: Heat shock 70 kDa protein
  misc_feature (1)..(498): Homolog of NCBI NO: 21263753 NR Description: Heat shock cognate 71 kDa protein (Hsc70.1)
  misc_feature (41)..(511): Homolog of NCBI NO: 168424 NR Description: polypeptide chain-binding protein
  misc_feature (1)..(511): Homolog of NCBI NO: 23480384 NR Description: heat shock protein [Plasmodium yoelii yoelii]
  misc_feature (1)..(511): Homolog of NCBI NO: 29539338 NR Description: Heat shock 70 kDa protein [Cyanidioschyzon
  misc_feature (1)..(511): Homolog of NCBI NO: 1037176 NR Description: immunoglobulin heavy chain binding protein
  misc_feature (1)..(506): Homolog of NCBI NO: 13897312 NR Description: luminal binding protein, BiP [Scherffelia dubia]
  misc_feature (1)..(497): Homolog of NCBI NO: 14423732 NR Description: Heat shock 70 kDa protein
  misc_feature (1)..(498): Homolog of NCBI NO: 21263753 NR Description: Heat shock cognate 71 kDa protein (Hsc70.1)
  misc_feature (41)..(511): Homolog of NCBI NO: 168424 NR Description: polypeptide chain-binding protein
  misc_feature (1)..(511): Homolog of NCBI NO: 23480384 NR Description: heat shock protein [Plasmodium yoelii yoelii]
  misc_feature (1)..(511): Homolog of NCBI NO: 29539338 NR Description: Heat shock 70 kDa protein [Cyanidioschyzon
  misc_feature (1)..(511): Homolog of NCBI NO: 1037176 NR Description: immunoglobulin heavy chain binding protein
  misc_feature (1)..(506): Homolog of NCBI NO: 13897312 NR Description: luminal binding protein, BiP [Scherffelia dubia]
  misc_feature (1)..(497): Homolog of NCBI NO: 14423732 NR Description: Heat shock 70 kDa protein
  misc_feature (1)..(498): Homolog of NCBI NO: 21263753 NR Description: Heat shock cognate 71 kDa protein (Hsc70.1)
  misc_feature (41)..(511): Homolog of NCBI NO: 168424 NR Description: polypeptide chain-binding protein
  misc_feature (1)..(511): Homolog of NCBI NO: 23480384 NR Description: heat shock protein [Plasmodium yoelii yoelii]
  misc_feature (1)..(511): Homolog of NCBI NO: 29539338 NR Description: Heat shock 70 kDa protein [Cyanidioschyzon
  misc_feature (1)..(511): Homolog of NCBI NO: 1037176 NR Description: immunoglobulin heavy chain binding protein
  misc_feature (1)..(506): Homolog of NCBI NO: 13897312 NR Description: luminal binding protein, BiP [Scherffelia dubia]
  misc_feature (1)..(497): Homolog of NCBI NO: 14423732 NR Description: Heat shock 70 kDa protein
  misc_feature (1)..(498): Homolog of NCBI NO: 21263753 NR Description: Heat shock cognate 71 kDa protein (Hsc70.1)
  misc_feature (41)..(511): Homolog of NCBI NO: 168424 NR Description: polypeptide chain-binding protein
  misc_feature (1)..(511): Homolog of NCBI NO: 23480384 NR Description: heat shock protein [Plasmodium yoelii yoelii]
  misc_feature (1)..(511): Homolog of NCBI NO: 29539338 NR Description: Heat shock 70 kDa protein [Cyanidioschyzon
  misc_feature (1)..(511): Homolog of NCBI NO: 1037176 NR Description: immunoglobulin heavy chain binding protein
  misc_feature (1)..(506): Homolog of NCBI NO: 13897312 NR Description: luminal binding protein, BiP [Scherffelia dubia]

SEQ ID NO: 48477 - DNA, 2086 bp, Arabidopsis thaliana; identical to SEQ ID NO: 46535
  misc_feature (1)..(2086): Ceres Seq. ID no. 12639069
  misc_feature: MA Experiment ID: 20000179 Result: Up-regulated in Transcription
  misc_feature: MA Experiment 20000179 PARAMETER Experiment Name: At_Germinating_Seeds_P Parameter: Age (hr) Value: 6 vs. 0
  misc_feature: MA Experiment 20000179 PARAMETER Experiment Name: At_Germinating_Seeds_P Parameter: Tissue Value: Germinating Seeds
  misc_feature: MA Experiment ID: 20000180 Result: Up-regulated in Transcription
  misc_feature: MA Experiment 20000180 PARAMETER Experiment Name: At_Germinating_Seeds_P Parameter: Age (hr) Value: 24 vs. 0
  misc_feature: MA Experiment 20000180 PARAMETER Experiment Name: At_Germinating_Seeds_P Parameter: Tissue Value: Germinating Seeds

SEQ ID NO: 48478 - protein, 528 aa, Arabidopsis thaliana; identical to SEQ ID NO: 46536
  peptide (1)..(528): Ceres Seq. ID no. 12639070
  misc_feature (54)..(312): Pfam Name: Protein kinase domain Pfam Description: Protein kinase domain
  misc_feature (54)..(312): Pfam Name: Protein kinase domain Pfam Description: Protein kinase domain
  misc_feature (1)..(528): Homolog of NCBI NO: 18416872 NR Description: calcium-dependent protein kinase-like protein
  misc_feature (1)..(528): Homolog of NCBI NO: 15239742 NR Description: calcium-dependent protein kinase
  misc_feature (29)..(525): Homolog of NCBI NO: 30699042 NR Description: calcium-dependent protein kinase, putative (CDPK)
  misc_feature (1)..(525): Homolog of NCBI NO: 28416563 NR Description: At1g18890 [Arabidopsis thaliana]
  misc_feature (1)..(525): Homolog of NCBI NO: 25287677 NR Description: calcium-dependent protein kinase 1
  misc_feature (1)..(528): Homolog of NCBI NO: 18416872 NR Description: calcium-dependent protein kinase-like protein
  misc_feature (29)..(525): Homolog of NCBI NO: 30699042 NR Description: calcium-dependent protein kinase, putative (CDPK)
  misc_feature (1)..(525): Homolog of NCBI NO: 25287677 NR Description: calcium-dependent protein kinase 1
  misc_feature (1)..(528): Homolog of NCBI NO: 22331739 NR Description: calcium-dependent protein kinase
  misc_feature (1)..(528): Homolog of NCBI NO: 17064926 NR Description: calcium-dependent protein kinase [Arabidopsis
  misc_feature (33)..(528): Homolog of NCBI NO: 34907990 NR Description: putative calcium-dependent protein kinase
  misc_feature (1)..(20): Homolog of NCBI NO: 34907990 NR Description: putative calcium-dependent protein kinase
  misc_feature (1)..(425): Homolog of NCBI NO: 11259886 NR Description: calcium dependent protein kinase
  misc_feature (1)..(525): Homolog of NCBI NO: 28416563 NR Description: At1g18890 [Arabidopsis thaliana]
  misc_feature (1)..(528): Homolog of NCBI NO: 15239742 NR Description: calcium-dependent protein kinase
  misc_feature (1)..(425): Homolog of NCBI NO: 11259886 NR Description: calcium dependent protein kinase
  misc_feature (1)..(20): Homolog of NCBI NO: 34907990 NR Description: putative calcium-dependent protein kinase
  misc_feature (33)..(528): Homolog of NCBI NO: 34907990 NR Description: putative calcium-dependent protein kinase
  misc_feature (1)..(528): Homolog of NCBI NO: 17064926 NR Description: calcium-dependent protein kinase [Arabidopsis
  misc_feature (1)..(528): Homolog of NCBI NO: 22331739 NR Description: calcium-dependent protein kinase

SEQ ID NO: 48479 - protein, 423 aa, Arabidopsis thaliana; identical to SEQ ID NO: 46537
  peptide (1)..(423): Ceres Seq. ID no. 12639071
  misc_feature (1)..(207): Pfam Name: Protein kinase domain Pfam Description: Protein kinase domain
  misc_feature (1)..(207): Pfam Name: Protein kinase domain Pfam Description: Protein kinase domain
  misc_feature (1)..(419): Homolog of NCBI NO: 14484895 NR Description: calcium-dependent protein kinase [Funaria
  misc_feature (1)..(423): Homolog of NCBI NO: 18416872 NR Description: calcium-dependent protein kinase-like protein
  misc_feature (1)..(423): Homolog of NCBI NO: 15239742 NR Description: calcium-dependent protein kinase
  misc_feature (1)..(420): Homolog of NCBI NO: 30699042 NR Description: calcium-dependent protein kinase, putative (CDPK)
  misc_feature (1)..(420): Homolog of NCBI NO: 28416563 NR Description: At1g18890 [Arabidopsis thaliana]
  misc_feature (1)..(419): Homolog of NCBI NO: 14484895 NR Description: calcium-dependent protein kinase [Funaria
  misc_feature (1)..(423): Homolog of NCBI NO: 15239742 NR Description: calcium-dependent protein kinase
  misc_feature (1)..(420): Homolog of NCBI NO: 28416563 NR Description: At1g18890 [Arabidopsis thaliana]
  misc_feature (1)..(423): Homolog of NCBI NO: 22331739 NR Description: calcium-dependent protein kinase
  misc_feature (1)..(423): Homolog of NCBI NO: 17064926 NR Description: calcium-dependent protein kinase [Arabidopsis
  misc_feature (1)..(423): Homolog of NCBI NO: 34907990 NR Description: putative calcium-dependent protein kinase
  misc_feature (1)..(320): Homolog of NCBI NO: 11259886 NR Description: calcium dependent protein kinase
  misc_feature (1)..(420): Homolog of NCBI NO: 25287677 NR Description: calcium-dependent protein kinase 1
  misc_feature (1)..(420): Homolog of NCBI NO: 30699042 NR Description: calcium-dependent protein kinase, putative (CDPK)
  misc_feature (1)..(423): Homolog of NCBI NO: 18416872 NR Description: calcium-dependent protein kinase-like protein
  misc_feature (1)..(420): Homolog of NCBI NO: 25287677 NR Description: calcium-dependent protein kinase 1
  misc_feature (1)..(320): Homolog of NCBI NO: 11259886 NR Description: calcium dependent protein kinase
  misc_feature (1)..(423): Homolog of NCBI NO: 34907990 NR Description: putative calcium-dependent protein kinase
  misc_feature (1)..(423): Homolog of NCBI NO: 17064926 NR Description: calcium-dependent protein kinase [Arabidopsis
  misc_feature (1)..(423): Homolog of NCBI NO: 22331739 NR Description: calcium-dependent protein kinase

SEQ ID NO: 48480 - protein, 397 aa, Arabidopsis thaliana; identical to SEQ ID NO: 46538
  peptide (1)..(397): Ceres Seq. ID no. 12639072
  misc_feature (1)..(181): Pfam Name: Protein kinase domain Pfam Description: Protein kinase domain
  misc_feature (1)..(181): Pfam Name: Protein kinase domain Pfam Description: Protein kinase domain
  misc_feature (1)..(393): Homolog of NCBI NO: 14484895 NR Description: calcium-dependent protein kinase [Funaria
  misc_feature (1)..(397): Homolog of NCBI NO: 18416872 NR Description: calcium-dependent protein kinase-like protein
  misc_feature (1)..(397): Homolog of NCBI NO: 15239742 NR Description: calcium-dependent protein kinase
  misc_feature (1)..(394): Homolog of NCBI NO: 30699042 NR Description: calcium-dependent protein kinase, putative (CDPK)
  misc_feature (1)..(394): Homolog of NCBI NO: 28416563 NR Description: At1g18890 [Arabidopsis thaliana]
  misc_feature (1)..(393): Homolog of NCBI NO: 14484895 NR Description: calcium-dependent protein kinase [Funaria
  misc_feature (1)..(397): Homolog of NCBI NO: 15239742 NR Description: calcium-dependent protein kinase
  misc_feature (1)..(394): Homolog of NCBI NO: 28416563 NR Description: At1g18890 [Arabidopsis thaliana]
  misc_feature (1)..(397): Homolog of NCBI NO: 22331739 NR Description: calcium-dependent protein kinase
  misc_feature (1)..(397): Homolog of NCBI NO: 17064926 NR Description: calcium-dependent protein kinase [Arabidopsis
  misc_feature (1)..(397): Homolog of NCBI NO: 34907990 NR Description: putative calcium-dependent protein kinase
  misc_feature (1)..(294): Homolog of NCBI NO: 11259886 NR Description: calcium dependent protein kinase
  misc_feature (1)..(394): Homolog of NCBI NO: 25287677 NR Description: calcium-dependent protein kinase 1
  misc_feature (1)..(394): Homolog of NCBI NO: 30699042 NR Description: calcium-dependent protein kinase, putative (CDPK)
  misc_feature (1)..(397): Homolog of NCBI NO: 18416872 NR Description: calcium-dependent protein kinase-like protein
  misc_feature (1)..(394): Homolog of NCBI NO: 25287677 NR Description: calcium-dependent protein kinase 1
  misc_feature (1)..(294): Homolog of NCBI NO: 11259886 NR Description: calcium dependent protein kinase
  misc_feature (1)..(397): Homolog of NCBI NO: 34907990 NR Description: putative calcium-dependent protein kinase
  misc_feature (1)..(397): Homolog of NCBI NO: 17064926 NR Description: calcium-dependent protein kinase [Arabidopsis
  misc_feature (1)..(397): Homolog of NCBI NO: 22331739 NR Description: calcium-dependent protein kinase

SEQ ID NO: 48481 - DNA, 1933 bp, Arabidopsis thaliana
  misc_feature (1)..(1933): Ceres Seq. ID no. 12600905
  misc_feature: MA Experiment ID: 20000314 Result: Down-regulated in Transcription
  misc_feature: MA Experiment 20000314 PARAMETER Experiment Name: At_14day_Shoots-Roots_Sub_P Parameter: Age (day) Value: 14
  misc_feature: MA Experiment 20000314 PARAMETER Experiment Name: At_14day_Shoots-Roots_Sub_P Parameter: Organism Value: A. thaliana
  misc_feature: MA Experiment 20000314 PARAMETER Experiment Name: At_14day_Shoots-Roots_Sub_P Parameter: Plant Line Value: WS
  misc_feature: MA Experiment 20000314 PARAMETER Experiment Name: At_14day_Shoots-Roots_Sub_P Parameter: Tissue Value: Roots vs. Whole Plant
  misc_feature: MA Experiment ID: 20000315 Result: Down-regulated in Transcription
  misc_feature: MA Experiment 20000315 PARAMETER Experiment Name: At_14day_Shoots-Roots_Sub_P Parameter: Age (day) Value: 14
  misc_feature: MA Experiment 20000315 PARAMETER Experiment Name: At_14day_Shoots-Roots_Sub_P Parameter: Organism Value: A. thaliana
  misc_feature: MA Experiment 20000315 PARAMETER Experiment Name: At_14day_Shoots-Roots_Sub_P Parameter: Plant Line Value: WS
  misc_feature: MA Experiment 20000315 PARAMETER Experiment Name: At_14day_Shoots-Roots_Sub_P Parameter: Tissue Value: Shoots vs. Whole Plant
  misc_feature: MA Experiment ID: 20000327 Result: Down-regulated in Transcription
  misc_feature: MA Experiment 20000327 PARAMETER Experiment Name: At_42deg_Heat_Sub_P Parameter: Age (day) Value: 14
  misc_feature: MA Experiment 20000327 PARAMETER Experiment Name: At_42deg_Heat_Sub_P Parameter: Organism Value: A. thaliana
  misc_feature: MA Experiment 20000327 PARAMETER Experiment Name: At_42deg_Heat_Sub_P Parameter: Plant Line Value: WS
  misc_feature: MA Experiment 20000327 PARAMETER Experiment Name: At_42deg_Heat_Sub_P Parameter: Temperature (deg C) Value: 42 vs. 22
  misc_feature: MA Experiment 20000327 PARAMETER Experiment Name: At_42deg_Heat_Sub_P Parameter: Timepoint (hr) Value: 1
  misc_feature: MA Experiment 20000327 PARAMETER Experiment Name: At_42deg_Heat_Sub_P Parameter: Tissue Value: Aerial
  misc_feature: MA Experiment ID: 20000328 Result: Down-regulated in Transcription
  misc_feature: MA Experiment 20000328 PARAMETER Experiment Name: At_42deg_Heat_Sub_P Parameter: Age (day) Value: 14
  misc_feature: MA Experiment 20000328 PARAMETER Experiment Name: At_42deg_Heat_Sub_P Parameter: Organism Value: A. thaliana
  misc_feature: MA Experiment 20000328 PARAMETER Experiment Name: At_42deg_Heat_Sub_P Parameter: Plant Line Value: WS
  misc_feature: MA Experiment 20000328 PARAMETER Experiment Name: At_42deg_Heat_Sub_P Parameter: Temperature (deg C) Value: 42 vs. 22
  misc_feature: MA Experiment 20000328 PARAMETER Experiment Name: At_42deg_Heat_Sub_P Parameter: Timepoint (hr) Value: 6
  misc_feature: MA Experiment 20000328 PARAMETER Experiment Name: At_42deg_Heat_Sub_P Parameter: Tissue Value: Aerial
  misc_feature: MA Experiment ID: 20000329 Result: Up-regulated in Transcription
  misc_feature: MA Experiment 20000329 PARAMETER Experiment Name: At_4deg_Cold_Sub_P Parameter: Age (day) Value: 14
  misc_feature: MA Experiment 20000329 PARAMETER Experiment Name: At_4deg_Cold_Sub_P Parameter: Organism Value: A. thaliana
  misc_feature: MA Experiment 20000329 PARAMETER Experiment Name: At_4deg_Cold_Sub_P Parameter: Plant Line Value: WS
  misc_feature: MA Experiment 20000329 PARAMETER Experiment Name: At_4deg_Cold_Sub_P Parameter: Temperature (deg C) Value: 4 vs. 22
  misc_feature: MA Experiment 20000329 PARAMETER Experiment Name: At_4deg_Cold_Sub_P Parameter: Timepoint (hr) Value: 6
  misc_feature: MA Experiment 20000329 PARAMETER Experiment Name: At_4deg_Cold_Sub_P Parameter: Tissue Value: Aerial
  misc_feature: MA Experiment ID: 20000332 Result: Up-regulated in Transcription
  misc_feature: MA Experiment 20000332 PARAMETER Experiment Name: At_4deg_Cold_Sub_P Parameter: Age (day) Value: 14
  misc_feature: MA Experiment 20000332 PARAMETER Experiment Name: At_4deg_Cold_Sub_P Parameter: Organism Value: A. thaliana
  misc_feature: MA Experiment 20000332 PARAMETER Experiment Name: At_4deg_Cold_Sub_P Parameter: Plant Line Value: WS
  misc_feature: MA Experiment 20000332 PARAMETER Experiment Name: At_4deg_Cold_Sub_P Parameter: Temperature (deg C) Value: 4 vs. 22
  misc_feature: MA Experiment 20000332 PARAMETER Experiment Name: At_4deg_Cold_Sub_P Parameter: Timepoint (hr) Value: 2
  misc_feature: MA Experiment 20000332 PARAMETER Experiment Name: At_4deg_Cold_Sub_P Parameter: Tissue Value: Aerial
  misc_feature: MA Experiment ID: 20000349 Result: Down-regulated in Transcription
  misc_feature: MA Experiment 20000349 PARAMETER Experiment Name: At_100uM_ABA_Sub_P Parameter: Age (day) Value: 14
  misc_feature: MA Experiment 20000349 PARAMETER Experiment Name: At_100uM_ABA_Sub_P Parameter: Organism Value: A. thaliana
  misc_feature: MA Experiment 20000349 PARAMETER Experiment Name: At_100uM_ABA_Sub_P Parameter: Plant Line Value: WS
  misc_feature: MA Experiment 20000349 PARAMETER Experiment Name: At_100uM_ABA_Sub_P Parameter: Timepoint (hr) Value: 6
  misc_feature: MA Experiment 20000349 PARAMETER Experiment Name: At_100uM_ABA_Sub_P Parameter: Tissue Value: Aerial
  misc_feature: MA Experiment 20000349 PARAMETER Experiment Name: At_100uM_ABA_Sub_P Parameter: Treatment Value: 100uM ABA vs. No Treatment
  misc_feature: MA Experiment ID: 20000352 Result: Down-regulated in Transcription
  misc_feature: MA Experiment 20000352 PARAMETER Experiment Name: At_Drought_Sub_P Parameter: Age (day) Value: 7
  misc_feature: MA Experiment 20000352 PARAMETER Experiment Name: At_Drought_Sub_P Parameter: Organism Value: A. thaliana
  misc_feature: MA Experiment 20000352 PARAMETER Experiment Name: At_Drought_Sub_P Parameter: Plant Line Value: WS
  misc_feature: MA Experiment 20000352 PARAMETER Experiment Name: At_Drought_Sub_P Parameter: Timepoint (hr) Value: 6
  misc_feature: MA Experiment 20000352 PARAMETER Experiment Name: At_Drought_Sub_P Parameter: Tissue Value: Whole Plant
  misc_feature: MA Experiment 20000352 PARAMETER Experiment Name: At_Drought_Sub_P Parameter: Treatment Value: Drought vs. No Drought
atcacaaaacaaaaacctcacttaaaaaaaaaaaacagaagacagaaaaaaacaaaaaaaaaaagaaaaagaaaaataaacaaattttcttttcttttttttcctctaaagtttctattttgtctattcgtgtttttttttttacttcctgataatgggagcctatgaaacagaaaaaccaactaaagatgcggcggctctagagacacagtcgccggaagatttcgatcaaccatctccgcttcgtaaaatcatctccgtcgcttccatcgccgccggtgtacagttcgggtgggccttacagctctctcttcttactccgtacgttcaactcctcggaatccctcacaaatggtcatctctcatttggctctgtggtccagtctccggcatgattgttcaaccaatcgtcggtttccacagtgaccgatgtaggtccaaatttggtcgccgtcgtcctttcatcgccaccggagccgcactcgtcgccgtcgctgttttcctcatcggttacgctgcggatttcggttataaaatgggagataaactcgaggagaaggttaaagttcgagctatagggatctttgctctcgggttctggatcctcgacgtagccaacaacaccttacaaggaccttgccgtgctttcttagccgacttagccgccggtgacgctaagagaacgcgagtcgcaaacgcgtttttctctttttttatggcggttggaaacgttttgggttatgcggctggttcgtacactaacctccacaagatgtttccgttcacaatgacaaaagcttgcgatatctattgcgccaatctcaagacttgtttcttcttatccatcactctcctcctcatcgtcaccgtcacgtctctttggtacgttaatgacaaacaatggtctccgccgccgcgaaatgccgacgacgacgagaagacctcaagcgttcctttgttcggtgaaatctttggagcattcaaagtcatgaaacgtcccatgtggatgcttctaatcgtcacggccttaaactggatcgcttggttcccatttcttttgttcgatactgattggatgggtcgtgaagtgttcggtggagattcagatggaaatgaacgatcgaagaaactatacagtcttggagtccaatctggtgcaatgggattgatgtttaactctatagttcttggtttcatgtcacttggtgttgaatggattggtcggaaattaggaggagctaaacggctttggggtattgtcaatttcatcctagccgctggtttggccatgacggttctcgttacgaaattcgccgaggatcaccggaaaaccgccggtgatttagccggaccgagcgctagtgttaaagctggagctttaagtctctttgctgttcttggtatcccattagctattactttcagtactccttttgctctagcatccatattctcaagctgctccggtgcaggccaaggactttcattaggagttttaaatttggcgattgtgataccacaaatgatagtctcactaggaggtggacctttcgacgccttgttcggcggtggaaacttaccggcgtttatcgttgcagcaattgcagcggcgattagtggagtattagcgttaaccgttttaccttcaccaccaccggacgcacccaaggcaacgaccatgggaggattccactagtttactattttttttttttaatgaaactcatcaaatacagtattactgtgcgaaactgcaaaaacccaaataaaagaaaagaatggataaaatgataaaatctaataaaccttgggtcgtctgtatttcacccttttttagttttttttcttctttttttataacttttgtcacttattttaatttgaaatagaatgttttttttttttgcccttaaataagatttgtgtgttgagt

SEQ ID NO: 48482 - protein, 513 aa, Arabidopsis thaliana
  peptide (1)..(513): Ceres Seq. ID no. 12600906
  misc_feature (33)..(473): Pfam Name: Sugar (and other) transporter Pfam Description: Sugar (and other) transporter
  misc_feature (33)..(473): Pfam Name: Sugar (and other) transporter Pfam Description: Sugar (and other) transporter
  misc_feature (12)..(497): Homolog of NCBI NO: 15225986 NR Description: putative sucrose-proton symporter; protein id:
  misc_feature (11)..(497): Homolog of NCBI NO: 15239921 NR Description: sucrose transporter protein; protein id:
  misc_feature (7)..(513): Homolog of NCBI NO: 18091781 NR Description: sucrose transporter SUC2 [Brassica oleracea]
  misc_feature (1)..(513): Homolog of NCBI NO: 20147213 NR Description: At1g22710/T22J18_12 [Arabidopsis thaliana]
  misc_feature (1)..(513): Homolog of NCBI NO: 481131 NR Description: sucrose transport protein SUC2 - Arabidopsis
  misc_feature (12)..(497): Homolog of NCBI NO: 15225986 NR Description: putative sucrose-proton symporter; protein id:
  misc_feature (7)..(513): Homolog of NCBI NO: 18091781 NR Description: sucrose transporter SUC2 [Brassica oleracea]
  misc_feature (1)..(513): Homolog of NCBI NO: 481131 NR Description: sucrose transport protein SUC2 - Arabidopsis
  misc_feature (1)..(513): Homolog of NCBI NO: 15217601 NR Description: sucrose transport protein SUC1
  misc_feature (1)..(513): Homolog of NCBI NO: 18091779 NR Description: sucrose transporter SUC1 [Brassica oleracea]
  misc_feature (1)..(513): Homolog of NCBI NO: 15217602 NR Description: putative sucrose transport protein; protein id:
  misc_feature (1)..(504): Homolog of NCBI NO: 12057172 NR Description: sucrose trasporter [Arabidopsis thaliana]
  misc_feature (1)..(513): Homolog of NCBI NO: 15219938 NR Description: putative sucrose transport protein, SUC2
  misc_feature (1)..(513): Homolog of NCBI NO: 20147213 NR Description: At1g22710/T22J18_12 [Arabidopsis thaliana]
  misc_feature (11)..(497): Homolog of NCBI NO: 15239921 NR Description: sucrose transporter protein; protein id:
  misc_feature (1)..(513): Homolog of NCBI NO: 15219938 NR Description: putative sucrose transport protein, SUC2
  misc_feature (1)..(504): Homolog of NCBI NO: 12057172 NR Description: sucrose trasporter [Arabidopsis thaliana]
  misc_feature (1)..(513): Homolog of NCBI NO: 15217602 NR Description: putative sucrose transport protein; protein id:
  misc_feature (1)..(513): Homolog of NCBI NO: 18091779 NR Description: sucrose transporter SUC1 [Brassica oleracea]
  misc_feature (1)..(513): Homolog of NCBI NO: 15217601 NR Description: sucrose transport protein SUC1
MGAYETEKPTKDAAALETQSPEDFDQPSPLRKIISVASIAAGVQFGWALQLSLLTPYVQLLGIPHKWSSLIWLCGPVSGMIVQPIVGFHSDRCRSKFGRRRPFIATGAALVAVAVFLIGYAADFGYKMGDKLEEKVKVRAIGIFALGFWILDVANNTLQGPCRAFLADLAAGDAKRTRVANAFFSFFMAVGNVLGYAAGSYTNLHKMFPFTMTKACDIYCANLKTCFFLSITLLLIVTVTSLWYVNDKQWSPPPRNADDDEKTSSVPLFGEIFGAFKVMKRPMWMLLIVTALNWIAWFPFLLFDTDWMGREVFGGDSDGNERSKKLYSLGVQSGAMGLMFNSIVLGFMSLGVEWIGRKLGGAKRLWGIVNFILAAGLAMTVLVTKFAEDHRKTAGDLAGPSASVKAGALSLFAVLGIPLAITFSTPFALASIFSSCSGAGQGLSLGVLNLAIVIPQMIVSLGGGPFDALFGGGNLPAFIVAAIAAAISGVLALTVLPSPPPDAPKATTMGGFH

SEQ ID NO: 48483 - protein, 434 aa, Arabidopsis thaliana
  peptide (1)..(434): Ceres Seq. ID no. 12600907
  misc_feature (1)..(394): Pfam Name: Sugar (and other) transporter Pfam Description: Sugar (and other) transporter
  misc_feature (1)..(394): Pfam Name: Sugar (and other) transporter Pfam Description: Sugar (and other) transporter
  misc_feature (1)..(418): Homolog of NCBI NO: 15225986 NR Description: putative sucrose-proton symporter; protein id:
  misc_feature (1)..(418): Homolog of NCBI NO: 15239921 NR Description: sucrose transporter protein; protein id:
  misc_feature (1)..(434): Homolog of NCBI NO: 18091781 NR Description: sucrose transporter SUC2 [Brassica oleracea]
  misc_feature (1)..(434): Homolog of NCBI NO: 20147213 NR Description: At1g22710/T22J18_12 [Arabidopsis thaliana]
  misc_feature (1)..(434): Homolog of NCBI NO: 481131 NR Description: sucrose transport protein SUC2 - Arabidopsis
  misc_feature (1)..(418): Homolog of NCBI NO: 15225986 NR Description: putative sucrose-proton symporter; protein id:
  misc_feature (1)..(434): Homolog of NCBI NO: 18091781 NR Description: sucrose transporter SUC2 [Brassica oleracea]
  misc_feature (1)..(434): Homolog of NCBI NO: 481131 NR Description: sucrose transport protein SUC2 - Arabidopsis
  misc_feature (1)..(434): Homolog of NCBI NO: 15217601 NR Description: sucrose transport protein SUC1
  misc_feature (1)..(434): Homolog of NCBI NO: 18091779 NR Description: sucrose transporter SUC1 [Brassica oleracea]
  misc_feature (1)..(434): Homolog of NCBI NO: 15217602 NR Description: putative sucrose transport protein; protein id:
  misc_feature (1)..(425): Homolog of NCBI NO: 12057172 NR Description: sucrose trasporter [Arabidopsis thaliana]
  misc_feature (1)..(434): Homolog of NCBI NO: 15219938 NR Description: putative sucrose transport protein, SUC2
  misc_feature (1)..(434): Homolog of NCBI NO: 20147213 NR Description: At1g22710/T22J18_12 [Arabidopsis thaliana]
  misc_feature (1)..(418): Homolog of NCBI NO: 15239921 NR Description: sucrose transporter protein; protein id:
  misc_feature (1)..(434): Homolog of NCBI NO: 15219938 NR Description: putative sucrose transport protein, SUC2
  misc_feature (1)..(425): Homolog of NCBI NO: 12057172 NR Description: sucrose trasporter [Arabidopsis thaliana]
  misc_feature (1)..(434): Homolog of NCBI NO: 15217602 NR Description: putative sucrose transport protein; protein id:
  misc_feature (1)..(434): Homolog of NCBI NO: 18091779 NR Description: sucrose transporter SUC1 [Brassica oleracea]
  misc_feature (1)..(434): Homolog of NCBI NO: 15217601 NR Description: sucrose transport protein SUC1
MIVQPIVGFHSDRCRSKFGRRRPFIATGAALVAVAVFLIGYAADFGYKMGDKLEEKVKVRAIGIFALGFWILDVANNTLQGPCRAFLADLAAGDAKRTRVANAFFSFFMAVGNVLGYAAGSYTNLHKMFPFTMTKACDIYCANLKTCFFLSITLLLIVTVTSLWYVNDKQWSPPPRNADDDEKTSSVPLFGEIFGAFKVMKRPMWMLLIVTALNWIAWFPFLLFDTDWMGREVFGGDSDGNERSKKLYSLGVQSGAMGLMFNSIVLGFMSLGVEWIGRKLGGAKRLWGIVNFILAAGLAMTVLVTKFAEDHRKTAGDLAGPSASVKAGALSLFAVLGIPLAITFSTPFALASIFSSCSGAGQGLSLGVLNLAIVIPQMIVSLGGGPFDALFGGGNLPAFIVAAIAAAISGVLALTVLPSPPPDAPKATTMGGFH

SEQ ID NO: 48484 - protein, 386 aa, Arabidopsis thaliana
  peptide (1)..(386): Ceres Seq. ID no. 12600908
  misc_feature (1)..(346): Pfam Name: Sugar (and other) transporter Pfam Description: Sugar (and other) transporter
  misc_feature (1)..(346): Pfam Name: Sugar (and other) transporter Pfam Description: Sugar (and other) transporter
  misc_feature (1)..(370): Homolog of NCBI NO: 15225986 NR Description: putative sucrose-proton symporter; protein id:
  misc_feature (1)..(370): Homolog of NCBI NO: 15239921 NR Description: sucrose transporter protein; protein id:
  misc_feature (1)..(386): Homolog of NCBI NO: 18091781 NR Description: sucrose transporter SUC2 [Brassica oleracea]
  misc_feature (1)..(386): Homolog of NCBI NO: 20147213 NR Description: At1g22710/T22J18_12 [Arabidopsis thaliana]
  misc_feature (1)..(386): Homolog of NCBI NO: 481131 NR Description: sucrose transport protein SUC2 - Arabidopsis
  misc_feature (1)..(370): Homolog of NCBI NO: 15225986 NR Description: putative sucrose-proton symporter; protein id:
  misc_feature (1)..(386): Homolog of NCBI NO: 18091781 NR Description: sucrose transporter SUC2 [Brassica oleracea]
  misc_feature (1)..(386): Homolog of NCBI NO: 481131 NR Description: sucrose transport protein SUC2 - Arabidopsis
  misc_feature (1)..(386): Homolog of NCBI NO: 15217601 NR Description: sucrose transport protein SUC1
  misc_feature (1)..(386): Homolog of NCBI NO: 18091779 NR Description: sucrose transporter SUC1 [Brassica oleracea]
  misc_feature (1)..(386): Homolog of NCBI NO: 15217602 NR Description: putative sucrose transport protein; protein id:
  misc_feature (1)..(377): Homolog of NCBI NO: 12057172 NR Description: sucrose trasporter [Arabidopsis thaliana]
  misc_feature (1)..(386): Homolog of NCBI NO: 15219938 NR Description: putative sucrose transport protein, SUC2
  misc_feature (1)..(386): Homolog of NCBI NO: 20147213 NR Description: At1g22710/T22J18_12 [Arabidopsis thaliana]
  misc_feature (1)..(370): Homolog of NCBI NO: 15239921 NR Description: sucrose transporter protein; protein id:
  misc_feature (1)..(386): Homolog of NCBI NO: 15219938 NR Description: putative sucrose transport protein, SUC2
  misc_feature (1)..(377): Homolog of NCBI NO: 12057172 NR Description: sucrose trasporter [Arabidopsis thaliana]
  misc_feature (1)..(386): Homolog of NCBI NO: 15217602 NR Description: putative sucrose transport protein; protein id:
  misc_feature (1)..(386): Homolog of NCBI NO: 18091779 NR Description: sucrose transporter SUC1 [Brassica oleracea]
  misc_feature (1)..(386): Homolog of NCBI NO: 15217601 NR Description: sucrose transport protein SUC1
MGDKLEEKVKVRAIGIFALGFWILDVANNTLQGPCRAFLADLAAGDAKRTRVANAFFSFFMAVGNVLGYAAGSYTNLHKMFPFTMTKACDIYCANLKTCFFLSITLLLIVTVTSLWYVNDKQWSPPPRNADDDEKTSSVPLFGEIFGAFKVMKRPMWMLLIVTALNWIAWFPFLLFDTDWMGREVFGGDSDGNERSKKLYSLGVQSGAMGLMFNSIVLGFMSLGVEWIGRKLGGAKRLWGIVNFILAAGLAMTVLVTKFAEDHRKTAGDLAGPSASVKAGALSLFAVLGIPLAITFSTPFALASIFSSCSGAGQGLSLGVLNLAIVIPQMIVSLGGGPFDALFGGGNLPAFIVAAIAAAISGVLALTVLPSPPPDAPKATTMGGFH

SEQ ID NO: 48485 - DNA, 1986 bp, Arabidopsis thaliana
  misc_feature (1)..(1986): Ceres Seq. ID no. 13578835
  misc_feature: MA Experiment ID: 20000184 Result: Down-regulated in Transcription
  misc_feature: MA Experiment 20000184 PARAMETER Experiment Name: At_Shoots__P Parameter: Age (day) Value: 7
  misc_feature: MA Experiment 20000184 PARAMETER Experiment Name: At_Shoots__P Parameter: Tissue Value: Shoots vs. Whole Plant
  misc_feature: MA Experiment ID: 20000437 Result: Up-regulated in Transcription
  misc_feature: MA Experiment 20000437 PARAMETER Experiment Name: At_Drought_P Parameter: Age (day) Value: 8
  misc_feature: MA Experiment 20000437 PARAMETER Experiment Name: At_Drought_P Parameter: Organism Value: A. thaliana
  misc_feature: MA Experiment 20000437 PARAMETER Experiment Name: At_Drought_P Parameter: Plant Line Value: WS
  misc_feature: MA Experiment 20000437 PARAMETER Experiment Name: At_Drought_P Parameter: Timepoint (hr) Value: 24
  misc_feature: MA Experiment 20000437 PARAMETER Experiment Name: At_Drought_P Parameter: Tissue Value: Whole Plant
  misc_feature: MA Experiment 20000437 PARAMETER Experiment Name: At_Drought_P Parameter: Treatment Value: Drought vs. No Drought
  misc_feature: MA Experiment ID: 20001248 Result: Up-regulated in Transcription
  misc_feature: MA Experiment 20001248 PARAMETER Experiment Name: At_Far-red-induction_P Parameter: Age (day) Value: 7
  misc_feature: MA Experiment 20001248 PARAMETER Experiment Name: At_Far-red-induction_P Parameter: Light Value: Far-red vs. White
  misc_feature: MA Experiment 20001248 PARAMETER Experiment Name: At_Far-red-induction_P Parameter: Organism Value: A. thaliana
  misc_feature: MA Experiment 20001248 PARAMETER Experiment Name: At_Far-red-induction_P Parameter: Plant Line Value: Columbia
  misc_feature: MA Experiment 20001248 PARAMETER Experiment Name: At_Far-red-induction_P Parameter: Timepoint (hr) Value: 4
  misc_feature: MA Experiment 20001248 PARAMETER Experiment Name: At_Far-red-induction_P Parameter: Tissue Value: Whole Plant
  misc_feature: MA Experiment ID: 20001451 Result: Up-regulated in Transcription
  misc_feature: MA Experiment 20001451 PARAMETER Experiment Name: At_Far-red-induction_P Parameter: Age (day) Value: 7
  misc_feature: MA Experiment 20001451 PARAMETER Experiment Name: At_Far-red-induction_P Parameter: Light Value: Far-red vs. White
  misc_feature: MA Experiment 20001451 PARAMETER Experiment Name: At_Far-red-induction_P Parameter: Organism Value: A. thaliana
  misc_feature: MA Experiment 20001451 PARAMETER Experiment Name: At_Far-red-induction_P Parameter: Plant Line Value: Columbia
  misc_feature: MA Experiment 20001451 PARAMETER Experiment Name: At_Far-red-induction_P Parameter: Timepoint (hr) Value: 24
  misc_feature: MA Experiment 20001451 PARAMETER Experiment Name: At_Far-red-induction_P Parameter: Tissue Value: Whole Plant
  misc_feature: MA Experiment ID: 20001558 Result: Down-regulated in Transcription
  misc_feature: MA Experiment 20001558 PARAMETER Experiment Name: At_Drought_Soil_Dry_P Parameter: Age (day) Value: 27
  misc_feature: MA Experiment 20001558 PARAMETER Experiment Name: At_Drought_Soil_Dry_P Parameter: Organism Value: A. thaliana
  misc_feature: MA Experiment 20001558 PARAMETER Experiment Name: At_Drought_Soil_Dry_P Parameter: Plant Line Value: WS
  misc_feature: MA Experiment 20001558 PARAMETER Experiment Name: At_Drought_Soil_Dry_P Parameter: Post Timepoint (hr) Value: 6
  misc_feature: MA Experiment 20001558 PARAMETER Experiment Name: At_Drought_Soil_Dry_P Parameter: Post-Treatment Value: Re-Water vs. No Drought
  misc_feature: MA Experiment 20001558 PARAMETER Experiment Name: At_Drought_Soil_Dry_P Parameter: Timepoint (day) Value: 13
  misc_feature: MA Experiment 20001558 PARAMETER Experiment Name: At_Drought_Soil_Dry_P Parameter: Treatment Value: Drought vs. No Drought
  misc_feature: MA Experiment ID: 20001560 Result: Down-regulated in Transcription
  misc_feature: MA Experiment 20001560 PARAMETER Experiment Name: At_Drought_Soil_Dry_P Parameter: Age (day) Value: 28
  misc_feature: MA Experiment 20001560 PARAMETER Experiment Name: At_Drought_Soil_Dry_P Parameter: Organism Value: A. thaliana
  misc_feature: MA Experiment 20001560 PARAMETER Experiment Name: At_Drought_Soil_Dry_P Parameter: Plant Line Value: WS
  misc_feature: MA Experiment 20001560 PARAMETER Experiment Name: At_Drought_Soil_Dry_P Parameter: Post Timepoint (hr) Value: None
  misc_feature: MA Experiment 20001560 PARAMETER Experiment Name: At_Drought_Soil_Dry_P Parameter: Post-Treatment Value: None
  misc_feature: MA Experiment 20001560 PARAMETER Experiment Name: At_Drought_Soil_Dry_P Parameter: Timepoint (day) Value: 14
  misc_feature: MA Experiment 20001560 PARAMETER Experiment Name: At_Drought_Soil_Dry_P Parameter: Treatment Value: Drought vs. No Drought
gtttccattttaatttgaagatccttccctttctttctttctctctctctctcgctcgccgggaaaaatcgctgtccaaatctccggtcatttctccgaggatctcttctatcaatccaacggttttgttttcatcttctcagatctcacagaacaatagtcaaagactgatgcagaagaagcgttagtacaaggtttttgttggaaagcaattgaatctgaattcatctttcattttcacgctttgatccaatttgagttctctcttccactgaatccctcatacgtaaaacctagggtttctaaattagggttctcctgaggtctgtttatagtgcgtaaagccatgtttaagaagatcatgaaaggggcaaatcgaaaagcctctaaagctgaggcgaatgattcgtctatgtatgggtttgatccaccaggtaggtcaggtcctggatccaatatgattgtaaatcacgcatctcgtggttcgcttgttccttcttctccaaattcaatggcggcggccaccacacaaccgcctcctatgtattcagtcgagcctcttcccttgttcagagacgtctctgtctccgagcgtcaatccttgttcttgaggaaactccagatttgttgttttcaatttgattttacggatacgttgaagaatgcgagagagaaggagattaagaggcaaacgttattggagctagttgattttatacagtctggagcagggaagctcactgaagtttgtcaagaagaaatggtaaagatgatttcggttaatatattccggtgtcttcctccggcttcacacgagaatacaggtcaagagcctgctgatcttgaggaagaggagccttatttggaaccatcttggcctcatttacagctaatttatgagttgctgctgagatacattgttccttctgacacagatacaaaagttgcaaaacggtatattgatcattcttttgtgttgaggttgcttgaattgtttgaaactgaagatcctagagaaagggagtacttgaaaacgattcttcataggatttatggcaagtttatggttcacaggccctttattaggaaagcaatgaaccatattttctataggtttatttatgagacagagagacatagtgggattggggagcttttggagattctcggtagtattattaatgggtttgccttgccaatgaaggaggagcacaagctctttttgattagggcgttgataccgctgcataagccaaaaccaatcgctatgtatcaccaacaattgtcttactgcatcgttcagtttgtggagaaagattataagcttgcggatacggtgatcaggggcttgttaaagttttggcctgtgacaaattgtacaaaagaggttctctttcttggtgaacttgaagaggttcttgaggcaacacaaactgttgagttccaacgctgtatggtccctctgttccaacagattgctcgatgcctcagtagctctaattttcaggttgcagaacgagctctgttcttgtggaacaacgagcatgtggtgggtctaatagctcagaaccgaggagtgatccttcccatcatatttgcatccctggagaaaaacatagagtctcattggaaccaagcggtacacggtctaagtgcgaatataaagagaatgttcatggagatggaccctgagctctttgaagaatgtcagcaacagtacgaagaaaaacaagccaaatctaaacaagtggaagagcaacgccaaaataggtggaggagattagatgaagcagtggaggaacgagaaagagaagatcctatgatcacttcttagaaaaaaatatatcaaatcatcaaagtaataatattctctctcacttcttctcattttctctaatcgttgcaaattattatattttatttatttattttgaggtctggaaaaaaaaaagtccttaatctaagtcaataggaatttattttcct

SEQ ID NO: 48486 - protein, 495 aa, Arabidopsis thaliana
  peptide (1)..(495): Ceres Seq. ID no. 13578836
  misc_feature (71)..(484): Pfam Name: Protein phosphatase 2A regulatory B subunit (B56 Pfam Description: Protein phosphatase 2A regulatory B subunit
  misc_feature (1)..(481): Homolog of NCBI NO: 21530784 NR Description: putative protein phosphatase 2A B'zeta subunit
  misc_feature (1)..(481): Homolog of NCBI NO: 11994401 NR Description: protein phosphatase 2A B' regulatory subunit
  misc_feature (1)..(481): Homolog of NCBI NO: 20147343 NR Description: AT4g15410/dl3750w [Arabidopsis thaliana]
  misc_feature (1)..(481): Homolog of NCBI NO: 18414444 NR Description: B' regulatory subunit of PP2A (AtB'gamma)
  misc_feature (32)..(486): Homolog of NCBI NO: 21530786 NR Description: putative protein phosphatase 2A B'teta subunit
  misc_feature (1)..(495): Homolog of NCBI NO: 38345343 NR Description: OSJNBa0081L15.16 [Oryza sativa (japonica
  misc_feature (1)..(481): Homolog of NCBI NO: 7485149 NR Description: hypothetical protein - Arabidopsis thaliana
  misc_feature (1)..(482): Homolog of NCBI NO: 15233133 NR Description: protein phosphatase 2A regulatory subunit
  misc_feature (1)..(495): Homolog of NCBI NO: 15232782 NR Description: B' regulatory subunit of PP2A (AtB'beta)
  misc_feature (1)..(495): Homolog of NCBI NO: 15242766 NR Description: B' regulatory subunit of PP2A (AtB'alpha)
MFKKIMKGANRKASKAEANDSSMYGFDPPGRSGPGSNMIVNHASRGSLVPSSPNSMAAATTQPPPMYSVEPLPLFRDVSVSERQSLFLRKLQICCFQFDFTDTLKNAREKEIKRQTLLELVDFIQSGAGKLTEVCQEEMVKMISVNIFRCLPPASHENTGQEPADLEEEEPYLEPSWPHLQLIYELLLRYIVPSDTDTKVAKRYIDHSFVLRLLELFETEDPREREYLKTILHRIYGKFMVHRPFIRKAMNHIFYRFIYETERHSGIGELLEILGSIINGFALPMKEEHKLFLIRALIPLHKPKPIAMYHQQLSYCIVQFVEKDYKLADTVIRGLLKFWPVTNCTKEVLFLGELEEVLEATQTVEFQRCMVPLFQQIARCLSSSNFQVAERALFLWNNEHVVGLIAQNRGVILPIIFASLEKNIESHWNQAVHGLSANIKRMFMEMDPELFEECQQQYEEKQAKSKQVEEQRQNRWRRLDEAVEEREREDPMITS

SEQ ID NO: 48487 - protein, 490 aa, Arabidopsis thaliana
  peptide (1)..(490): Ceres Seq. ID no. 13578837
  misc_feature (66)..(479): Pfam Name: Protein phosphatase 2A regulatory B subunit (B56 Pfam Description: Protein phosphatase 2A regulatory B subunit
  misc_feature (1)..(476): Homolog of NCBI NO: 21530784 NR Description: putative protein phosphatase 2A B'zeta subunit
  misc_feature (1)..(476): Homolog of NCBI NO: 11994401 NR Description: protein phosphatase 2A B' regulatory subunit
  misc_feature (1)..(476): Homolog of NCBI NO: 20147343 NR Description: AT4g15410/dl3750w [Arabidopsis thaliana]
  misc_feature (1)..(476): Homolog of NCBI NO: 18414444 NR Description: B' regulatory subunit of PP2A (AtB'gamma)
  misc_feature (27)..(481): Homolog of NCBI NO: 21530786 NR Description: putative protein phosphatase 2A B'teta subunit
  misc_feature (1)..(490): Homolog of NCBI NO: 38345343 NR Description: OSJNBa0081L15.16 [Oryza sativa (japonica
  misc_feature (1)..(476): Homolog of NCBI NO: 7485149 NR Description: hypothetical protein - Arabidopsis thaliana
  misc_feature (1)..(477): Homolog of NCBI NO: 15233133 NR Description: protein phosphatase 2A regulatory subunit
  misc_feature (1)..(490): Homolog of NCBI NO: 15232782 NR Description: B' regulatory subunit of PP2A (AtB'beta)
  misc_feature (1)..(490): Homolog of NCBI NO: 15242766 NR Description: B' regulatory subunit of PP2A (AtB'alpha)
MKGANRKASKAEANDSSMYGFDPPGRSGPGSNMIVNHASRGSLVPSSPNSMAAATTQPPPMYSVEPLPLFRDVSVSERQSLFLRKLQICCFQFDFTDTLKNAREKEIKRQTLLELVDFIQSGAGKLTEVCQEEMVKMISVNIFRCLPPASHENTGQEPADLEEEEPYLEPSWPHLQLIYELLLRYIVPSDTDTKVAKRYIDHSFVLRLLELFETEDPREREYLKTILHRIYGKFMVHRPFIRKAMNHIFYRFIYETERHSGIGELLEILGSIINGFALPMKEEHKLFLIRALIPLHKPKPIAMYHQQLSYCIVQFVEKDYKLADTVIRGLLKFWPVTNCTKEVLFLGELEEVLEATQTVEFQRCMVPLFQQIARCLSSSNFQVAERALFLWNNEHVVGLIAQNRGVILPIIFASLEKNIESHWNQAVHGLSANIKRMFMEMDPELFEECQQQYEEKQAKSKQVEEQRQNRWRRLDEAVEEREREDPMITS

SEQ ID NO: 48488 - protein, 473 aa, Arabidopsis thaliana
  peptide (1)..(473): Ceres Seq. ID no. 13578838
  misc_feature (49)..(462): Pfam Name: Protein phosphatase 2A regulatory B subunit (B56 Pfam Description: Protein phosphatase 2A regulatory B subunit
  misc_feature (1)..(459): Homolog of NCBI NO: 21530784 NR Description: putative protein phosphatase 2A B'zeta subunit
  misc_feature (1)..(459): Homolog of NCBI NO: 11994401 NR Description: protein phosphatase 2A B' regulatory subunit
  misc_feature (1)..(459): Homolog of NCBI NO: 20147343 NR Description: AT4g15410/dl3750w [Arabidopsis thaliana]
  misc_feature (1)..(459): Homolog of NCBI NO: 18414444 NR Description: B' regulatory subunit of PP2A (AtB'gamma)
  misc_feature (10)..(464): Homolog of NCBI NO: 21530786 NR Description: putative protein phosphatase 2A B'teta subunit
  misc_feature (1)..(473): Homolog of NCBI NO: 38345343 NR Description: OSJNBa0081L15.16 [Oryza sativa (japonica
  misc_feature (1)..(459): Homolog of NCBI NO: 7485149 NR Description: hypothetical protein - Arabidopsis thaliana
  misc_feature (1)..(460): Homolog of NCBI NO: 15233133 NR Description: protein phosphatase 2A regulatory subunit
  misc_feature (1)..(473): Homolog of NCBI NO: 15232782 NR Description: B' regulatory subunit of PP2A (AtB'beta)
  misc_feature (1)..(473): Homolog of NCBI NO: 15242766 NR Description: B' regulatory subunit of PP2A (AtB'alpha)
MYGFDPPGRSGPGSNMIVNHASRGSLVPSSPNSMAAATTQPPPMYSVEPLPLFRDVSVSERQSLFLRKLQICCFQFDFTDTLKNAREKEIKRQTLLELVDFIQSGAGKLTEVCQEEMVKMISVNIFRCLPPASHENTGQEPADLEEEEPYLEPSWPHLQLIYELLLRYIVPSDTDTKVAKRYIDHSFVLRLLELFETEDPREREYLKTILHRIYGKFMVHRPFIRKAMNHIFYRFIYETERHSGIGELLEILGSIINGFALPMKEEHKLFLIRALIPLHKPKPIAMYHQQLSYCIVQFVEKDYKLADTVIRGLLKFWPVTNCTKEVLFLGELEEVLEATQTVEFQRCMVPLFQQIARCLSSSNFQVAERALFLWNNEHVVGLIAQNRGVILPIIFASLEKNIESHWNQAVHGLSANIKRMFMEMDPELFEECQQQYEEKQAKSKQVEEQRQNRWRRLDEAVEEREREDPMITS

SEQ ID NO: 48489 - DNA, 2104 bp, Arabidopsis thaliana
  misc_feature (1)..(2104): Ceres Seq. ID no. 13600798
  misc_feature: MA Experiment ID: 20000439 Result: Up-regulated in Transcription
  misc_feature: MA Experiment 20000439 PARAMETER Experiment Name: At_Roots__P Parameter: Age (day) Value: 14 vs. 21
  misc_feature: MA Experiment 20000439 PARAMETER Experiment Name: At_Roots__P Parameter: Organism Value: A. thaliana
  misc_feature: MA Experiment 20000439 PARAMETER Experiment Name: At_Roots__P Parameter: Tissue Value: Roots vs. Whole Plant
  misc_feature: MA Experiment ID: 20000794 Result: Up-regulated in Transcription
  misc_feature: MA Experiment 20000794 PARAMETER Experiment Name: At_Petals_P Parameter: Age (day) Value: 23-25 days
  misc_feature: MA Experiment 20000794 PARAMETER Experiment Name: At_Petals_P Parameter: Plant Line Value: WS
  misc_feature: MA Experiment 20000794 PARAMETER Experiment Name: At_Petals_P Parameter: Tissue Value: Petals vs. Whole plant
  misc_feature: MA Experiment ID: 20001905 Result: Up-regulated in Transcription
  misc_feature: MA Experiment 20001905 PARAMETER Experiment Name: At_Drought_Reproduction_P Parameter: Age (day) Value: 40
  misc_feature: MA Experiment 20001905 PARAMETER Experiment Name: At_Drought_Reproduction_P Parameter: Organism Value: A. thaliana
  misc_feature: MA Experiment 20001905 PARAMETER Experiment Name: At_Drought_Reproduction_P Parameter: Plant Line Value: WS
  misc_feature: MA Experiment 20001905 PARAMETER Experiment Name: At_Drought_Reproduction_P Parameter: Timepoint (day) Value: 10
  misc_feature: MA Experiment 20001905 PARAMETER Experiment Name: At_Drought_Reproduction_P Parameter: Tissue Value: Rosettes
  misc_feature: MA Experiment 20001905 PARAMETER Experiment Name: At_Drought_Reproduction_P Parameter: Treatment Value: Drought vs. No Drought
atggaatctggtttctccggcggtggtggtgggtcggatttttacggcggtggtggtggtagatctatacctggaggtccaggaactgttatcaacgtcggtaacaataatcctcagacgacgtatagaaaccagattcctggaatcttctttgatcagatcggaaacagagtcgccggcggtaatggattctccgggaaaaggactttagcagattttcaagcggctcagcaacatcaacaacaacaacaacaacaaccgttttatagtcaagcagctctcaacgcttttctttcaaggtctgtgaagcctcgaaattatcagaattttcaatctccgtcgccgatgattgatctcacgtcggtgaatgatatgagtttgtttggtggttctggttcatctcagcgttacggtttaccggttcccaggtctcagacgcaacagcaacaatcggattacggtttatttggtgggatccgaatgggaatcgggtcgggtattaataattatccaacattaaccggcgttccgtgtattgaaccggttcaaaaccgggttcatgaatcggagaacatgttgaatagtttaagagagcttgagaaacagcttttagatgatgacgatgagagtggtggtgatgatgacgtgtcagttataacaaattcaaattccgattggattcaaaatctcgtgactccgaacccgaacccgaacccggttttgtctttttcaccgagctcttcttcttcgtcttcttcgccttctacagcttcgacgacgacatcggtatgttctaggcaaacggttatggaaatcgcgacggcgatcgcggaagggaaaacagagatagcgacggagattttggcgcgtgtttctcaaacgcctaatcttgagaggaattcagaggagaagcttgttgatttcatggtggctgcgcttcgatcgaggatagcttctccagtgacggaattgtatgggaaggagcatttaatctcgactcaattgctctacgagctctctccttgtttcaaactcggtttcgaggccgcgaatctcgccattctcgacgccgccgataacaacgacggtggaatgatgataccgcacgttatcgatttcgatatcggagaaggtggacaatacgttaaccttctccgtacattatccacgcgccggaatggtaaaagtcagagtcagaattctccggtggttaagatcaccgccgtggcgaacaacgtttacggatgtttagtcgatgacggtggagaagagaggttaaaagccgtcggagatttgttgagccaactcggtgatcgactcggtatctccgtaagtttcaacgtggtgacgagtttacgactcggtgatctgaatcgtgaatctctcgggtgtgatcccgacgagactttggctgtgaacttagctttcaagctttatcgtgttcccgacgaaagcgtatgcacggagaatccaagagacgaacttctccggcgcgtgaagggacttaaaccgcgcgtggttactctagtggagcaagaaatgaattcgaatacggcgccgtttttagggagagtgagtgagtcatgcgcgtgttacggtgcgttgcttgagtcggtcgagtctacggttcctagtacgaattccgaccgtgccaaagttgaggaaggaattggccggaagctagtaaacgcggtggcgtgcgaaggaatcgatcgtatagagcggtgcgaggtgttcgggaaatggcgaatgcggatgagcatggctgggtttgagttaatgccattgagtgagaagatagcggagtcgatgaagagtcgtggaaaccgagtccacccgggctttaccgttaaagaagataacggaggtgtgtgctttggttggatgggacgggcactcactgtcgcatccgcttggcgttaacttcacacactcttttttttcttcttattattaccatattattattattaattttcgagattattctgatattattatcattgtgattttccatttcgaaaagtgtaggaatcttatgtaacaaagaaaaaaaaaagacttttatgtttttctaataataaaagaaagagtgattgggttc

SEQ ID NO: 48490 - protein, 640 aa, Arabidopsis thaliana
  peptide (1)..(640): Ceres Seq. ID no. 13600799
  misc_feature (239)..(551): Pfam Name: GRAS family transcription factor Pfam Description: GRAS family transcription factor
  misc_feature (271)..(640): Homolog of NCBI NO: 23397333 NR Description: putative scarecrow protein [Arabidopsis thaliana]
  misc_feature (242)..(640): Homolog of NCBI NO: 26450054 NR Description: putative SCARECROW gene regulator [Arabidopsis
  misc_feature (242)..(640): Homolog of NCBI NO: 15238903 NR Description: phytochrome A signal transduction 1 (PAT1)
  misc_feature (293)..(640): Homolog of NCBI NO: 11358822 NR Description: scarecrow-like protein 1
  misc_feature (188)..(640): Homolog of NCBI NO: 34907424 NR Description: scarecrow-like protein [Oryza sativa (japonica
  misc_feature (67)..(640): Homolog of NCBI NO: 38345865 NR Description: OSJNBa0064M23.7 [Oryza sativa (japonica
  misc_feature (167)..(640): Homolog of NCBI NO: 15218990 NR Description: scarecrow-like transcription factor 1 (SCL1)
  misc_feature (59)..(640): Homolog of NCBI NO: 29367345 NR Description: scarecrow transcriptional regulator-like protein
  misc_feature (270)..(640): Homolog of NCBI NO: 20466440 NR Description: SCARECROW transcriptional regulator-like
  misc_feature (73)..(640): Homolog of NCBI NO: 11358830 NR Description: scarecrow-like protein 8
MESGFSGGGGGSDFYGGGGGRSIPGGPGTVINVGNNNPQTTYRNQIPGIFFDQIGNRVAGGNGFSGKRTLADFQAAQQHQQQQQQQPFYSQAALNAFLSRSVKPRNYQNFQSPSPMIDLTSVNDMSLFGGSGSSQRYGLPVPRSQTQQQQSDYGLFGGIRMGIGSGINNYPTLTGVPCIEPVQNRVHESENMLNSLRELEKQLLDDDDESGGDDDVSVITNSNSDWIQNLVTPNPNPNPVLSFSPSSSSSSSSPSTASTTTSVCSRQTVMEIATAIAEGKTEIATEILARVSQTPNLERNSEEKLVDFMVAALRSRIASPVTELYGKEHLISTQLLYELSPCFKLGFEAANLAILDAADNNDGGMMIPHVIDFDIGEGGQYVNLLRTLSTRRNGKSQSQNSPVVKITAVANNVYGCLVDDGGEERLKAVGDLLSQLGDRLGISVSFNVVTSLRLGDLNRESLGCDPDETLAVNLAFKLYRVPDESVCTENPRDELLRRVKGLKPRVVTLVEQEMNSNTAPFLGRVSESCACYGALLESVESTVPSTNSDRAKVEEGIGRKLVNAVACEGIDRIERCEVFGKWRMRMSMAGFELMPLSEKIAESMKSRGNRVHPGFTVKEDNGGVCFGWMGRALTVASAWR

SEQ ID NO: 48491 - protein, 525 aa, Arabidopsis thaliana
  peptide (1)..(525): Ceres Seq. ID no. 13600800
  misc_feature (124)..(436): Pfam Name: GRAS family transcription factor Pfam Description: GRAS family transcription factor
  misc_feature (156)..(525): Homolog of NCBI NO: 23397333 NR Description: putative scarecrow protein [Arabidopsis thaliana]
  misc_feature (127)..(525): Homolog of NCBI NO: 26450054 NR Description: putative SCARECROW gene regulator [Arabidopsis
  misc_feature (127)..(525): Homolog of NCBI NO: 15238903 NR Description: phytochrome A signal transduction 1 (PAT1)
  misc_feature (178)..(525): Homolog of NCBI NO: 11358822 NR Description: scarecrow-like protein 1
  misc_feature (73)..(525): Homolog of NCBI NO: 34907424 NR Description: scarecrow-like protein [Oryza sativa (japonica
  misc_feature (1)..(525): Homolog of NCBI NO: 38345865 NR Description: OSJNBa0064M23.7 [Oryza sativa (japonica
  misc_feature (52)..(525): Homolog of NCBI NO: 15218990 NR Description: scarecrow-like transcription factor 1 (SCL1)
  misc_feature (1)..(525): Homolog of NCBI NO: 29367345 NR Description: scarecrow transcriptional regulator-like protein
  misc_feature (155)..(525): Homolog of NCBI NO: 20466440 NR Description: SCARECROW transcriptional regulator-like
  misc_feature (1)..(525): Homolog of NCBI NO: 11358830 NR Description: scarecrow-like protein 8
MIDLTSVNDMSLFGGSGSSQRYGLPVPRSQTQQQQSDYGLFGGIRMGIGSGINNYPTLTGVPCIEPVQNRVHESENMLNSLRELEKQLLDDDDESGGDDDVSVITNSNSDWIQNLVTPNPNPNPVLSFSPSSSSSSSSPSTASTTTSVCSRQTVMEIATAIAEGKTEIATEILARVSQTPNLERNSEEKLVDFMVAALRSRIASPVTELYGKEHLISTQLLYELSPCFKLGFEAANLAILDAADNNDGGMMIPHVIDFDIGEGGQYVNLLRTLSTRRNGKSQSQNSPVVKITAVANNVYGCLVDDGGEERLKAVGDLLSQLGDRLGISVSFNVVTSLRLGDLNRESLGCDPDETLAVNLAFKLYRVPDESVCTENPRDELLRRVKGLKPRVVTLVEQEMNSNTAPFLGRVSESCACYGALLESVESTVPSTNSDRAKVEEGIGRKLVNAVACEGIDRIERCEVFGKWRMRMSMAGFELMPLSEKIAESMKSRGNRVHPGFTVKEDNGGVCFGWMGRALTVASAWR

SEQ ID NO: 48492 - protein, 516 aa, Arabidopsis thaliana
  peptide (1)..(516): Ceres Seq. ID no. 13600801
  misc_feature (115)..(427): Pfam Name: GRAS family transcription factor Pfam Description: GRAS family transcription factor
  misc_feature (147)..(516): Homolog of NCBI NO: 23397333 NR Description: putative scarecrow protein [Arabidopsis thaliana]
  misc_feature (118)..(516): Homolog of NCBI NO: 26450054 NR Description: putative SCARECROW gene regulator [Arabidopsis
  misc_feature (118)..(516): Homolog of NCBI NO: 15238903 NR Description: phytochrome A signal transduction 1 (PAT1)
  misc_feature (169)..(516): Homolog of NCBI NO: 11358822 NR Description: scarecrow-like protein 1
  misc_feature (64)..(516): Homolog of NCBI NO: 34907424 NR Description: scarecrow-like protein [Oryza sativa (japonica
  misc_feature (1)..(516): Homolog of NCBI NO: 38345865 NR Description: OSJNBa0064M23.7 [Oryza sativa (japonica
  misc_feature (43)..(516): Homolog of NCBI NO: 15218990 NR Description: scarecrow-like transcription factor 1 (SCL1)
  misc_feature (1)..(516): Homolog of NCBI NO: 29367345 NR Description: scarecrow transcriptional regulator-like protein
  misc_feature (146)..(516): Homolog of NCBI NO: 20466440 NR Description: SCARECROW transcriptional regulator-like
  misc_feature (1)..(516): Homolog of NCBI NO: 11358830 NR Description: scarecrow-like protein 8
MSLFGGSGSSQRYGLPVPRSQTQQQQSDYGLFGGIRMGIGSGINNYPTLTGVPCIEPVQNRVHESENMLNSLRELEKQLLDDDDESGGDDDVSVITNSNSDWIQNLVTPNPNPNPVLSFSPSSSSSSSSPSTASTTTSVCSRQTVMEIATAIAEGKTEIATEILARVSQTPNLERNSEEKLVDFMVAALRSRIASPVTELYGKEHLISTQLLYELSPCFKLGFEAANLAILDAADNNDGGMMIPHVIDFDIGEGGQYVNLLRTLSTRRNGKSQSQNSPVVKITAVANNVYGCLVDDGGEERLKAVGDLLSQLGDRLGISVSFNVVTSLRLGDLNRESLGCDPDETLAVNLAFKLYRVPDESVCTENPRDELLRRVKGLKPRVVTLVEQEMNSNTAPFLGRVSESCACYGALLESVESTVPSTNSDRAKVEEGIGRKLVNAVACEGIDRIERCEVFGKWRMRMSMAGFELMPLSEKIAESMKSRGNRVHPGFTVKEDNGGVCFGWMGRALTVASAWR

SEQ ID NO: 48493 - DNA, 1807 bp, Arabidopsis thaliana
  misc_feature (1)..(1807): Ceres Seq. ID no. 15174505
  misc_feature: MA Experiment ID: 108577 Result: Up-regulated in Transcription
  misc_feature: MA Experiment 108577 PARAMETER Experiment Name: At_42deg_Heat_cDNA_P Parameter: Temperature (deg C) Value: 42 vs. 22
  misc_feature: MA Experiment 108577 PARAMETER Experiment Name: At_42deg_Heat_cDNA_P Parameter: Timepoint (hr) Value: 6
  misc_feature: MA Experiment 108577 PARAMETER Experiment Name: At_42deg_Heat_cDNA_P Parameter: Tissue Value: Aerial
  misc_feature: MA Experiment ID: 20000169 Result: Down-regulated in Transcription
  misc_feature: MA Experiment 20000169 PARAMETER Experiment Name: At_100uM_ABA_P Parameter: Age (day) Value: 14
  misc_feature: MA Experiment 20000169 PARAMETER Experiment Name: At_100uM_ABA_P Parameter: Organism Value: A. thaliana
  misc_feature: MA Experiment 20000169 PARAMETER Experiment Name: At_100uM_ABA_P Parameter: Plant Line Value: WS
  misc_feature: MA Experiment 20000169 PARAMETER Experiment Name: At_100uM_ABA_P Parameter: Timepoint (hr) Value: 6
  misc_feature: MA Experiment 20000169 PARAMETER Experiment Name: At_100uM_ABA_P Parameter: Tissue Value: Aerial
  misc_feature: MA Experiment 20000169 PARAMETER Experiment Name: At_100uM_ABA_P Parameter: Treatment Value: 100uM ABA vs. No Treatment
  misc_feature: MA Experiment ID: 20000180 Result: Up-regulated in Transcription
  misc_feature: MA Experiment 20000180 PARAMETER Experiment Name: At_Germinating_Seeds_P Parameter: Age (hr) Value: 24 vs. 0
  misc_feature: MA Experiment 20000180 PARAMETER Experiment Name: At_Germinating_Seeds_P Parameter: Tissue Value: Germinating Seeds
  misc_feature: MA Experiment ID: 20000182 Result: Down-regulated in Transcription
  misc_feature: MA Experiment 20000182 PARAMETER Experiment Name: At_2mM_SA_P Parameter: Age (day) Value: 14
  misc_feature: MA Experiment 20000182 PARAMETER Experiment Name: At_2mM_SA_P Parameter: Organism Value: A. thaliana
  misc_feature: MA Experiment 20000182 PARAMETER Experiment Name: At_2mM_SA_P Parameter: Plant Line Value: WS
  misc_feature: MA Experiment 20000182 PARAMETER Experiment Name: At_2mM_SA_P Parameter: Timepoint (hr) Value: 6
  misc_feature: MA Experiment 20000182 PARAMETER Experiment Name: At_2mM_SA_P Parameter: Tissue Value: Aerial
  misc_feature: MA Experiment 20000182 PARAMETER Experiment Name: At_2mM_SA_P Parameter: Treatment Value: 2mM SA vs. No Treatment
  misc_feature: MA Experiment ID: 20000185 Result: Down-regulated in Transcription
  misc_feature: MA Experiment 20000185 PARAMETER Experiment Name: At_Roots__P Parameter: Age (day) Value: 7 vs. 21
  misc_feature: MA Experiment 20000185 PARAMETER Experiment Name: At_Roots__P Parameter: Organism Value: A. thaliana
  misc_feature: MA Experiment 20000185 PARAMETER Experiment Name: At_Roots__P Parameter: Tissue Value: Roots vs. Whole Plant
  misc_feature: MA Experiment ID: 20000214 Result: Up-regulated in Transcription
  misc_feature: MA Experiment 20000214 PARAMETER Experiment Name: At_4deg_Cold_P Parameter: Timepoint (hr) Value: 6
  misc_feature: MA Experiment ID: 20000437 Result: Down-regulated in Transcription
  misc_feature: MA Experiment 20000437 PARAMETER Experiment Name: At_Drought_P Parameter: Age (day) Value: 8
  misc_feature: MA Experiment 20000437 PARAMETER Experiment Name: At_Drought_P Parameter: Organism Value: A. thaliana
  misc_feature: MA Experiment 20000437 PARAMETER Experiment Name: At_Drought_P Parameter: Plant Line Value: WS
  misc_feature: MA Experiment 20000437 PARAMETER Experiment Name: At_Drought_P Parameter: Timepoint (hr) Value: 24
  misc_feature: MA Experiment 20000437 PARAMETER Experiment Name: At_Drought_P Parameter: Tissue Value: Whole Plant
  misc_feature: MA Experiment 20000437 PARAMETER Experiment Name: At_Drought_P Parameter: Treatment Value: Drought vs. No Drought
  misc_feature: MA Experiment ID: 20000439 Result: Down-regulated in Transcription
  misc_feature: MA Experiment 20000439 PARAMETER Experiment Name: At_Roots__P Parameter: Age (day) Value: 14 vs. 21
  misc_feature: MA Experiment 20000439 PARAMETER Experiment Name: At_Roots__P Parameter: Organism Value: A. thaliana
  misc_feature: MA Experiment 20000439 PARAMETER Experiment Name: At_Roots__P Parameter: Tissue Value: Roots vs. Whole Plant
  misc_feature: MA Experiment ID: 20000441 Result: Down-regulated in Transcription
  misc_feature: MA Experiment 20000441 PARAMETER Experiment Name: At_1uM_BR-BRZ__P Parameter: Tissue Value: Shoot Apices
  misc_feature: MA Experiment 20000441 PARAMETER Experiment Name: At_1uM_BR-BRZ__P Parameter: Treatment Value: 1uM BR vs. No Treatment
  misc_feature: MA Experiment ID: 20000453 Result: Down-regulated in Transcription
  misc_feature: MA Experiment 20000453 PARAMETER Experiment Name: At_100uM_ABA_P Parameter: Age (day) Value: 15
  misc_feature: MA Experiment 20000453 PARAMETER Experiment Name: At_100uM_ABA_P Parameter: Organism Value: A. thaliana
  misc_feature: MA Experiment 20000453 PARAMETER Experiment Name: At_100uM_ABA_P Parameter: Plant Line Value: WS
  misc_feature: MA Experiment 20000453 PARAMETER Experiment Name: At_100uM_ABA_P Parameter: Timepoint (hr) Value: 24
  misc_feature: MA Experiment 20000453 PARAMETER Experiment Name: At_100uM_ABA_P Parameter: Tissue Value: Aerial
  misc_feature: MA Experiment 20000453 PARAMETER Experiment Name: At_100uM_ABA_P Parameter: Treatment Value: 100uM ABA vs. No Treatment
  misc_feature: MA Experiment ID: 20000527 Result: Up-regulated in Transcription
  misc_feature: MA Experiment 20000527 PARAMETER Experiment Name: At_10percent_PEG_P Parameter: Age (day) Value: 20
  misc_feature: MA Experiment 20000527 PARAMETER Experiment Name: At_10percent_PEG_P Parameter: Organism Value: A. thaliana
  misc_feature: MA Experiment 20000527 PARAMETER Experiment Name: At_10percent_PEG_P Parameter: Plant Line Value: WS
  misc_feature: MA Experiment 20000527 PARAMETER Experiment Name: At_10percent_PEG_P Parameter: Timepoint (day) Value: 20
  misc_feature: MA Experiment 20000527 PARAMETER Experiment Name: At_10percent_PEG_P Parameter: Tissue Value: Whole Plant
  misc_feature: MA Experiment 20000527 PARAMETER Experiment Name: At_10percent_PEG_P Parameter: Treatment Value: 10percent PEG vs. No Treatment
  misc_feature: MA Experiment ID: 20000573 Result: Up-regulated in Transcription
  misc_feature: MA Experiment 20000573 PARAMETER Experiment Name: At_100uM_ABA_Mutants__P Parameter: Organism Value: A. thaliana
  misc_feature: MA Experiment 20000573 PARAMETER Experiment Name: At_100uM_ABA_Mutants__P Parameter: Plant Line Value: CS22 vs. Ler wt
  misc_feature: MA Experiment 20000573 PARAMETER Experiment Name: At_100uM_ABA_Mutants__P Parameter: Timepoint (hr) Value: N/A
  misc_feature: MA Experiment 20000573 PARAMETER Experiment Name: At_100uM_ABA_Mutants__P Parameter: Tissue Value: Whole Plant
  misc_feature: MA Experiment 20000573 PARAMETER Experiment Name: At_100uM_ABA_Mutants__P Parameter: Treatment Value: None
  misc_feature: MA Experiment ID: 20000574 Result: Up-regulated in Transcription
  misc_feature: MA Experiment 20000574 PARAMETER Experiment Name: At_100uM_ABA_Mutants__P Parameter: Organism Value: A. thaliana
  misc_feature: MA Experiment 20000574 PARAMETER Experiment Name: At_100uM_ABA_Mutants__P Parameter: Plant Line Value: CS23 vs. Ler wt
  misc_feature: MA Experiment 20000574 PARAMETER Experiment Name: At_100uM_ABA_Mutants__P Parameter: Timepoint (hr) Value: N/A
  misc_feature: MA Experiment 20000574 PARAMETER Experiment Name: At_100uM_ABA_Mutants__P Parameter: Tissue Value: Whole Plant
  misc_feature: MA Experiment 20000574 PARAMETER Experiment Name: At_100uM_ABA_Mutants__P Parameter: Treatment Value: None
  misc_feature: MA Experiment ID: 20000794 Result: Down-regulated in Transcription
  misc_feature: MA Experiment 20000794 PARAMETER Experiment Name: At_Petals_P Parameter: Age (day) Value: 23-25 days
  misc_feature: MA Experiment 20000794 PARAMETER Experiment Name: At_Petals_P Parameter: Plant Line Value: WS
  misc_feature: MA Experiment 20000794 PARAMETER Experiment Name: At_Petals_P Parameter: Tissue Value: Petals vs. Whole plant
  misc_feature: MA Experiment ID: 20001247 Result: Down-regulated in Transcription
  misc_feature: MA Experiment 20001247 PARAMETER Experiment Name: At_Far-red-induction_P Parameter: Age (day) Value: 7
  misc_feature: MA Experiment 20001247 PARAMETER Experiment Name: At_Far-red-induction_P Parameter: Light Value: Far-red vs. White
  misc_feature: MA Experiment 20001247 PARAMETER Experiment Name: At_Far-red-induction_P Parameter: Organism Value: A. thaliana
  misc_feature: MA Experiment 20001247 PARAMETER Experiment Name: At_Far-red-induction_P Parameter: Plant Line Value: Columbia
  misc_feature: MA Experiment 20001247 PARAMETER Experiment Name: At_Far-red-induction_P Parameter: Timepoint (hr) Value: 1
  misc_feature: MA Experiment 20001247 PARAMETER Experiment Name: At_Far-red-induction_P Parameter: Tissue Value: Whole Plant
  misc_feature: MA Experiment ID: 20001451 Result: Down-regulated in Transcription
  misc_feature: MA Experiment 20001451 PARAMETER Experiment Name: At_Far-red-induction_P Parameter: Age (day) Value: 7
  misc_feature: MA Experiment 20001451 PARAMETER Experiment Name: At_Far-red-induction_P Parameter: Light Value: Far-red vs. White
  misc_feature: MA Experiment 20001451 PARAMETER Experiment Name: At_Far-red-induction_P Parameter: Organism Value: A. thaliana
  misc_feature: MA Experiment 20001451 PARAMETER Experiment Name: At_Far-red-induction_P Parameter: Plant Line Value: Columbia
  misc_feature: MA Experiment 20001451 PARAMETER Experiment Name: At_Far-red-induction_P Parameter: Timepoint (hr) Value: 24
  misc_feature: MA Experiment 20001451 PARAMETER Experiment Name: At_Far-red-induction_P Parameter: Tissue Value: Whole Plant
  misc_feature: MA Experiment ID: 20001555 Result: Down-regulated in Transcription
  misc_feature: MA Experiment 20001555 PARAMETER Experiment Name: At_Drought_Soil_Dry_P Parameter: Age (day) Value: 24
  misc_feature: MA Experiment 20001555 PARAMETER Experiment Name: At_Drought_Soil_Dry_P Parameter: Organism Value: A. thaliana
  misc_feature: MA Experiment 20001555 PARAMETER Experiment Name: At_Drought_Soil_Dry_P Parameter: Plant Line Value: WS
  misc_feature: MA Experiment 20001555 PARAMETER Experiment Name: At_Drought_Soil_Dry_P Parameter: Post Timepoint (hr) Value: None
  misc_feature: MA Experiment 20001555 PARAMETER Experiment Name: At_Drought_Soil_Dry_P Parameter: Post-Treatment Value: None
  misc_feature: MA Experiment 20001555 PARAMETER Experiment Name: At_Drought_Soil_Dry_P Parameter: Timepoint (day) Value: 10
  misc_feature: MA Experiment 20001555 PARAMETER Experiment Name: At_Drought_Soil_Dry_P Parameter: Treatment Value: Drought vs. No Drought
  misc_feature: MA Experiment ID: 20001556 Result: Down-regulated in Transcription
  misc_feature: MA Experiment 20001556 PARAMETER Experiment Name: At_Drought_Soil_Dry_P Parameter: Age (day) Value: 26
  misc_feature: MA Experiment 20001556 PARAMETER Experiment Name: At_Drought_Soil_Dry_P Parameter: Organism Value: A. thaliana
  misc_feature: MA Experiment 20001556 PARAMETER Experiment Name: At_Drought_Soil_Dry_P Parameter: Plant Line Value: WS
  misc_feature: MA Experiment 20001556 PARAMETER Experiment Name: At_Drought_Soil_Dry_P Parameter: Post Timepoint (hr) Value: None
  misc_feature: MA Experiment 20001556 PARAMETER Experiment Name: At_Drought_Soil_Dry_P Parameter: Post-Treatment Value: None
  misc_feature: MA Experiment 20001556 PARAMETER Experiment Name: At_Drought_Soil_Dry_P Parameter: Timepoint (day) Value: 12
  misc_feature: MA Experiment 20001556 PARAMETER Experiment Name: At_Drought_Soil_Dry_P Parameter: Treatment Value: Drought vs. No Drought
  misc_feature: MA Experiment ID: 20001559 Result: Down-regulated in Transcription
  misc_feature: MA Experiment 20001559 PARAMETER Experiment Name: At_Drought_Soil_Dry_P Parameter: Age (day) Value: 28
  misc_feature: MA Experiment 20001559 PARAMETER Experiment Name: At_Drought_Soil_Dry_P Parameter: Organism Value: A. thaliana
  misc_feature: MA Experiment 20001559 PARAMETER Experiment Name: At_Drought_Soil_Dry_P Parameter: Plant Line Value: WS
  misc_feature: MA Experiment 20001559 PARAMETER Experiment Name: At_Drought_Soil_Dry_P Parameter: Post Timepoint (hr) Value: 29
  misc_feature: MA Experiment 20001559 PARAMETER Experiment Name: At_Drought_Soil_Dry_P Parameter: Post-Treatment Value: Re-Water vs. No Drought
  misc_feature: MA Experiment 20001559 PARAMETER Experiment Name: At_Drought_Soil_Dry_P Parameter: Timepoint (day) Value: 14
  misc_feature: MA Experiment 20001559 PARAMETER Experiment Name: At_Drought_Soil_Dry_P Parameter: Treatment Value: Drought vs. No Drought
  misc_feature: MA Experiment ID: 20001761 Result: Up-regulated in Transcription
  misc_feature: MA Experiment 20001761 PARAMETER Experiment Name: At_50mM_NH4NO3_L-to-H_P Parameter: Timepoint (hr) Value: 4
  misc_feature: MA Experiment 20001761 PARAMETER Experiment Name: At_50mM_NH4NO3_L-to-H_P Parameter: Tissue Value: Siliques
  misc_feature: MA Experiment 20001761 PARAMETER Experiment Name: At_50mM_NH4NO3_L-to-H_P Parameter: Treatment Value: 50mM NH4NO3 vs 100mM Mannitol
  misc_feature: MA Experiment ID: 20001906 Result: Down-regulated in Transcription
  misc_feature: MA Experiment 20001906 PARAMETER Experiment Name: At_Drought_Reproduction_P Parameter: Age (day) Value: 35
  misc_feature: MA Experiment 20001906 PARAMETER Experiment Name: At_Drought_Reproduction_P Parameter: Organism Value: A. thaliana
  misc_feature: MA Experiment 20001906 PARAMETER Experiment Name: At_Drought_Reproduction_P Parameter: Plant Line Value: WS
  misc_feature: MA Experiment 20001906 PARAMETER Experiment Name: At_Drought_Reproduction_P Parameter: Timepoint (day) Value: 5
  misc_feature: MA Experiment 20001906 PARAMETER Experiment Name: At_Drought_Reproduction_P Parameter: Tissue Value: Siliques
  misc_feature: MA Experiment 20001906 PARAMETER Experiment Name: At_Drought_Reproduction_P Parameter: Treatment Value: Drought vs. No Drought
  misc_feature: MA Experiment ID: 20001908 Result: Down-regulated in Transcription
  misc_feature: MA Experiment 20001908 PARAMETER Experiment Name: At_Drought_Reproduction_P Parameter: Age (day) Value: 40
  misc_feature: MA Experiment 20001908 PARAMETER Experiment Name: At_Drought_Reproduction_P Parameter: Organism Value: A. thaliana
  misc_feature: MA Experiment 20001908 PARAMETER Experiment Name: At_Drought_Reproduction_P Parameter: Plant Line Value: WS
  misc_feature: MA Experiment 20001908 PARAMETER Experiment Name: At_Drought_Reproduction_P Parameter: Timepoint (day) Value: 10
  misc_feature: MA Experiment 20001908 PARAMETER Experiment Name: At_Drought_Reproduction_P Parameter: Tissue Value: Siliques
  misc_feature: MA Experiment 20001908 PARAMETER Experiment Name: At_Drought_Reproduction_P Parameter: Treatment Value: Drought vs. No Drought
  misc_feature: MA Experiment ID: 20001911 Result: Down-regulated in Transcription
  misc_feature: MA Experiment 20001911 PARAMETER Experiment Name: At_Drought_Reproduction_P Parameter: Age (day) Value: 40
  misc_feature: MA Experiment 20001911 PARAMETER Experiment Name: At_Drought_Reproduction_P Parameter: Organism Value: A. thaliana
  misc_feature: MA Experiment 20001911 PARAMETER Experiment Name: At_Drought_Reproduction_P Parameter: Plant Line Value: WS
  misc_feature: MA Experiment 20001911 PARAMETER Experiment Name: At_Drought_Reproduction_P Parameter: Timepoint (day) Value: 10
  misc_feature: MA Experiment 20001911 PARAMETER Experiment Name: At_Drought_Reproduction_P Parameter: Tissue Value: Flowers
  misc_feature: MA Experiment 20001911 PARAMETER Experiment Name: At_Drought_Reproduction_P Parameter: Treatment Value: Drought vs. No Drought
gatgcaaaattcggcctcttaattttcaaaattttcgacctccgatctcccatctccgcttccatcatctttaggatctctcaatctctttcttcactgatcgattagggttttcgagctgaaatcgatactcctccaccgcgaagaagcgattacctagatttttcttctaggtttctggcggatctcgccaagttctccttattctcttcagctacggcgaagctttctctagctccactcctccctcgccaccatgttttggaagctcacatctctctctgcatcatctcctatggagataatattagacaaagaaaatttcacgttggaagagcttcttgatgaggaagagattattcaagaatgcaaggctttgaatagcaggctcattaactttctaagggataaagctcaagtggagcaattattgcggtacattgttgaagaacctccacaggatgctgatagtaaacgtgctttcaagtttccattcatctcttgtgaaatatttacatgtgaaatagatgttattctaaaaactttggtcgaggatgaagagctgatgaacttgcttttttcctttctggaaccaaatcgtcctcatagtgcattgctggcaggctatttcagcaaggatgtcatttgccttatgatcagaaaaactgcagcgcttatgaattatgtaaaagggcatcaaaatgttttctgccagttagttgatttgattgggataacatccatcatggaggttttggttcgcttggttggggctgatgaccaagtctatcccaactttctggatgtgatgcaatggttggctgatagcaatttacttgaaatgatcgtggacaaacttaaaccatctgtaagtggttaagcttttctataatcatcccagagacaagaggagctccctaggtttccccccccccccccgcgagaacttcaacaagagctcttatctataaaacattctaaagaaaaatgaagatgataatccaaattttcttcatcatctccctcatttcaaccatctcttttgcctctgttcaagacttttgtgtagctgatccaaagggtcctcaaagcccatcaggatactcttgcaagaaccctgaccaagtcaccgaaaatgactttgcatttaccggcctcggcaaagctggaaacacttccaacatcattaaagccgcagtgactccagcctttgctcctgcttacgcaggcatcaatggccttggcgtatctctggctcgtcttgacttagccggtggtggtgtcatccctctccacactcatcctggtgcttctgaggtccttgtagttattcaaggcaccatttgcgccgggtttatctcctctgctaacaaagtttacttaaagacacttaacagaggtgattctatggtgtttcctcaaggacttcttcattttcagctaaactctgggaaaggccctgccttagcctttgtcgcattcggaagctcctccccagggctccagattctaccatttgctctgtttgcaaacgatttgccttcagaacttgttgaagccacaacgttccttagcgatgcagaagttaagaagcttaagggtgtgcttggaggaactaattaagcttcacttagtttcattgttcattttttttcaaaaatgtggttgtgcgttttgttatttcgagttcctctagcattttgagtttgtttttctttatgagttgttattgttctcgaagttttcacttttatagtctctttggcttgaattgtaataactaataagcattacattgcagatttct

SEQ ID NO: 48494 - protein, 211 aa, Arabidopsis thaliana; identical to SEQ ID NO: 24661
  peptide (1)..(211): Ceres Seq. ID no. 15174506
  misc_feature (55)..(201): Pfam Name: Cupin Pfam Description: Cupin
  misc_feature (79)..(204): Homolog of NCBI NO: 28261013 NR Description: germin-like protein 1 [Medicago truncatula]
  misc_feature (1)..(200): Homolog of NCBI NO: 38637079 NR Description: putative germin A [Oryza sativa (japonica
  misc_feature (10)..(204): Homolog of NCBI NO: 38568035 NR Description: OSJNBa0065J03.5 [Oryza sativa (japonica
  misc_feature (3)..(211): Homolog of NCBI NO: 18203684 NR Description: Auxin-binding protein ABP19a precursor
  misc_feature (1)..(210): Homolog of NCBI NO: 13277342 NR Description: Germin-like protein [Pisum sativum]
  misc_feature (24)..(211): Homolog of NCBI NO: 1755188 NR Description: germin-like protein [Arabidopsis thaliana]
  misc_feature (1)..(211): Homolog of NCBI NO: 1169944 NR Description: Germin-like protein 1 precursor
  misc_feature (1)..(211): Homolog of NCBI NO: 15242028 NR Description: germin-like protein (AtGER3) [Arabidopsis
  misc_feature (1)..(211): Homolog of NCBI NO: 1755154 NR Description: germin-like protein [Arabidopsis thaliana]

SEQ ID NO: 48495 - protein, 209 aa, Arabidopsis thaliana; identical to SEQ ID NO: 24662
  peptide (1)..(209): Ceres Seq. ID no. 15174507
  misc_feature (53)..(199): Pfam Name: Cupin Pfam Description: Cupin
  misc_feature (77)..(202): Homolog of NCBI NO: 28261013 NR Description: germin-like protein 1 [Medicago truncatula]
  misc_feature (1)..(198): Homolog of NCBI NO: 38637079 NR Description: putative germin A [Oryza sativa (japonica
  misc_feature (8)..(202): Homolog of NCBI NO: 38568035 NR Description: OSJNBa0065J03.5 [Oryza sativa (japonica
  misc_feature (1)..(209): Homolog of NCBI NO: 18203684 NR Description: Auxin-binding protein ABP19a precursor
  misc_feature (1)..(208): Homolog of NCBI NO: 13277342 NR Description: Germin-like protein [Pisum sativum]
  misc_feature (22)..(209): Homolog of NCBI NO: 1755188 NR Description: germin-like protein [Arabidopsis thaliana]
  misc_feature (1)..(209): Homolog of NCBI NO: 1169944 NR Description: Germin-like protein 1 precursor
  misc_feature (1)..(209): Homolog of NCBI NO: 15242028 NR Description: germin-like protein (AtGER3) [Arabidopsis
  misc_feature (1)..(209): Homolog of NCBI NO: 1755154 NR Description: germin-like protein [Arabidopsis thaliana]

SEQ ID NO: 48496 - protein, 207 aa, Arabidopsis thaliana
  peptide (1)..(207): Ceres Seq. ID no. 15174508
  misc_feature (129)..(204): Pfam Name: SIT4 phosphatase-associated protein Pfam Description: SIT4 phosphatase-associated protein
  misc_feature (133)..(207): Homolog of NCBI NO: 30691736 NR Description: SIT4 phosphatase-associated protein family
  misc_feature (1)..(102): Homolog of NCBI NO: 30691736 NR Description: SIT4 phosphatase-associated protein family
  misc_feature (143)..(206): Homolog of NCBI NO: 15230633 NR Description: expressed protein [Arabidopsis thaliana]
  misc_feature (45)..(127): Homolog of NCBI NO: 15230633 NR Description: expressed protein [Arabidopsis thaliana]
  misc_feature (143)..(207): Homolog of NCBI NO: 25370579 NR Description: F26G16.7 protein - Arabidopsis thaliana
  misc_feature (1)..(128): Homolog of NCBI NO: 25370579 NR Description: F26G16.7 protein - Arabidopsis thaliana
  misc_feature (1)..(207): Homolog of NCBI NO: 38344337 NR Description: OSJNBa0058K23.19 [Oryza sativa (japonica
  misc_feature (14)..(204): Homolog of NCBI NO: 15226390 NR Description: expressed protein [Arabidopsis thaliana]
  misc_feature (1)..(204): Homolog of NCBI NO: 30680443 NR Description: expressed protein [Arabidopsis thaliana]
  misc_feature (11)..(204): Homolog of NCBI NO: 25370580 NR Description: protein T6D22.8 [imported] - Arabidopsis thaliana
MFWKLTSLSASSPMEIILDKENFTLEELLDEEEIIQECKALNSRLINFLRDKAQVEQLLRYIVEEPPQDADSKRAFKFPFISCEIFTCEIDVILKTLVEDEELMNLLFSFLEPNRPHSALLAGYFSKDVICLMIRKTAALMNYVKGHQNVFCQLVDLIGITSIMEVLVRLVGADDQVYPNFLDVMQWLADSNLLEMIVDKLKPSVSG

SEQ ID NO: 48497 - DNA, 1289 bp, Arabidopsis thaliana; identical to SEQ ID NO: 38904
  misc_feature (1)..(1289): Ceres Seq. ID no. 12580406
  misc_feature: MA Experiment ID: 108434 Result: Down-regulated in Transcription
  misc_feature: MA Experiment 108434 PARAMETER Experiment Name: At_Root_Tips_cDNA_P Parameter: Tissue Value: Root Tips

SEQ ID NO: 48498 - protein, 163 aa, Arabidopsis thaliana; identical to SEQ ID NO: 38905
  peptide (1)..(163): Ceres Seq. ID no. 12580407
  misc_feature (7)..(130): Pfam Name: Oxidoreductase family, NAD-binding Rossmann fold Pfam Description: Oxidoreductase family, NAD-binding Rossmann fold
  misc_feature (7)..(130): Pfam Name: Oxidoreductase family, NAD-binding Rossmann fold Pfam Description: Oxidoreductase family, NAD-binding Rossmann fold
  misc_feature (5)..(155): Homolog of NCBI NO: 15616405 NR Description: oxidoreductase [Bacillus halodurans]
  misc_feature (8)..(157): Homolog of NCBI NO: 32474689 NR Description: putative oxidoreductase [Pirellula sp.]
  misc_feature (8)..(157): Homolog of NCBI NO: 17549134 NR Description: CONSERVED HYPOTHETICAL PROTEIN [Ralstonia
  misc_feature (1)..(158): Homolog of NCBI NO: 15218937 NR Description: oxidoreductase, putative; protein id: At1g66130.1
  misc_feature (7)..(158): Homolog of NCBI NO: 37534168 NR Description: putative oxidoreductase [Oryza sativa (japonica
  misc_feature (5)..(155): Homolog of NCBI NO: 15616405 NR Description: oxidoreductase [Bacillus halodurans]
  misc_feature (8)..(157): Homolog of NCBI NO: 17549134 NR Description: CONSERVED HYPOTHETICAL PROTEIN [Ralstonia
  misc_feature (7)..(158): Homolog of NCBI NO: 37534168 NR Description: putative oxidoreductase [Oryza sativa (japonica
  misc_feature (1)..(158): Homolog of NCBI NO: 18399170 NR Description: expressed protein
  misc_feature (1)..(158): Homolog of NCBI NO: 25518452 NR Description: hypothetical protein F23M19.12 [imported] -
  misc_feature (1)..(157): Homolog of NCBI NO: 15233990 NR Description: AX110P -like protein
  misc_feature (25)..(157): Homolog of NCBI NO: 21954073 NR Description: putative AX110P protein [Arabidopsis thaliana]
  misc_feature (7)..(162): Homolog of NCBI NO: 7488933 NR Description: protein AX110P - carrot
  misc_feature (1)..(158): Homolog of NCBI NO: 15218937 NR Description: oxidoreductase, putative; protein id: At1g66130.1
  misc_feature (8)..(157): Homolog of NCBI NO: 32474689 NR Description: putative oxidoreductase [Pirellula sp.]
  misc_feature (7)..(162): Homolog of NCBI NO: 7488933 NR Description: protein AX110P - carrot
  misc_feature (25)..(157): Homolog of NCBI NO: 21954073 NR Description: putative AX110P protein [Arabidopsis thaliana]
  misc_feature (1)..(157): Homolog of NCBI NO: 15233990 NR Description: AX110P -like protein
  misc_feature (1)..(158): Homolog of NCBI NO: 25518452 NR Description: hypothetical protein F23M19.12 [imported] -
  misc_feature (1)..(158): Homolog of NCBI NO: 18399170 NR Description: expressed protein

SEQ ID NO: 48499 - protein, 103 aa, Arabidopsis thaliana; identical to SEQ ID NO: 38906
  peptide (1)..(103): Ceres Seq. ID no. 12580408
  misc_feature (1)..(30): Homolog of NCBI NO: 32474689 NR Description: putative oxidoreductase [Pirellula sp.]
  misc_feature (1)..(98): Homolog of NCBI NO: 17549134 NR Description: CONSERVED HYPOTHETICAL PROTEIN [Ralstonia
  misc_feature (1)..(47): Homolog of NCBI NO: 15218937 NR Description: oxidoreductase, putative; protein id: At1g66130.1
  misc_feature (1)..(100): Homolog of NCBI NO: 15218937 NR Description: oxidoreductase, putative; protein id: At1g66130.1
  misc_feature (1)..(56): Homolog of NCBI NO: 37534168 NR Description: putative oxidoreductase [Oryza sativa (japonica
  misc_feature (1)..(91): Homolog of NCBI NO: 7488933 NR Description: protein AX110P - carrot
  misc_feature (1)..(103): Homolog of NCBI NO: 21954073 NR Description: putative AX110P protein [Arabidopsis thaliana]
  misc_feature (1)..(103): Homolog of NCBI NO: 15233990 NR Description: AX110P -like protein
  misc_feature (1)..(103): Homolog of NCBI NO: 25518452 NR Description: hypothetical protein F23M19.12 [imported] -
  misc_feature (1)..(103): Homolog of NCBI NO: 18399170 NR Description: expressed protein
  misc_feature (1)..(30): Homolog of NCBI NO: 32474689 NR Description: putative oxidoreductase [Pirellula sp.]
  misc_feature (1)..(98): Homolog of NCBI NO: 17549134 NR Description: CONSERVED HYPOTHETICAL PROTEIN [Ralstonia
  misc_feature (1)..(47): Homolog of NCBI NO: 15218937 NR Description: oxidoreductase, putative; protein id: At1g66130.1
  misc_feature (1)..(100): Homolog of NCBI NO: 15218937 NR Description: oxidoreductase, putative; protein id: At1g66130.1
  misc_feature (1)..(56): Homolog of NCBI NO: 37534168 NR Description: putative oxidoreductase [Oryza sativa (japonica
  misc_feature (1)..(91): Homolog of NCBI NO: 7488933 NR Description: protein AX110P - carrot
  misc_feature (1)..(103): Homolog of NCBI NO: 21954073 NR Description: putative AX110P protein [Arabidopsis thaliana]
  misc_feature (1)..(103): Homolog of NCBI NO: 15233990 NR Description: AX110P -like protein
  misc_feature (1)..(103): Homolog of NCBI NO: 25518452 NR Description: hypothetical protein F23M19.12 [imported] -
  misc_feature (1)..(103): Homolog of NCBI NO: 18399170 NR Description: expressed protein

SEQ ID NO: 48500 - protein, 82 aa, Arabidopsis thaliana; identical to SEQ ID NO: 38907
  peptide (1)..(82): Ceres Seq. ID no. 12580409
  misc_feature (1)..(77): Homolog of NCBI NO: 17549134 NR Description: CONSERVED HYPOTHETICAL PROTEIN [Ralstonia
  misc_feature (1)..(26): Homolog of NCBI NO: 15218937 NR Description: oxidoreductase, putative; protein id: At1g66130.1
  misc_feature (1)..(79): Homolog of NCBI NO: 15218937 NR Description: oxidoreductase, putative; protein id: At1g66130.1
  misc_feature (1)..(35): Homolog of NCBI NO: 37534168 NR Description: putative oxidoreductase [Oryza sativa (japonica
  misc_feature (1)..(70): Homolog of NCBI NO: 7488933 NR Description: protein AX110P - carrot
  misc_feature (1)..(82): Homolog of NCBI NO: 21954073 NR Description: putative AX110P protein [Arabidopsis thaliana]
  misc_feature (1)..(82): Homolog of NCBI NO: 15233990 NR Description: AX110P -like protein
  misc_feature (1)..(82): Homolog of NCBI NO: 25518452 NR Description: hypothetical protein F23M19.12 [imported] -
  misc_feature (1)..(82): Homolog of NCBI NO: 18399170 NR Description: expressed protein
  misc_feature (1)..(77): Homolog of NCBI NO: 17549134 NR Description: CONSERVED HYPOTHETICAL PROTEIN [Ralstonia
  misc_feature (1)..(26): Homolog of NCBI NO: 15218937 NR Description: oxidoreductase, putative; protein id: At1g66130.1
  misc_feature (1)..(79): Homolog of NCBI NO: 15218937 NR Description: oxidoreductase, putative; protein id: At1g66130.1
  misc_feature (1)..(35): Homolog of NCBI NO: 37534168 NR Description: putative oxidoreductase [Oryza sativa (japonica
  misc_feature (1)..(70): Homolog of NCBI NO: 7488933 NR Description: protein AX110P - carrot
  misc_feature (1)..(82): Homolog of NCBI NO: 21954073 NR Description: putative AX110P protein [Arabidopsis thaliana]
  misc_feature (1)..(82): Homolog of NCBI NO: 15233990 NR Description: AX110P -like protein
  misc_feature (1)..(82): Homolog of NCBI NO: 25518452 NR Description: hypothetical protein F23M19.12 [imported] -
  misc_feature (1)..(82): Homolog of NCBI NO: 18399170 NR Description: expressed protein

SEQ ID NO: 48501 - DNA, 2141 bp, Arabidopsis thaliana
  misc_feature (1)..(2141): Ceres Seq. ID no. 14310346
  misc_feature: MA Experiment ID: 20000171 Result: Up-regulated in Transcription
  misc_feature: MA Experiment 20000171 PARAMETER Experiment Name: At_42deg_Heat_P Parameter: Age (day) Value: 14
  misc_feature: MA Experiment 20000171 PARAMETER Experiment Name: At_42deg_Heat_P Parameter: Organism Value: A. thaliana
  misc_feature: MA Experiment 20000171 PARAMETER Experiment Name: At_42deg_Heat_P Parameter: Plant Line Value: WS
  misc_feature: MA Experiment 20000171 PARAMETER Experiment Name: At_42deg_Heat_P Parameter: Temperature (deg C) Value: 42 vs. 22
  misc_feature: MA Experiment 20000171 PARAMETER Experiment Name: At_42deg_Heat_P Parameter: Timepoint (hr) Value: 1
  misc_feature: MA Experiment 20000171 PARAMETER Experiment Name: At_42deg_Heat_P Parameter: Tissue Value: Aerial
  misc_feature: MA Experiment ID: 20000173 Result: Up-regulated in Transcription
  misc_feature: MA Experiment 20000173 PARAMETER Experiment Name: At_42deg_Heat_P Parameter: Age (day) Value: 14
  misc_feature: MA Experiment 20000173 PARAMETER Experiment Name: At_42deg_Heat_P Parameter: Organism Value: A. thaliana
  misc_feature: MA Experiment 20000173 PARAMETER Experiment Name: At_42deg_Heat_P Parameter: Plant Line Value: WS
  misc_feature: MA Experiment 20000173 PARAMETER Experiment Name: At_42deg_Heat_P Parameter: Temperature (deg C) Value: 42 vs. 22
  misc_feature: MA Experiment 20000173 PARAMETER Experiment Name: At_42deg_Heat_P Parameter: Timepoint (hr) Value: 6
  misc_feature: MA Experiment 20000173 PARAMETER Experiment Name: At_42deg_Heat_P Parameter: Tissue Value: Aerial
  misc_feature: MA Experiment ID: 20000437 Result: Up-regulated in Transcription
  misc_feature: MA Experiment 20000437 PARAMETER Experiment Name: At_Drought_P Parameter: Age (day) Value: 8
  misc_feature: MA Experiment 20000437 PARAMETER Experiment Name: At_Drought_P Parameter: Organism Value: A. thaliana
  misc_feature: MA Experiment 20000437 PARAMETER Experiment Name: At_Drought_P Parameter: Plant Line Value: WS
  misc_feature: MA Experiment 20000437 PARAMETER Experiment Name: At_Drought_P Parameter: Timepoint (hr) Value: 24
  misc_feature: MA Experiment 20000437 PARAMETER Experiment Name: At_Drought_P Parameter: Tissue Value: Whole Plant
  misc_feature: MA Experiment 20000437 PARAMETER Experiment Name: At_Drought_P Parameter: Treatment Value: Drought vs. No Drought
  misc_feature: MA Experiment ID: 20001557 Result: Up-regulated in Transcription
  misc_feature: MA Experiment 20001557 PARAMETER Experiment Name: At_Drought_Soil_Dry_P Parameter: Age (day) Value: 27
  misc_feature: MA Experiment 20001557 PARAMETER Experiment Name: At_Drought_Soil_Dry_P Parameter: Organism Value: A. thaliana
  misc_feature: MA Experiment 20001557 PARAMETER Experiment Name: At_Drought_Soil_Dry_P Parameter: Plant Line Value: WS
  misc_feature: MA Experiment 20001557 PARAMETER Experiment Name: At_Drought_Soil_Dry_P Parameter: Post Timepoint (hr) Value: 3
  misc_feature: MA Experiment 20001557 PARAMETER Experiment Name: At_Drought_Soil_Dry_P Parameter: Post-Treatment Value: Re-Water vs. No Drought
  misc_feature: MA Experiment 20001557 PARAMETER Experiment Name: At_Drought_Soil_Dry_P Parameter: Timepoint (day) Value: 13
  misc_feature: MA Experiment 20001557 PARAMETER Experiment Name: At_Drought_Soil_Dry_P Parameter: Treatment Value: Drought vs. No Drought
  misc_feature: MA Experiment ID: 20001558 Result: Up-regulated in Transcription
  misc_feature: MA Experiment 20001558 PARAMETER Experiment Name: At_Drought_Soil_Dry_P Parameter: Age (day) Value: 27
  misc_feature: MA Experiment 20001558 PARAMETER Experiment Name: At_Drought_Soil_Dry_P Parameter: Organism Value: A. thaliana
  misc_feature: MA Experiment 20001558 PARAMETER Experiment Name: At_Drought_Soil_Dry_P Parameter: Plant Line Value: WS
  misc_feature: MA Experiment 20001558 PARAMETER Experiment Name: At_Drought_Soil_Dry_P Parameter: Post Timepoint (hr) Value: 6
  misc_feature: MA Experiment 20001558 PARAMETER Experiment Name: At_Drought_Soil_Dry_P Parameter: Post-Treatment Value: Re-Water vs. No Drought
  misc_feature: MA Experiment 20001558 PARAMETER Experiment Name: At_Drought_Soil_Dry_P Parameter: Timepoint (day) Value: 13
  misc_feature: MA Experiment 20001558 PARAMETER Experiment Name: At_Drought_Soil_Dry_P Parameter: Treatment Value: Drought vs. No Drought
  misc_feature: MA Experiment ID: 20001560 Result: Up-regulated in Transcription
  misc_feature: MA Experiment 20001560 PARAMETER Experiment Name: At_Drought_Soil_Dry_P Parameter: Age (day) Value: 28
  misc_feature: MA Experiment 20001560 PARAMETER Experiment Name: At_Drought_Soil_Dry_P Parameter: Organism Value: A. thaliana
  misc_feature: MA Experiment 20001560 PARAMETER Experiment Name: At_Drought_Soil_Dry_P Parameter: Plant Line Value: WS
  misc_feature: MA Experiment 20001560 PARAMETER Experiment Name: At_Drought_Soil_Dry_P Parameter: Post Timepoint (hr) Value: None
  misc_feature: MA Experiment 20001560 PARAMETER Experiment Name: At_Drought_Soil_Dry_P Parameter: Post-Treatment Value: None
  misc_feature: MA Experiment 20001560 PARAMETER Experiment Name: At_Drought_Soil_Dry_P Parameter: Timepoint (day) Value: 14
  misc_feature: MA Experiment 20001560 PARAMETER Experiment Name: At_Drought_Soil_Dry_P Parameter: Treatment Value: Drought vs. No Drought
gagattgtaacgcctcacaatccttcctacccgtgagtccgtgaccgattgtgtatcatccatcttctttcttcttctttcttcttctttcttcttcttttatatataaaccaaaatataattcgtgaagactttcactttctccttgccactttttgacgattcacatgcaccatccaatattttagtgcccttttcacgacatatctgtgtctgtatccaattttcttatttactacttcttttttctatttatatatacaaaaagaatcaaagagagagacgaattttcgaggtaaggtatctatcgactttctatcttcctccacctttgtttgttgtcaccaccacactacgctaatcattgccacacacatgcataattctctccaaccatctaaaagtcccactttagcattcttctgtttgtaattttatctcagagcttgcttcatgggcttttgagttttctctctgtttccaaaaaacaatggaaccggagaagaatccgaccacagtattgagagccattacaagaccttcgtgggcgtttcttctccttgttttcaccgtcttagcgattctctctctccaaatctcttccaattcttttctccctctctggatcccgacttctcaatatgacgaccctgttacctgctccgggtttttcaatcacgacccgttccctaaccggatcgttatgtcgattaccgatttcggcggtgttggagacggaaagacgtcgaacacggccgctttccgccgcgccgtaaggcaccttgaaggttttgcggcggagggtggggcccagctcaatgtcccggagggcacgtggctttctggaagcttcaacctcaccagcaatttcacgctctttctcgaacgcggcgctctcattttgggatccaaggacctagacgaatggccgataatagagccattgccttcttatggaagagggagagagagacctggtggtagacacatcagcctcattcatggagacaatctcactaatgttgtcattacaggagaaaatgggacaattgatggacaggggaaaatgtggtgggagttatggtggaacagaacattggtgcatacgagaggccatcttattgaactcaagaactctcataatatcctcatctctaacctcactttgctcaattctcctttctggacaatccatcctgtttattgcagtaatgttgttattagaaatatgaccatccttgctccgatgaatgctcctaacaccgacggtatagatccagactcaagcaccaatgtctgcattgaggattgttacatcgaaagtggtgatgatctagtagctgtaaagagcgggtgggatcaatatggaatggctgtggcacgtccgagttcaaacatcgtaatccgaagaatctctggtactactcgcacttgttcaggagttgggataggcagtgagatgtctggtgggattttcaacataaccgttgaagatattcacgtctgggattctgcggctgggctccgcataaaaacagataaagggagaggtgggtacatttcgaatatcacctttaataatgtgttattggagaaagtgaaagttccgattagattcagcagtggctcaaatgatcactcagacgataaatgggatccgaaagctcttccgagagtaaaagggatttacattagcaatgttgtgagtctgaattcgagaaaggcccctatgttgctcggtgttgaaggcacatcgtttcaagacgtatgcttgaggaatgttacgcttcttgggttaccgaagaccgagaaatggaaatgcaaggatgtttctggttacgcgagtgacgtttttcctctgtcatgtccacagttgttgcagaagaaaggttcaatagctcagtgttcatatagatgaggtttgagaaagtttttttttttgggtaaagatagagagaggaggccatgagttcgatcaagtttttttgagtgaagattcatggtcacttacgaaaaatgttaaatcttggatttcctttttcacatttttttgttcgtgttttgaatcttgattctttttatacatacattgtgtaacgaaatatactttgaattattccataaaagattttttcttattc

SEQ ID NO: 48502 - protein, 475 aa, Arabidopsis thaliana
  peptide (1)..(475): Ceres Seq. ID no. 14310347
  misc_feature (104)..(459): Pfam Name: Glycosyl hydrolases family 28 Pfam Description: Glycosyl hydrolases family 28
  misc_feature (104)..(472): Homolog of NCBI NO: 34393209 NR Description: putative polygalacturonase
  misc_feature (73)..(462): Homolog of NCBI NO: 34897760 NR Description: ESTs AU029388(E30287),D49277(S16474) correspond a region of the predicted gene.~Similar to Arabidopsis thaliana
  misc_feature (72)..(467): Homolog of NCBI NO: 34912726 NR Description: putative polygalacturonase
  misc_feature (54)..(462): Homolog of NCBI NO: 15238207 NR Description: polygalacturonase, putative [Arabidopsis
  misc_feature (72)..(472): Homolog of NCBI NO: 40714685 NR Description: putative polygalacturonase
  misc_feature (34)..(468): Homolog of NCBI NO: 15236625 NR Description: polygalacturonase, putative [Arabidopsis
  misc_feature (72)..(462): Homolog of NCBI NO: 11263971 NR Description: hypothetical protein T17J13.70 - Arabidopsis
  misc_feature (72)..(462): Homolog of NCBI NO: 18412253 NR Description: polygalacturonase, putative [Arabidopsis
  misc_feature (1)..(475): Homolog of NCBI NO: 7485656 NR Description: hypothetical protein F17M5.200 - Arabidopsis
  misc_feature (1)..(475): Homolog of NCBI NO: 22329119 NR Description: polygalacturonase, putative [Arabidopsis
MEPEKNPTTVLRAITRPSWAFLLLVFTVLAILSLQISSNSFLPLWIPTSQYDDPVTCSGFFNHDPFPNRIVMSITDFGGVGDGKTSNTAAFRRAVRHLEGFAAEGGAQLNVPEGTWLSGSFNLTSNFTLFLERGALILGSKDLDEWPIIEPLPSYGRGRERPGGRHISLIHGDNLTNVVITGENGTIDGQGKMWWELWWNRTLVHTRGHLIELKNSHNILISNLTLLNSPFWTIHPVYCSNVVIRNMTILAPMNAPNTDGIDPDSSTNVCIEDCYIESGDDLVAVKSGWDQYGMAVARPSSNIVIRRISGTTRTCSGVGIGSEMSGGIFNITVEDIHVWDSAAGLRIKTDKGRGGYISNITFNNVLLEKVKVPIRFSSGSNDHSDDKWDPKALPRVKGIYISNVVSLNSRKAPMLLGVEGTSFQDVCLRNVTLLGLPKTEKWKCKDVSGYASDVFPLSCPQLLQKKGSIAQCSYR

SEQ ID NO: 48503 - protein, 404 aa, Arabidopsis thaliana
  peptide (1)..(404): Ceres Seq. ID no. 14310348
  misc_feature (33)..(388): Pfam Name: Glycosyl hydrolases family 28 Pfam Description: Glycosyl hydrolases family 28
  misc_feature (33)..(401): Homolog of NCBI NO: 34393209 NR Description: putative polygalacturonase
  misc_feature (2)..(391): Homolog of NCBI NO: 34897760 NR Description: ESTs AU029388(E30287),D49277(S16474) correspond a region of the predicted gene.~Similar to Arabidopsis thaliana
  misc_feature (1)..(396): Homolog of NCBI NO: 34912726 NR Description: putative polygalacturonase
  misc_feature (1)..(391): Homolog of NCBI NO: 15238207 NR Description: polygalacturonase, putative [Arabidopsis
  misc_feature (1)..(401): Homolog of NCBI NO: 40714685 NR Description: putative polygalacturonase
  misc_feature (1)..(397): Homolog of NCBI NO: 15236625 NR Description: polygalacturonase, putative [Arabidopsis
  misc_feature (1)..(391): Homolog of NCBI NO: 11263971 NR Description: hypothetical protein T17J13.70 - Arabidopsis
  misc_feature (1)..(391): Homolog of NCBI NO: 18412253 NR Description: polygalacturonase, putative [Arabidopsis
  misc_feature (1)..(404): Homolog of NCBI NO: 7485656 NR Description: hypothetical protein F17M5.200 - Arabidopsis
  misc_feature (1)..(404): Homolog of NCBI NO: 22329119 NR Description: polygalacturonase, putative [Arabidopsis
MSITDFGGVGDGKTSNTAAFRRAVRHLEGFAAEGGAQLNVPEGTWLSGSFNLTSNFTLFLERGALILGSKDLDEWPIIEPLPSYGRGRERPGGRHISLIHGDNLTNVVITGENGTIDGQGKMWWELWWNRTLVHTRGHLIELKNSHNILISNLTLLNSPFWTIHPVYCSNVVIRNMTILAPMNAPNTDGIDPDSSTNVCIEDCYIESGDDLVAVKSGWDQYGMAVARPSSNIVIRRISGTTRTCSGVGIGSEMSGGIFNITVEDIHVWDSAAGLRIKTDKGRGGYISNITFNNVLLEKVKVPIRFSSGSNDHSDDKWDPKALPRVKGIYISNVVSLNSRKAPMLLGVEGTSFQDVCLRNVTLLGLPKTEKWKCKDVSGYASDVFPLSCPQLLQKKGSIAQCSYR

SEQ ID NO: 48504 - protein, 283 aa, Arabidopsis thaliana
  peptide (1)..(283): Ceres Seq. ID no. 14310349
  misc_feature (1)..(267): Pfam Name: Glycosyl hydrolases family 28 Pfam Description: Glycosyl hydrolases family 28
  misc_feature (1)..(280): Homolog of NCBI NO: 34393209 NR Description: putative polygalacturonase
  misc_feature (1)..(270): Homolog of NCBI NO: 34897760 NR Description: ESTs AU029388(E30287),D49277(S16474) correspond a region of the predicted gene.~Similar to Arabidopsis thaliana
  misc_feature (1)..(275): Homolog of NCBI NO: 34912726 NR Description: putative polygalacturonase
  misc_feature (1)..(270): Homolog of NCBI NO: 15238207 NR Description: polygalacturonase, putative [Arabidopsis
  misc_feature (1)..(280): Homolog of NCBI NO: 40714685 NR Description: putative polygalacturonase
  misc_feature (1)..(276): Homolog of NCBI NO: 15236625 NR Description: polygalacturonase, putative [Arabidopsis
  misc_feature (1)..(270): Homolog of NCBI NO: 11263971 NR Description: hypothetical protein T17J13.70 - Arabidopsis
  misc_feature (1)..(270): Homolog of NCBI NO: 18412253 NR Description: polygalacturonase, putative [Arabidopsis
  misc_feature (1)..(283): Homolog of NCBI NO: 7485656 NR Description: hypothetical protein F17M5.200 - Arabidopsis
  misc_feature (1)..(283): Homolog of NCBI NO: 22329119 NR Description: polygalacturonase, putative [Arabidopsis
MWWELWWNRTLVHTRGHLIELKNSHNILISNLTLLNSPFWTIHPVYCSNVVIRNMTILAPMNAPNTDGIDPDSSTNVCIEDCYIESGDDLVAVKSGWDQYGMAVARPSSNIVIRRISGTTRTCSGVGIGSEMSGGIFNITVEDIHVWDSAAGLRIKTDKGRGGYISNITFNNVLLEKVKVPIRFSSGSNDHSDDKWDPKALPRVKGIYISNVVSLNSRKAPMLLGVEGTSFQDVCLRNVTLLGLPKTEKWKCKDVSGYASDVFPLSCPQLLQKKGSIAQCSYR

SEQ ID NO: 48505 - DNA, 1727 bp, Arabidopsis thaliana; identical to SEQ ID NO: 45036
  misc_feature (1)..(1727): Ceres Seq. ID no. 12559281
  misc_feature: MA Experiment ID: 20000166 Result: Up-regulated in Transcription
  misc_feature: MA Experiment 20000166 PARAMETER Experiment Name: At_100uM_ABA_P Parameter: Age (day) Value: 14
  misc_feature: MA Experiment 20000166 PARAMETER Experiment Name: At_100uM_ABA_P Parameter: Organism Value: A. thaliana
  misc_feature: MA Experiment 20000166 PARAMETER Experiment Name: At_100uM_ABA_P Parameter: Plant Line Value: WS
  misc_feature: MA Experiment 20000166 PARAMETER Experiment Name: At_100uM_ABA_P Parameter: Timepoint (hr) Value: 1
  misc_feature: MA Experiment 20000166 PARAMETER Experiment Name: At_100uM_ABA_P Parameter: Tissue Value: Aerial
  misc_feature: MA Experiment 20000166 PARAMETER Experiment Name: At_100uM_ABA_P Parameter: Treatment Value: 100uM ABA vs. No Treatment
  misc_feature: MA Experiment ID: 20000179 Result: Down-regulated in Transcription
  misc_feature: MA Experiment 20000179 PARAMETER Experiment Name: At_Germinating_Seeds_P Parameter: Age (hr) Value: 6 vs. 0
  misc_feature: MA Experiment 20000179 PARAMETER Experiment Name: At_Germinating_Seeds_P Parameter: Tissue Value: Germinating Seeds
  misc_feature: MA Experiment ID: 20000264 Result: Up-regulated in Transcription
  misc_feature: MA Experiment 20000264 PARAMETER Experiment Name: At_Open_Flower_P Parameter: Age (day) Value: 21
  misc_feature: MA Experiment 20000264 PARAMETER Experiment Name: At_Open_Flower_P Parameter: Plant Line Value: WS
  misc_feature: MA Experiment 20000264 PARAMETER Experiment Name: At_Open_Flower_P Parameter: Tissue Value: Open Flower vs. Whole Plant
  misc_feature: MA Experiment ID: 20000265 Result: Up-regulated in Transcription
  misc_feature: MA Experiment 20000265 PARAMETER Experiment Name: At_Open_Flower_P Parameter: Age (day) Value: 21
  misc_feature: MA Experiment 20000265 PARAMETER Experiment Name: At_Open_Flower_P Parameter: Plant Line Value: WS
  misc_feature: MA Experiment 20000265 PARAMETER Experiment Name: At_Open_Flower_P Parameter: Tissue Value: Closed Flower vs. Whole Plant
  misc_feature: MA Experiment ID: 20000286 Result: Up-regulated in Transcription
  misc_feature: MA Experiment 20000286 PARAMETER Experiment Name: At_Open_Flower_P Parameter: Age (day) Value: 21
  misc_feature: MA Experiment 20000286 PARAMETER Experiment Name: At_Open_Flower_P Parameter: Plant Line Value: WS
  misc_feature: MA Experiment 20000286 PARAMETER Experiment Name: At_Open_Flower_P Parameter: Tissue Value: Half Open vs. Whole Plant
  misc_feature: MA Experiment ID: 20000438 Result: Up-regulated in Transcription
  misc_feature: MA Experiment 20000438 PARAMETER Experiment Name: At_Shoots__P Parameter: Age (day) Value: 14
  misc_feature: MA Experiment 20000438 PARAMETER Experiment Name: At_Shoots__P Parameter: Tissue Value: Shoots vs. Whole Plant
  misc_feature: MA Experiment ID: 20001248 Result: Down-regulated in Transcription
  misc_feature: MA Experiment 20001248 PARAMETER Experiment Name: At_Far-red-induction_P Parameter: Age (day) Value: 7
  misc_feature: MA Experiment 20001248 PARAMETER Experiment Name: At_Far-red-induction_P Parameter: Light Value: Far-red vs. White
  misc_feature: MA Experiment 20001248 PARAMETER Experiment Name: At_Far-red-induction_P Parameter: Organism Value: A. thaliana
  misc_feature: MA Experiment 20001248 PARAMETER Experiment Name: At_Far-red-induction_P Parameter: Plant Line Value: Columbia
  misc_feature: MA Experiment 20001248 PARAMETER Experiment Name: At_Far-red-induction_P Parameter: Timepoint (hr) Value: 4
  misc_feature: MA Experiment 20001248 PARAMETER Experiment Name: At_Far-red-induction_P Parameter: Tissue Value: Whole Plant
  misc_feature: MA Experiment ID: 20001558 Result: Up-regulated in Transcription
  misc_feature: MA Experiment 20001558 PARAMETER Experiment Name: At_Drought_Soil_Dry_P Parameter: Age (day) Value: 27
  misc_feature: MA Experiment 20001558 PARAMETER Experiment Name: At_Drought_Soil_Dry_P Parameter: Organism Value: A. thaliana
  misc_feature: MA Experiment 20001558 PARAMETER Experiment Name: At_Drought_Soil_Dry_P Parameter: Plant Line Value: WS
  misc_feature: MA Experiment 20001558 PARAMETER Experiment Name: At_Drought_Soil_Dry_P Parameter: Post Timepoint (hr) Value: 6
  misc_feature: MA Experiment 20001558 PARAMETER Experiment Name: At_Drought_Soil_Dry_P Parameter: Post-Treatment Value: Re-Water vs. No Drought
  misc_feature: MA Experiment 20001558 PARAMETER Experiment Name: At_Drought_Soil_Dry_P Parameter: Timepoint (day) Value: 13
  misc_feature: MA Experiment 20001558 PARAMETER Experiment Name: At_Drought_Soil_Dry_P Parameter: Treatment Value: Drought vs. No Drought

SEQ ID NO: 48506 - protein, 362 aa, Arabidopsis thaliana; identical to SEQ ID NO: 45037
  peptide (1)..(362): Ceres Seq. ID no. 12559282
  misc_feature (3)..(335): Pfam Name: Adenosylmethionine decarboxylase Pfam Description: Adenosylmethionine decarboxylase
  misc_feature (3)..(335): Pfam Name: Adenosylmethionine decarboxylase Pfam Description: Adenosylmethionine decarboxylase
  misc_feature (1)..(362): Homolog of NCBI NO: 15213963 NR Description: S-adenosylmethionine decarboxylase proenzyme
  misc_feature (1)..(362): Homolog of NCBI NO: 3913415 NR Description: S-adenosylmethionine decarboxylase proenzyme 1
  misc_feature (1)..(362): Homolog of NCBI NO: 1490554 NR Description: S-adenosylmethionine decarboxylase [Arabidopsis
  misc_feature (1)..(362): Homolog of NCBI NO: 15213968 NR Description: S-adenosylmethionine decarboxylase proenzyme 3
  misc_feature (1)..(362): Homolog of NCBI NO: 1531763 NR Description: S-adenosylmethionine decarboxylase [Arabidopsis
  misc_feature (1)..(362): Homolog of NCBI NO: 15213963 NR Description: S-adenosylmethionine decarboxylase proenzyme
  misc_feature (1)..(362): Homolog of NCBI NO: 1490554 NR Description: S-adenosylmethionine decarboxylase [Arabidopsis
  misc_feature (1)..(362): Homolog of NCBI NO: 1531763 NR Description: S-adenosylmethionine decarboxylase [Arabidopsis
  misc_feature (1)..(362): Homolog of NCBI NO: 15237226 NR Description: S-adenosylmethionine decarboxylase (adoMetDC2)
  misc_feature (1)..(362): Homolog of NCBI NO: 38261497 NR Description: S-adenosyl-L-methionine decarboxylase [Brassica
  misc_feature (1)..(362): Homolog of NCBI NO: 3913410 NR Description: S-adenosylmethionine decarboxylase proenzyme 2
  misc_feature (1)..(362): Homolog of NCBI NO: 15232910 NR Description: S-adenosylmethionine decarboxylase
  misc_feature (1)..(362): Homolog of NCBI NO: 15809836 NR Description: AT3g02470/F16B3_10 [Arabidopsis thaliana]
  misc_feature (1)..(362): Homolog of NCBI NO: 15213968 NR Description: S-adenosylmethionine decarboxylase proenzyme 3
  misc_feature (1)..(362): Homolog of NCBI NO: 3913415 NR Description: S-adenosylmethionine decarboxylase proenzyme 1
  misc_feature (1)..(362): Homolog of NCBI NO: 15809836 NR Description: AT3g02470/F16B3_10 [Arabidopsis thaliana]
  misc_feature (1)..(362): Homolog of NCBI NO: 15232910 NR Description: S-adenosylmethionine decarboxylase
  misc_feature (1)..(362): Homolog of NCBI NO: 3913410 NR Description: S-adenosylmethionine decarboxylase proenzyme 2
  misc_feature (1)..(362): Homolog of NCBI NO: 38261497 NR Description: S-adenosyl-L-methionine decarboxylase [Brassica
  misc_feature (1)..(362): Homolog of NCBI NO: 15237226 NR Description: S-adenosylmethionine decarboxylase (adoMetDC2)

SEQ ID NO: 48507 - protein, 360 aa, Arabidopsis thaliana; identical to SEQ ID NO: 45038
  peptide (1)..(360): Ceres Seq. ID no. 12559283
  misc_feature (1)..(333): Pfam Name: Adenosylmethionine decarboxylase Pfam Description: Adenosylmethionine decarboxylase
  misc_feature (1)..(333): Pfam Name: Adenosylmethionine decarboxylase Pfam Description: Adenosylmethionine decarboxylase
  misc_feature (1)..(360): Homolog of NCBI NO: 15213963 NR Description: S-adenosylmethionine decarboxylase proenzyme
  misc_feature (1)..(360): Homolog of NCBI NO: 3913415 NR Description: S-adenosylmethionine decarboxylase proenzyme 1
  misc_feature (1)..(360): Homolog of NCBI NO: 1490554 NR Description: S-adenosylmethionine decarboxylase [Arabidopsis
  misc_feature (1)..(360): Homolog of NCBI NO: 15213968 NR Description: S-adenosylmethionine decarboxylase proenzyme 3
  misc_feature (1)..(360): Homolog of NCBI NO: 1531763 NR Description: S-adenosylmethionine decarboxylase [Arabidopsis
  misc_feature (1)..(360): Homolog of NCBI NO: 15213963 NR Description: S-adenosylmethionine decarboxylase proenzyme
  misc_feature (1)..(360): Homolog of NCBI NO: 1490554 NR Description: S-adenosylmethionine decarboxylase [Arabidopsis
  misc_feature (1)..(360): Homolog of NCBI NO: 1531763 NR Description: S-adenosylmethionine decarboxylase [Arabidopsis
  misc_feature (1)..(360): Homolog of NCBI NO: 15237226 NR Description: S-adenosylmethionine decarboxylase (adoMetDC2)
  misc_feature (1)..(360): Homolog of NCBI NO: 38261497 NR Description: S-adenosyl-L-methionine decarboxylase [Brassica
  misc_feature (1)..(360): Homolog of NCBI NO: 3913410 NR Description: S-adenosylmethionine decarboxylase proenzyme 2
  misc_feature (1)..(360): Homolog of NCBI NO: 15232910 NR Description: S-adenosylmethionine decarboxylase
  misc_feature (1)..(360): Homolog of NCBI NO: 15809836 NR Description: AT3g02470/F16B3_10 [Arabidopsis thaliana]
  misc_feature (1)..(360): Homolog of NCBI NO: 15213968 NR Description: S-adenosylmethionine decarboxylase proenzyme 3
  misc_feature (1)..(360): Homolog of NCBI NO: 3913415 NR Description: S-adenosylmethionine decarboxylase proenzyme 1
  misc_feature (1)..(360): Homolog of NCBI NO: 15809836 NR Description: AT3g02470/F16B3_10 [Arabidopsis thaliana]
  misc_feature (1)..(360): Homolog of NCBI NO: 15232910 NR Description: S-adenosylmethionine decarboxylase
  misc_feature (1)..(360): Homolog of NCBI NO: 3913410 NR Description: S-adenosylmethionine decarboxylase proenzyme 2
  misc_feature (1)..(360): Homolog of NCBI NO: 38261497 NR Description: S-adenosyl-L-methionine decarboxylase [Brassica
  misc_feature (1)..(360): Homolog of NCBI NO: 15237226 NR Description: S-adenosylmethionine decarboxylase (adoMetDC2)

SEQ ID NO: 48508 - protein, 211 aa, Arabidopsis thaliana; identical to SEQ ID NO: 45039
  peptide (1)..(211): Ceres Seq. ID no. 12559284
  misc_feature (1)..(184): Pfam Name: Adenosylmethionine decarboxylase Pfam Description: Adenosylmethionine decarboxylase
  misc_feature (1)..(184): Pfam Name: Adenosylmethionine decarboxylase Pfam Description: Adenosylmethionine decarboxylase
  misc_feature (1)..(211): Homolog of NCBI NO: 15213963 NR Description: S-adenosylmethionine decarboxylase proenzyme
  misc_feature (1)..(211): Homolog of NCBI NO: 3913415 NR Description: S-adenosylmethionine decarboxylase proenzyme 1
  misc_feature (1)..(211): Homolog of NCBI NO: 1490554 NR Description: S-adenosylmethionine decarboxylase [Arabidopsis
  misc_feature (1)..(211): Homolog of NCBI NO: 15213968 NR Description: S-adenosylmethionine decarboxylase proenzyme 3
  misc_feature (1)..(211): Homolog of NCBI NO: 1531763 NR Description: S-adenosylmethionine decarboxylase [Arabidopsis
  misc_feature (1)..(211): Homolog of NCBI NO: 15213963 NR Description: S-adenosylmethionine decarboxylase proenzyme
  misc_feature (1)..(211): Homolog of NCBI NO: 1490554 NR Description: S-adenosylmethionine decarboxylase [Arabidopsis
  misc_feature (1)..(211): Homolog of NCBI NO: 1531763 NR Description: S-adenosylmethionine decarboxylase [Arabidopsis
  misc_feature (1)..(211): Homolog of NCBI NO: 15237226 NR Description: S-adenosylmethionine decarboxylase (adoMetDC2)
  misc_feature (1)..(211): Homolog of NCBI NO: 38261497 NR Description: S-adenosyl-L-methionine decarboxylase [Brassica
  misc_feature (1)..(211): Homolog of NCBI NO: 3913410 NR Description: S-adenosylmethionine decarboxylase proenzyme 2
  misc_feature (1)..(211): Homolog of NCBI NO: 15232910 NR Description: S-adenosylmethionine decarboxylase
  misc_feature (1)..(211): Homolog of NCBI NO: 15809836 NR Description: AT3g02470/F16B3_10 [Arabidopsis thaliana]
  misc_feature (1)..(211): Homolog of NCBI NO: 15213968 NR Description: S-adenosylmethionine decarboxylase proenzyme 3
  misc_feature (1)..(211): Homolog of NCBI NO: 3913415 NR Description: S-adenosylmethionine decarboxylase proenzyme 1
  misc_feature (1)..(211): Homolog of NCBI NO: 15809836 NR Description: AT3g02470/F16B3_10 [Arabidopsis thaliana]
  misc_feature (1)..(211): Homolog of NCBI NO: 15232910 NR Description: S-adenosylmethionine decarboxylase
  misc_feature (1)..(211): Homolog of NCBI NO: 3913410 NR Description: S-adenosylmethionine decarboxylase proenzyme 2
  misc_feature (1)..(211): Homolog of NCBI NO: 38261497 NR Description: S-adenosyl-L-methionine decarboxylase [Brassica
  misc_feature (1)..(211): Homolog of NCBI NO: 15237226 NR Description: S-adenosylmethionine decarboxylase (adoMetDC2)

SEQ ID NO: 48509 - DNA, 1627 bp, Arabidopsis thaliana
  misc_feature (1)..(1627): Ceres Seq. ID no. 12575136
  misc_feature: MA Experiment ID: 20000352 Result: Up-regulated in Transcription
  misc_feature: MA Experiment 20000352 PARAMETER Experiment Name: At_Drought_Sub_P Parameter: Age (day) Value: 7
  misc_feature: MA Experiment 20000352 PARAMETER Experiment Name: At_Drought_Sub_P Parameter: Organism Value: A. thaliana
  misc_feature: MA Experiment 20000352 PARAMETER Experiment Name: At_Drought_Sub_P Parameter: Plant Line Value: WS
  misc_feature: MA Experiment 20000352 PARAMETER Experiment Name: At_Drought_Sub_P Parameter: Timepoint (hr) Value: 6
  misc_feature: MA Experiment 20000352 PARAMETER Experiment Name: At_Drought_Sub_P Parameter: Tissue Value: Whole Plant
  misc_feature: MA Experiment 20000352 PARAMETER Experiment Name: At_Drought_Sub_P Parameter: Treatment Value: Drought vs. No Drought
  misc_feature: MA Experiment ID: 20000440 Result: Down-regulated in Transcription
  misc_feature: MA Experiment 20000440 PARAMETER Experiment Name: At_Closed-Flower__Sub_P Parameter: Tissue Value: Closed Flower vs. Whole Plant
aatccaaaaaccacaaaacttgagagttcatcattgagttggaaccggtatggcttccgaaaaatcccacaaagttcatcctcctcttcactttattcttttccctttcatggctcagggccacatgattcccatgattgatatagcaaggctcttggctcagcgcggtgcgacagtaactattgtcacgacacgttataatgcagggaggttcgagaatgtcttaagtcgtgccatggagtctggtttacccatcaacatagtgcatgtgaattttccatatcaagaatttggtttgccagaaggaaaagagaatatagattcgtatgactcaatggagctgatggtacctttctttcaagcagttaacatgctcgaagatccggtcatgaagctcatggaagagatgaaacctagacctagctgtattatttctgatttgctcttgccttatacaagcaaaatcgcaaggaaattcagtataccaaagatagttttccacggcacgggttgctttaatcttttgtgtatgcatgttctacgcagaaacctcgagatcttgaagaacttaaagtcggataaagattatttcctggttcctagttttcctgatagagttgaatttacaaagcctcaagttccagtggaaacaactgcaagtggagattggaaagcgttcttggacgaaatggtagaagcagaatacacatcctatggtgtgatcgtcaacacatttcaggagttggagcctgcttatgtcaaagactacacgaaggctagggctggaaaagtatggtccattggacctgtttccttgtgcaacaaggcaggtgctgataaagctgagaggggaaaccaggccgccattgatcaagatgagtgtcttcaatggcttgattctaaagaagatggttcggtgttatatgtttgccttggaagtatctgtaatctacctttgtctcagctcaaggagctggggctaggccttgaaaaatcccaaagatcttttatttgggtcataagaggttgggaaaagtataatgaactatatgagtggatgatggagagcggttttgaagaaagaatcaaagagagaggacttcttattaaagggtggtcacctcaagtccttatcctttcacatccttccgttggaggattcctgacacactgtggatggaactcgactctcgaaggaatcacctcaggcattccactgatcacttggccgctgtttggagaccaattctgcaaccaaaaactggtcgttcaagtactaaaagccggtgtaagtgccggggttgaagaagtcatgaaatggggagaagaggagaaaataggagtgttagtggataaagaaggagtaaagaaggcagtggaagagttaatgggtgcgagtgatgatgcaaaagagaggagaagaagagtcaaagagcttggagaatcagctcacaaggctgtggaagaaggaggctcttctcattctaacatcacatacttgctacaagacataatgcaacaagtgaaatccaagaactgattacatcatttttagtaacattaccataatttaattcaaattaagtctgttcttctgagatgtattaaaaaaaacttataatgatgc

SEQ ID NO: 48510 - protein, 496 aa, Arabidopsis thaliana
  peptide (1)..(496): Ceres Seq. ID no. 12575137
  misc_feature (14)..(493): Pfam Name: UDP-glucoronosyl and UDP-glucosyl transferase Pfam Description: UDP-glucoronosyl and UDP-glucosyl transferase
  misc_feature (14)..(495): Homolog of NCBI NO: 19911201 NR Description: glucosyltransferase-9 [Vigna angularis]
  misc_feature (26)..(491): Homolog of NCBI NO: 19911211 NR Description: glucosyltransferase-14 [Vigna angularis]
  misc_feature (10)..(495): Homolog of NCBI NO: 15231758 NR Description: glucosyltransferase - like protein; protein id:
  misc_feature (1)..(495): Homolog of NCBI NO: 15228031 NR Description: putative glucosyl transferase; protein id:
  misc_feature (1)..(496): Homolog of NCBI NO: 26450153 NR Description: putative glucosyl transferase [Arabidopsis
  misc_feature (1)..(496): Homolog of NCBI NO: 15228035 NR Description: putative glucosyl transferase; protein id:
  misc_feature (1)..(496): Homolog of NCBI NO: 15228037 NR Description: putative glucosyl transferase
  misc_feature (1)..(496): Homolog of NCBI NO: 15228032 NR Description: putative glucosyl transferase; protein id:
  misc_feature (1)..(496): Homolog of NCBI NO: 15228034 NR Description: putative glucosyl transferase
  misc_feature (1)..(496): Homolog of NCBI NO: 15228033 NR Description: putative glucosyl transferase
MASEKSHKVHPPLHFILFPFMAQGHMIPMIDIARLLAQRGATVTIVTTRYNAGRFENVLSRAMESGLPINIVHVNFPYQEFGLPEGKENIDSYDSMELMVPFFQAVNMLEDPVMKLMEEMKPRPSCIISDLLLPYTSKIARKFSIPKIVFHGTGCFNLLCMHVLRRNLEILKNLKSDKDYFLVPSFPDRVEFTKPQVPVETTASGDWKAFLDEMVEAEYTSYGVIVNTFQELEPAYVKDYTKARAGKVWSIGPVSLCNKAGADKAERGNQAAIDQDECLQWLDSKEDGSVLYVCLGSICNLPLSQLKELGLGLEKSQRSFIWVIRGWEKYNELYEWMMESGFEERIKERGLLIKGWSPQVLILSHPSVGGFLTHCGWNSTLEGITSGIPLITWPLFGDQFCNQKLVVQVLKAGVSAGVEEVMKWGEEEKIGVLVDKEGVKKAVEELMGASDDAKERRRRVKELGESAHKAVEEGGSSHSNITYLLQDIMQQVKSKN

SEQ ID NO: 48511 - protein, 476 aa, Arabidopsis thaliana
  peptide (1)..(476): Ceres Seq. ID no. 12575138
  misc_feature (1)..(473): Pfam Name: UDP-glucoronosyl and UDP-glucosyl transferase Pfam Description: UDP-glucoronosyl and UDP-glucosyl transferase
  misc_feature (1)..(475): Homolog of NCBI NO: 19911201 NR Description: glucosyltransferase-9 [Vigna angularis]
  misc_feature (6)..(471): Homolog of NCBI NO: 19911211 NR Description: glucosyltransferase-14 [Vigna angularis]
  misc_feature (1)..(475): Homolog of NCBI NO: 15231758 NR Description: glucosyltransferase - like protein; protein id:
  misc_feature (1)..(475): Homolog of NCBI NO: 15228031 NR Description: putative glucosyl transferase; protein id:
  misc_feature (1)..(476): Homolog of NCBI NO: 26450153 NR Description: putative glucosyl transferase [Arabidopsis
  misc_feature (1)..(476): Homolog of NCBI NO: 15228035 NR Description: putative glucosyl transferase; protein id:
  misc_feature (1)..(476): Homolog of NCBI NO: 15228037 NR Description: putative glucosyl transferase
  misc_feature (1)..(476): Homolog of NCBI NO: 15228032 NR Description: putative glucosyl transferase; protein id:
  misc_feature (1)..(476): Homolog of NCBI NO: 15228034 NR Description: putative glucosyl transferase
  misc_feature (1)..(476): Homolog of NCBI NO: 15228033 NR Description: putative glucosyl transferase
MAQGHMIPMIDIARLLAQRGATVTIVTTRYNAGRFENVLSRAMESGLPINIVHVNFPYQEFGLPEGKENIDSYDSMELMVPFFQAVNMLEDPVMKLMEEMKPRPSCIISDLLLPYTSKIARKFSIPKIVFHGTGCFNLLCMHVLRRNLEILKNLKSDKDYFLVPSFPDRVEFTKPQVPVETTASGDWKAFLDEMVEAEYTSYGVIVNTFQELEPAYVKDYTKARAGKVWSIGPVSLCNKAGADKAERGNQAAIDQDECLQWLDSKEDGSVLYVCLGSICNLPLSQLKELGLGLEKSQRSFIWVIRGWEKYNELYEWMMESGFEERIKERGLLIKGWSPQVLILSHPSVGGFLTHCGWNSTLEGITSGIPLITWPLFGDQFCNQKLVVQVLKAGVSAGVEEVMKWGEEEKIGVLVDKEGVKKAVEELMGASDDAKERRRRVKELGESAHKAVEEGGSSHSNITYLLQDIMQQVKSKN

SEQ ID NO: 48512 - protein, 471 aa, Arabidopsis thaliana
  peptide (1)..(471): Ceres Seq. ID no. 12575139
  misc_feature (1)..(468): Pfam Name: UDP-glucoronosyl and UDP-glucosyl transferase Pfam Description: UDP-glucoronosyl and UDP-glucosyl transferase
  misc_feature (1)..(470): Homolog of NCBI NO: 19911201 NR Description: glucosyltransferase-9 [Vigna angularis]
  misc_feature (1)..(466): Homolog of NCBI NO: 19911211 NR Description: glucosyltransferase-14 [Vigna angularis]
  misc_feature (1)..(470): Homolog of NCBI NO: 15231758 NR Description: glucosyltransferase - like protein; protein id:
  misc_feature (1)..(470): Homolog of NCBI NO: 15228031 NR Description: putative glucosyl transferase; protein id:
  misc_feature (1)..(471): Homolog of NCBI NO: 26450153 NR Description: putative glucosyl transferase [Arabidopsis
  misc_feature (1)..(471): Homolog of NCBI NO: 15228035 NR Description: putative glucosyl transferase; protein id:
  misc_feature (1)..(471): Homolog of NCBI NO: 15228037 NR Description: putative glucosyl transferase
  misc_feature (1)..(471): Homolog of NCBI NO: 15228032 NR Description: putative glucosyl transferase; protein id:
  misc_feature (1)..(471): Homolog of NCBI NO: 15228034 NR Description: putative glucosyl transferase
  misc_feature (1)..(471): Homolog of NCBI NO: 15228033 NR Description: putative glucosyl transferase
MIPMIDIARLLAQRGATVTIVTTRYNAGRFENVLSRAMESGLPINIVHVNFPYQEFGLPEGKENIDSYDSMELMVPFFQAVNMLEDPVMKLMEEMKPRPSCIISDLLLPYTSKIARKFSIPKIVFHGTGCFNLLCMHVLRRNLEILKNLKSDKDYFLVPSFPDRVEFTKPQVPVETTASGDWKAFLDEMVEAEYTSYGVIVNTFQELEPAYVKDYTKARAGKVWSIGPVSLCNKAGADKAERGNQAAIDQDECLQWLDSKEDGSVLYVCLGSICNLPLSQLKELGLGLEKSQRSFIWVIRGWEKYNELYEWMMESGFEERIKERGLLIKGWSPQVLILSHPSVGGFLTHCGWNSTLEGITSGIPLITWPLFGDQFCNQKLVVQVLKAGVSAGVEEVMKWGEEEKIGVLVDKEGVKKAVEELMGASDDAKERRRRVKELGESAHKAVEEGGSSHSNITYLLQDIMQQVKSKN

SEQ ID NO: 48513 - DNA, 1498 bp, Arabidopsis thaliana
  misc_feature (1)..(1498): Ceres Seq. ID no. 12600965
  misc_feature: MA Experiment ID: 20000184 Result: Down-regulated in Transcription
  misc_feature: MA Experiment 20000184 PARAMETER Experiment Name: At_Shoots__P Parameter: Age (day) Value: 7
  misc_feature: MA Experiment 20000184 PARAMETER Experiment Name: At_Shoots__P Parameter: Tissue Value: Shoots vs. Whole Plant
aagctgtggaacgaatcttcgaagtcgaaactgcgtgtctacggattgaatctctgcagcagcttacgaccactgacccttttgcttttgattcaatcgatagacgacggatacaagttctcgctatcgccgagccggagccggagtctgagctgaagccctgtatctgtaactcttccaacagtggacataccttgagagatgaagatcgttcgcagggattttgttcgtaatggacccggaagcgttaagatggtggcagaggactctgatgatctctggtatgcttataacttgattgctgtgggcgatagtgtaatggctgtcactttcagaaaagttcagagagagatacctggtgggggaagagactctgaacgtgttaaactgaagctggaagtacaagttgaggaggtggactatgacaaagacggatctgttttgcgcatacgtggcaaaaatatcctggagaatgagcacgtaaagattggtgcattccatactttggaacttgagctgaaacgaccttttgtgttgagaaaggaaatgtgggactcaatggctcttgatacactcaaacaggcctcagatcccgctgctagtgctgatctagctgtagttctaatgcaagaaggactggcacaaatcttccttgtgggcagaagtgtgacaagtagccgtgcacgaatagaaacatccattcctaggaagcatggacctgcaattgctggttacgagtctgctttgaagaaattttttgagaatgttctgcaggcctttgtgaaacatgttgacttcagtgtcgttcgctgtgcagtagttgcaagtcccggcttcacaaaggatcagtttcatcgccacttattgttggaagcagaaagaagacaactgagacctattattgagaataaatcacgtataatattggtgcacacaaactctggatatagacatagcctgggtgaggttctccatgcccccaacgtgatgaatatgataaaagatacaaaagcagcaaaagaggtcaaagctctcaatgattttcacaacatgctttcaactgaaccagatcgggcatgctatggaccaaaacacgtggaagttgcaaatgaacgaatggcaattcaaacgcttctcataacggacgagcttttcaggaattctgacgtgaaaacaaggaagaagtatgtgaatttggtggagtcggtaaaagattcgggaggagatgcttttatattttcggcgatgcatgtgtcaggagaacaattggcacagctgactggaatagcagctcttctcaggttccctttaccagaactcgaagacattgagatgtaaaaaaatcttcggcttatagaaaacaatacaacaaatcatacacatctctcataatttatagtttatttgtactcagtgtcataaaaagagatttgtaactcattacaaattataagataaccattcgttgctgttttgttgttaagcaatttttctacat

SEQ ID NO: 48514 - protein, 378 aa, Arabidopsis thaliana
  peptide (1)..(378): Ceres Seq. ID no. 12600966
  misc_feature (136)..(268): Pfam Name: eRF1 domain 2 Pfam Description: eRF1 domain 2
  misc_feature (1)..(377): Homolog of NCBI NO: 34854171 NR Description: similar to Pelo protein [Rattus norvegicus]
  misc_feature (1)..(375): Homolog of NCBI NO: 31222612 NR Description: ENSANGP00000006742 [Anopheles gambiae]
  misc_feature (110)..(378): Homolog of NCBI NO: 19387279 NR Description: putative pelota [Oryza sativa (japonica
  misc_feature (1)..(375): Homolog of NCBI NO: 17136914 NR Description: pelota CG3959-PA [Drosophila melanogaster]
  misc_feature (1)..(375): Homolog of NCBI NO: 1352736 NR Description: PELOTA PROTEIN
  misc_feature (1)..(214): Homolog of NCBI NO: 11762247 NR Description: AT4g27650 [Arabidopsis thaliana]
  misc_feature (1)..(378): Homolog of NCBI NO: 38345200 NR Description: OSJNBa0015K02.10 [Oryza sativa (japonica
  misc_feature (1)..(58): Homolog of NCBI NO: 15231020 NR Description: pelota-like protein; protein id: At3g58390.1
  misc_feature (58)..(378): Homolog of NCBI NO: 15231020 NR Description: pelota-like protein; protein id: At3g58390.1
  misc_feature (1)..(378): Homolog of NCBI NO: 30687676 NR Description: pelota (PEL1) [Arabidopsis thaliana]
MKIVRRDFVRNGPGSVKMVAEDSDDLWYAYNLIAVGDSVMAVTFRKVQREIPGGGRDSERVKLKLEVQVEEVDYDKDGSVLRIRGKNILENEHVKIGAFHTLELELKRPFVLRKEMWDSMALDTLKQASDPAASADLAVVLMQEGLAQIFLVGRSVTSSRARIETSIPRKHGPAIAGYESALKKFFENVLQAFVKHVDFSVVRCAVVASPGFTKDQFHRHLLLEAERRQLRPIIENKSRIILVHTNSGYRHSLGEVLHAPNVMNMIKDTKAAKEVKALNDFHNMLSTEPDRACYGPKHVEVANERMAIQTLLITDELFRNSDVKTRKKYVNLVESVKDSGGDAFIFSAMHVSGEQLAQLTGIAALLRFPLPELEDIEM

SEQ ID NO: 48515 - protein, 361 aa, Arabidopsis thaliana
  peptide (1)..(361): Ceres Seq. ID no. 12600967
  misc_feature (119)..(251): Pfam Name: eRF1 domain 2 Pfam Description: eRF1 domain 2
  misc_feature (1)..(360): Homolog of NCBI NO: 34854171 NR Description: similar to Pelo protein [Rattus norvegicus]
  misc_feature (1)..(358): Homolog of NCBI NO: 31222612 NR Description: ENSANGP00000006742 [Anopheles gambiae]
  misc_feature (93)..(361): Homolog of NCBI NO: 19387279 NR Description: putative pelota [Oryza sativa (japonica
  misc_feature (1)..(358): Homolog of NCBI NO: 17136914 NR Description: pelota CG3959-PA [Drosophila melanogaster]
  misc_feature (1)..(358): Homolog of NCBI NO: 1352736 NR Description: PELOTA PROTEIN
  misc_feature (1)..(197): Homolog of NCBI NO: 11762247 NR Description: AT4g27650 [Arabidopsis thaliana]
  misc_feature (1)..(361): Homolog of NCBI NO: 38345200 NR Description: OSJNBa0015K02.10 [Oryza sativa (japonica
  misc_feature (1)..(41): Homolog of NCBI NO: 15231020 NR Description: pelota-like protein; protein id: At3g58390.1
  misc_feature (41)..(361): Homolog of NCBI NO: 15231020 NR Description: pelota-like protein; protein id: At3g58390.1
  misc_feature (1)..(361): Homolog of NCBI NO: 30687676 NR Description: pelota (PEL1) [Arabidopsis thaliana]
MVAEDSDDLWYAYNLIAVGDSVMAVTFRKVQREIPGGGRDSERVKLKLEVQVEEVDYDKDGSVLRIRGKNILENEHVKIGAFHTLELELKRPFVLRKEMWDSMALDTLKQASDPAASADLAVVLMQEGLAQIFLVGRSVTSSRARIETSIPRKHGPAIAGYESALKKFFENVLQAFVKHVDFSVVRCAVVASPGFTKDQFHRHLLLEAERRQLRPIIENKSRIILVHTNSGYRHSLGEVLHAPNVMNMIKDTKAAKEVKALNDFHNMLSTEPDRACYGPKHVEVANERMAIQTLLITDELFRNSDVKTRKKYVNLVESVKDSGGDAFIFSAMHVSGEQLAQLTGIAALLRFPLPELEDIEM

SEQ ID NO: 48516 - protein, 339 aa, Arabidopsis thaliana
  peptide (1)..(339): Ceres Seq. ID no. 12600968
  misc_feature (97)..(229): Pfam Name: eRF1 domain 2 Pfam Description: eRF1 domain 2
  misc_feature (1)..(338): Homolog of NCBI NO: 34854171 NR Description: similar to Pelo protein [Rattus norvegicus]
  misc_feature (1)..(336): Homolog of NCBI NO: 31222612 NR Description: ENSANGP00000006742 [Anopheles gambiae]
  misc_feature (71)..(339): Homolog of NCBI NO: 19387279 NR Description: putative pelota [Oryza sativa (japonica
  misc_feature (1)..(336): Homolog of NCBI NO: 17136914 NR Description: pelota CG3959-PA [Drosophila melanogaster]
  misc_feature (1)..(336): Homolog of NCBI NO: 1352736 NR Description: PELOTA PROTEIN
  misc_feature (1)..(175): Homolog of NCBI NO: 11762247 NR Description: AT4g27650 [Arabidopsis thaliana]
  misc_feature (1)..(339): Homolog of NCBI NO: 38345200 NR Description: OSJNBa0015K02.10 [Oryza sativa (japonica
  misc_feature (1)..(19): Homolog of NCBI NO: 15231020 NR Description: pelota-like protein; protein id: At3g58390.1
  misc_feature (19)..(339): Homolog of NCBI NO: 15231020 NR Description: pelota-like protein; protein id: At3g58390.1
  misc_feature (1)..(339): Homolog of NCBI NO: 30687676 NR Description: pelota (PEL1) [Arabidopsis thaliana]
MAVTFRKVQREIPGGGRDSERVKLKLEVQVEEVDYDKDGSVLRIRGKNILENEHVKIGAFHTLELELKRPFVLRKEMWDSMALDTLKQASDPAASADLAVVLMQEGLAQIFLVGRSVTSSRARIETSIPRKHGPAIAGYESALKKFFENVLQAFVKHVDFSVVRCAVVASPGFTKDQFHRHLLLEAERRQLRPIIENKSRIILVHTNSGYRHSLGEVLHAPNVMNMIKDTKAAKEVKALNDFHNMLSTEPDRACYGPKHVEVANERMAIQTLLITDELFRNSDVKTRKKYVNLVESVKDSGGDAFIFSAMHVSGEQLAQLTGIAALLRFPLPELEDIEM

SEQ ID NO: 48517 - DNA, 2658 bp, Arabidopsis thaliana
  misc_feature (1)..(2658): Ceres Seq. ID no. 13591878
  misc_feature: MA Experiment ID: 20000441 Result: Up-regulated in Transcription
  misc_feature: MA Experiment 20000441 PARAMETER Experiment Name: At_1uM_BR-BRZ__P Parameter: Tissue Value: Shoot Apices
  misc_feature: MA Experiment 20000441 PARAMETER Experiment Name: At_1uM_BR-BRZ__P Parameter: Treatment Value: 1uM BR vs. No Treatment
gaaaagacgaccccattccccttctctatagatagatctcagaatctctccttttttgttggctttacccttatttggccattcctgtcttccactttgtcatcttttccctttctgatgggatccgccgccgaactcacggagcccaccaccgggaccgagaagcttcaccagccaatagaagttgaagaagatgacgaacaaattgttgatttggagaggaaaacattccgtcatggaaagggacacgatactagtgtggacagtagtacaatcaccaacaccagctcgtcgtcgtcttctagcttttccggtgatggtggaacggaagagacccccgatttccacagcaacggcgatggagaacataccgatttagtaaatttggaggtcccggagctagaaactgaaatcgtatttcaccaagagcatgacgacgggaagaattgcatcgtcttcttcgacggagaacaaggttctgagtcagctggtgccatacctgatgctcatgaggagtctcaaactgctgacttgaatggggagcaaacgcagttagaacctgaaaacggttcaacttctgaggataacgaaagatctcgtgaaattgaagaagtactagatggtgatgtctctaaagacttggatgctgttgatccactcgctggtgaggtgatagaggaggaggtggacttcgaagatgttgaatatcatgatgtggagaatatgatggataagcaagagacacatgatttgtactgtccaaactgcgattcttgcatcaccaaaaaggttatcctcaaaagaaggaaacggaagatccgtcgtcatgagctgggagattcaaagcggcctcatttgactgagcctctttttcattcggaagacaatttgccatctctagatggcggtgaaaactctgcaaatgagtcatttgtcttcaagtgcttgtcatgctttaccatatttattcccaaaggtacactagaccgtaaaagttaccttgatatatcaaaacttatttcagatgccatccctttttgtatccaaagcatgctttctttttctggaaaacaaaatcaggggtgagttcaaagccgattcctccccgtcaaggagttgaggggttaaagattcagccaaaccctcaagtggaagctacaggcgattccaattggttcagttcaatatttggcctcaacaaaaaggaatcagctattcagcaaggtggggcatcatctagtgtcttggaagctaatccgccaccacgtgagtccattgtcccagtagttaatccatcgcgtggtaacctaagtcctatgcgaaaggatacgacaggctcagccgttgttcagcctgatgcagccacttcgattcaagtgcaaaatcaaacgatacaagcgaaattgtaaacaatggagctattgttggagacgggcaaaagtttctggctcctatggtggaggagcaaacacagcaaaagattgacaatgatgattctagtacagcagacgggaatcacacgtcagacaaaggacgtctctccccaattcaaccatctcatggcatgagtatactaaacacagtgactaacggacccgacggattgaaagtagaaactacaattcatgaagaaggtgcccctcttctgtttgaaggaaaagacactcctgacacaagcacggcagattttggtctgaccaaagtaacaggtgtgatggacacaggtgacagaggagttattaccggtccagcaaatcctgaaattgatatttcagcagggaatttgctggaagaagggtctctaagggaaccgttaatgagacgagttgttgttcaaggacgtaaactggaaatcttgaaaagcattgtctacggaggtctactagaagccatcacaagccttggtgttatttcatctgccgctggttctggtgcttcaatgttgaatattctggtcttggggcttgcaaacttgcttggcgggcttattcttattattcataatctccaagaacttagagaggaggaacccataagaacaacaacagaagataaccagactaacggtagagaagaagaagaaggtcggtataagcgactccttggacgaagagaaaatttcacacttcacgcaacagtcgcaatcttatccttcataatcaccggaatactccctcctgtagtctactatttctcattcagtgaaaaacacaacaaagactacaaagttgcttcagttttcggggcatctctattctgcatcgtcttgctcgccatagccaaagctcatgtgaggtacccgagaggcagctacctgaagagcattctgtactacgggtcaattgctgtatcggtgtcggggatttcttatgtggttggtaactttctggaacagttgcttgagaagcatggatggtctgatggatcggaaacacctgtgggacagatgatgctttcatcacttatgggaagaaaagccggctttggatactcatcatcgtactgaaactgaatcttgcctggagaatgatccaaactgaaacttgctgcttttctcttttactctgcttttgtgagctctcgttccaaatctttgttgtcggcaaatctttgttgtgacttgtgagtgtagaagaaagtcgtttccacttgtagaat

SEQ ID NO: 48518 - protein, 361 aa, Arabidopsis thaliana
  peptide (1)..(361): Ceres Seq. ID no. 13591879
  misc_feature (54)..(271): Homolog of NCBI NO: 21592516 NR Description: unknown [Arabidopsis thaliana]
  misc_feature (54)..(271): Homolog of NCBI NO: 30689367 NR Description: expressed protein [Arabidopsis thaliana]
  misc_feature (54)..(271): Homolog of NCBI NO: 30689371 NR Description: expressed protein [Arabidopsis thaliana]
  misc_feature (209)..(326): Homolog of NCBI NO: 24413974 NR Description: contains ESTs
  misc_feature (40)..(240): Homolog of NCBI NO: 7487471 NR Description: hypothetical protein T27E11.110 - Arabidopsis
EKTTPFPFSIDRSQNLSFFVGFTLIWPFLSSTLSSFPFLMGSAAELTEPTTGTEKLHQPIEVEEDDEQIVDLERKTFRHGKGHDTSVDSSTITNTSSSSSSSFSGDGGTEETPDFHSNGDGEHTDLVNLEVPELETEIVFHQEHDDGKNCIVFFDGEQGSESAGAIPDAHEESQTADLNGEQTQLEPENGSTSEDNERSREIEEVLDGDVSKDLDAVDPLAGEVIEEEVDFEDVEYHDVENMMDKQETHDLYCPNCDSCITKKVILKRRKRKIRRHELGDSKRPHLTEPLFHSEDNLPSLDGGENSANESFVFKCLSCFTIFIPKGTLDRKSYLDISKLISDAIPFCIQSMLSFSGKQNQG

SEQ ID NO: 48519 - protein, 350 aa, Arabidopsis thaliana
  peptide (1)..(350): Ceres Seq. ID no. 13591880
  misc_feature (1)..(327): Homolog of NCBI NO: 18417079 NR Description: expressed protein [Arabidopsis thaliana]
  misc_feature (1)..(327): Homolog of NCBI NO: 7487470 NR Description: hypothetical protein T27E11.100 - Arabidopsis
  misc_feature (132)..(318): Homolog of NCBI NO: 21592516 NR Description: unknown [Arabidopsis thaliana]
  misc_feature (132)..(318): Homolog of NCBI NO: 30689367 NR Description: expressed protein [Arabidopsis thaliana]
  misc_feature (132)..(318): Homolog of NCBI NO: 30689371 NR Description: expressed protein [Arabidopsis thaliana]
  misc_feature (68)..(309): Homolog of NCBI NO: 24413974 NR Description: contains ESTs
  misc_feature (1)..(350): Homolog of NCBI NO: 15912253 NR Description: AT4g27870/T27E11_110 [Arabidopsis thaliana]
MVEEQTQQKIDNDDSSTADGNHTSDKGRLSPIQPSHGMSILNTVTNGPDGLKVETTIHEEGAPLLFEGKDTPDTSTADFGLTKVTGVMDTGDRGVITGPANPEIDISAGNLLEEGSLREPLMRRVVVQGRKLEILKSIVYGGLLEAITSLGVISSAAGSGASMLNILVLGLANLLGGLILIIHNLQELREEEPIRTTTEDNQTNGREEEEGRYKRLLGRRENFTLHATVAILSFIITGILPPVVYYFSFSEKHNKDYKVASVFGASLFCIVLLAIAKAHVRYPRGSYLKSILYYGSIAVSVSGISYVVGNFLEQLLEKHGWSDGSETPVGQMMLSSLMGRKAGFGYSSSY

SEQ ID NO: 48520 - protein, 322 aa, Arabidopsis thaliana
  peptide (1)..(322): Ceres Seq. ID no. 13591881
  misc_feature (15)..(232): Homolog of NCBI NO: 21592516 NR Description: unknown [Arabidopsis thaliana]
  misc_feature (15)..(232): Homolog of NCBI NO: 30689367 NR Description: expressed protein [Arabidopsis thaliana]
  misc_feature (15)..(232): Homolog of NCBI NO: 30689371 NR Description: expressed protein [Arabidopsis thaliana]
  misc_feature (170)..(287): Homolog of NCBI NO: 24413974 NR Description: contains ESTs
  misc_feature (1)..(201): Homolog of NCBI NO: 7487471 NR Description: hypothetical protein T27E11.110 - Arabidopsis
MGSAAELTEPTTGTEKLHQPIEVEEDDEQIVDLERKTFRHGKGHDTSVDSSTITNTSSSSSSSFSGDGGTEETPDFHSNGDGEHTDLVNLEVPELETEIVFHQEHDDGKNCIVFFDGEQGSESAGAIPDAHEESQTADLNGEQTQLEPENGSTSEDNERSREIEEVLDGDVSKDLDAVDPLAGEVIEEEVDFEDVEYHDVENMMDKQETHDLYCPNCDSCITKKVILKRRKRKIRRHELGDSKRPHLTEPLFHSEDNLPSLDGGENSANESFVFKCLSCFTIFIPKGTLDRKSYLDISKLISDAIPFCIQSMLSFSGKQNQG

SEQ ID NO: 48521 - DNA, 2410 bp, Arabidopsis thaliana
  misc_feature (1)..(2410): Ceres Seq. ID no. 13591882
  misc_feature: MA Experiment ID: 20000169 Result: Up-regulated in Transcription
  misc_feature: MA Experiment 20000169 PARAMETER Experiment Name: At_100uM_ABA_P Parameter: Age (day) Value: 14
  misc_feature: MA Experiment 20000169 PARAMETER Experiment Name: At_100uM_ABA_P Parameter: Organism Value: A. thaliana
  misc_feature: MA Experiment 20000169 PARAMETER Experiment Name: At_100uM_ABA_P Parameter: Plant Line Value: WS
  misc_feature: MA Experiment 20000169 PARAMETER Experiment Name: At_100uM_ABA_P Parameter: Timepoint (hr) Value: 6
  misc_feature: MA Experiment 20000169 PARAMETER Experiment Name: At_100uM_ABA_P Parameter: Tissue Value: Aerial
  misc_feature: MA Experiment 20000169 PARAMETER Experiment Name: At_100uM_ABA_P Parameter: Treatment Value: 100uM ABA vs. No Treatment
  misc_feature: MA Experiment ID: 20000184 Result: Down-regulated in Transcription
  misc_feature: MA Experiment 20000184 PARAMETER Experiment Name: At_Shoots__P Parameter: Age (day) Value: 7
  misc_feature: MA Experiment 20000184 PARAMETER Experiment Name: At_Shoots__P Parameter: Tissue Value: Shoots vs. Whole Plant
  misc_feature: MA Experiment ID: 20000269 Result: Down-regulated in Transcription
  misc_feature: MA Experiment 20000269 PARAMETER Experiment Name: At_1mM_KNO3_L-vs-H_Roots_P Parameter: Age (day) Value: 7,10,12
  misc_feature: MA Experiment 20000269 PARAMETER Experiment Name: At_1mM_KNO3_L-vs-H_Roots_P Parameter: Organism Value: A. thaliana
  misc_feature: MA Experiment 20000269 PARAMETER Experiment Name: At_1mM_KNO3_L-vs-H_Roots_P Parameter: Plant Line Value: WS
  misc_feature: MA Experiment 20000269 PARAMETER Experiment Name: At_1mM_KNO3_L-vs-H_Roots_P Parameter: Timepoint (day) Value: 7,10,12
  misc_feature: MA Experiment 20000269 PARAMETER Experiment Name: At_1mM_KNO3_L-vs-H_Roots_P Parameter: Tissue Value: Roots
  misc_feature: MA Experiment 20000269 PARAMETER Experiment Name: At_1mM_KNO3_L-vs-H_Roots_P Parameter: Treatment Value: 1mM KNO3 vs. 50mM KNO3
  misc_feature: MA Experiment ID: 20000437 Result: Up-regulated in Transcription
  misc_feature: MA Experiment 20000437 PARAMETER Experiment Name: At_Drought_P Parameter: Age (day) Value: 8
  misc_feature: MA Experiment 20000437 PARAMETER Experiment Name: At_Drought_P Parameter: Organism Value: A. thaliana
  misc_feature: MA Experiment 20000437 PARAMETER Experiment Name: At_Drought_P Parameter: Plant Line Value: WS
  misc_feature: MA Experiment 20000437 PARAMETER Experiment Name: At_Drought_P Parameter: Timepoint (hr) Value: 24
  misc_feature: MA Experiment 20000437 PARAMETER Experiment Name: At_Drought_P Parameter: Tissue Value: Whole Plant
  misc_feature: MA Experiment 20000437 PARAMETER Experiment Name: At_Drought_P Parameter: Treatment Value: Drought vs. No Drought
  misc_feature: MA Experiment ID: 20000451 Result: Down-regulated in Transcription
  misc_feature: MA Experiment 20000451 PARAMETER Experiment Name: At_CS6879_Shoots-Roots_P Parameter: Age (day) Value: 14
  misc_feature: MA Experiment 20000451 PARAMETER Experiment Name: At_CS6879_Shoots-Roots_P Parameter: Organism Value: A. thaliana
  misc_feature: MA Experiment 20000451 PARAMETER Experiment Name: At_CS6879_Shoots-Roots_P Parameter: Plant Line Value: CS6879 vs. WS
  misc_feature: MA Experiment 20000451 PARAMETER Experiment Name: At_CS6879_Shoots-Roots_P Parameter: Tissue Value: Roots
  misc_feature: MA Experiment ID: 20000794 Result: Up-regulated in Transcription
  misc_feature: MA Experiment 20000794 PARAMETER Experiment Name: At_Petals_P Parameter: Age (day) Value: 23-25 days
  misc_feature: MA Experiment 20000794 PARAMETER Experiment Name: At_Petals_P Parameter: Plant Line Value: WS
  misc_feature: MA Experiment 20000794 PARAMETER Experiment Name: At_Petals_P Parameter: Tissue Value: Petals vs. Whole plant
  misc_feature: MA Experiment ID: 20001450 Result: Up-regulated in Transcription
  misc_feature: MA Experiment 20001450 PARAMETER Experiment Name: At_Far-red-induction_P Parameter: Age (day) Value: 7
  misc_feature: MA Experiment 20001450 PARAMETER Experiment Name: At_Far-red-induction_P Parameter: Light Value: Far-red vs. White
  misc_feature: MA Experiment 20001450 PARAMETER Experiment Name: At_Far-red-induction_P Parameter: Organism Value: A. thaliana
  misc_feature: MA Experiment 20001450 PARAMETER Experiment Name: At_Far-red-induction_P Parameter: Plant Line Value: Columbia
  misc_feature: MA Experiment 20001450 PARAMETER Experiment Name: At_Far-red-induction_P Parameter: Timepoint (hr) Value: 8
  misc_feature: MA Experiment 20001450 PARAMETER Experiment Name: At_Far-red-induction_P Parameter: Tissue Value: Whole Plant
  misc_feature: MA Experiment ID: 20001557 Result: Down-regulated in Transcription
  misc_feature: MA Experiment 20001557 PARAMETER Experiment Name: At_Drought_Soil_Dry_P Parameter: Age (day) Value: 27
  misc_feature: MA Experiment 20001557 PARAMETER Experiment Name: At_Drought_Soil_Dry_P Parameter: Organism Value: A. thaliana
  misc_feature: MA Experiment 20001557 PARAMETER Experiment Name: At_Drought_Soil_Dry_P Parameter: Plant Line Value: WS
  misc_feature: MA Experiment 20001557 PARAMETER Experiment Name: At_Drought_Soil_Dry_P Parameter: Post Timepoint (hr) Value: 3
  misc_feature: MA Experiment 20001557 PARAMETER Experiment Name: At_Drought_Soil_Dry_P Parameter: Post-Treatment Value: Re-Water vs. No Drought
  misc_feature: MA Experiment 20001557 PARAMETER Experiment Name: At_Drought_Soil_Dry_P Parameter: Timepoint (day) Value: 13
  misc_feature: MA Experiment 20001557 PARAMETER Experiment Name: At_Drought_Soil_Dry_P Parameter: Treatment Value: Drought vs. No Drought
  misc_feature: MA Experiment ID: 20001560 Result: Down-regulated in Transcription
  misc_feature: MA Experiment 20001560 PARAMETER Experiment Name: At_Drought_Soil_Dry_P Parameter: Age (day) Value: 28
  misc_feature: MA Experiment 20001560 PARAMETER Experiment Name: At_Drought_Soil_Dry_P Parameter: Organism Value: A. thaliana
  misc_feature: MA Experiment 20001560 PARAMETER Experiment Name: At_Drought_Soil_Dry_P Parameter: Plant Line Value: WS
  misc_feature: MA Experiment 20001560 PARAMETER Experiment Name: At_Drought_Soil_Dry_P Parameter: Post Timepoint (hr) Value: None
  misc_feature: MA Experiment 20001560 PARAMETER Experiment Name: At_Drought_Soil_Dry_P Parameter: Post-Treatment Value: None
  misc_feature: MA Experiment 20001560 PARAMETER Experiment Name: At_Drought_Soil_Dry_P Parameter: Timepoint (day) Value: 14
  misc_feature: MA Experiment 20001560 PARAMETER Experiment Name: At_Drought_Soil_Dry_P Parameter: Treatment Value: Drought vs. No Drought
  misc_feature: MA Experiment ID: 20001904 Result: Up-regulated in Transcription
  misc_feature: MA Experiment 20001904 PARAMETER Experiment Name: At_Drought_Reproduction_P Parameter: Age (day) Value: 37
  misc_feature: MA Experiment 20001904 PARAMETER Experiment Name: At_Drought_Reproduction_P Parameter: Organism Value: A. thaliana
  misc_feature: MA Experiment 20001904 PARAMETER Experiment Name: At_Drought_Reproduction_P Parameter: Plant Line Value: WS
  misc_feature: MA Experiment 20001904 PARAMETER Experiment Name: At_Drought_Reproduction_P Parameter: Timepoint (day) Value: 7
  misc_feature: MA Experiment 20001904 PARAMETER Experiment Name: At_Drought_Reproduction_P Parameter: Tissue Value: Rosettes
  misc_feature: MA Experiment 20001904 PARAMETER Experiment Name: At_Drought_Reproduction_P Parameter: Treatment Value: Drought vs. No Drought
  misc_feature: MA Experiment ID: 20001905 Result: Up-regulated in Transcription
  misc_feature: MA Experiment 20001905 PARAMETER Experiment Name: At_Drought_Reproduction_P Parameter: Age (day) Value: 40
  misc_feature: MA Experiment 20001905 PARAMETER Experiment Name: At_Drought_Reproduction_P Parameter: Organism Value: A. thaliana
  misc_feature: MA Experiment 20001905 PARAMETER Experiment Name: At_Drought_Reproduction_P Parameter: Plant Line Value: WS
  misc_feature: MA Experiment 20001905 PARAMETER Experiment Name: At_Drought_Reproduction_P Parameter: Timepoint (day) Value: 10
  misc_feature: MA Experiment 20001905 PARAMETER Experiment Name: At_Drought_Reproduction_P Parameter: Tissue Value: Rosettes
  misc_feature: MA Experiment 20001905 PARAMETER Experiment Name: At_Drought_Reproduction_P Parameter: Treatment Value: Drought vs. No Drought
agtcgtcgcttctaatcaacttccacttcttccacggaaacaagcaattcgatcaaacgngaaagcaatatttaagatttttgtctcatactctaagcaagcaatatccaaataaacattcttatacctccactcctcctctgtctgattccttcacccaattcttgtctcgtttccatcaatccattgtctttgattccagaggttcttggtttatttggatgtggtgattatggatatggagtcttggaagttgctcagaagtgtttgtgtgctttcttttctccttggctcttgttttgtgtatcaaagccttcgtgttgttgatgctcaagaagatccaaaaccagccgtgactttgcaagtagatgcttctaatggaggtggacgacccattcctgaaacgctatttgggattttcttcgaggagatcaaccatgctggtgccggtggattatgggccgaacttgttagcaacagagggtttgaagctggtgggcaaaacacaccctctaatatttggccatggtccattgttggtgatcattcatccatatatgtagctacagaccgttcatcatgttttgaacggaataaaatcgcactgagaatggatgtgctttgtgatagcaaaggttgtccatcgggaggtgtcggagtttataaccctggttactggggcatgaatattgaagaaggaaagaagtacaaggtggctctttatgtgcgttcgactggtgatatcgatttgtctgtgtcgttgacgagctcgaatggatcacggactcttgcttctgaaaagatcatagcttctgcttctgatgtttcgaaatggattaaaaaagaggttcttttggaggcaaaagcgaccgatcctagtgcaagacttcagttaacaacaaccaagaaagggtcaatatggattgaccaagtctcggccatgccagtggatactcacaagggacatggttttagaaacgatcttttccaaatgatggccgatataaaaccccgtttcatccggttcccaggtggttgttttgtcgagggtgaatggttaagtaatgccttccgctggaaagaaaccgtaggaccttgggaagagagaccgggccattttggtgatgtttggaagtattggaccgatgatggccttggccactttgagttctttcaaatggcagaagacatcggtgcagccccgatatgggtgtttaacaacgggataagtcacaatgatgaagttgaaactgccagtatcatgccctttgttcaagaagcactcgacggtatcgagtttgcccgaggagatgccaattctacttggggatctgttcgagctaaaatgggacgccaagaaccttttgaacttaaatacgttgctattggaaatgaagattgtgggaaaacttactacagaggaaactacattgtgttctatgatgctatcaagaaagcctatccagatatcaaaatcatctccaactgcgatggatcctctcatccactcgaccacccagctgattactatgactatcacatttacacttctgctagcaatttgttttccatgtatcatcaatttgatcgcacttcacgcaaaggtccaaaggcttttgtcagtgaatatgctgttactggaaaagatgctggtacaggaagccttcttgcctctcttgcagaagctgcgtttctcattggtcttgaaaagaatagtgacattgttgaaatggcaagttatgctccactctttgtgaacacaaatgatagacggtggaaccctgatgcaatagtcttcaactcctctcatctatatggaacacctagctattgggttcaacggttttttgcagagtcaagcggagcaactcttctcacttcaacactcaagggaaactctacttctcttgttgcatctgctatctcttggaaaaacaatggcaaagattacatacgcataaaggctgtaaacttcggagctaactcagaaaatatgcaagtgttggtaactggattggacccgaacgtgatgagagtttcgggatcaaagaagacagtacttacctctaccaatgtgatggatgaaaattccttctcacagccagagaaggttgtaccacatgaaagcttgctagagttggcagaggaggatatgaccgttgttctcccgccacattccttttcttcattcgatttgttgaaggaatctgcaaagataagaatgccaatctctgattcttcttcccatcagaaaactaccactgtgtgaagagaaacaatgacaaggaagtatcaactttcatgtcaaaagtctctttgtggttcaaatctaattacattccataaatgcttataacgtacccttgtgtatatataataatagtctggtgaataaatttactttctttaa

SEQ ID NO: 48522 - protein, 678 aa, Arabidopsis thaliana
  peptide (1)..(678): Ceres Seq. ID no. 13591883
  misc_feature (77)..(238): Pfam Name: Carbohydrate binding domain Pfam Description: Carbohydrate binding domain
  misc_feature (52)..(552): Homolog of NCBI NO: 29345778 NR Description: alpha-L-arabinofuranosidase A precursor
  misc_feature (43)..(661): Homolog of NCBI NO: 22324432 NR Description: putative arabinoxylan narabinofuranohydrolase
  misc_feature (13)..(655): Homolog of NCBI NO: 38347003 NR Description: OSJNBb0058J09.4 [Oryza sativa (japonica
  misc_feature (127)..(319): Homolog of NCBI NO: 5107819 NR Description: contains similarity to arabinosidase [Arabidopsis
  misc_feature (346)..(678): Homolog of NCBI NO: 5107819 NR Description: contains similarity to arabinosidase [Arabidopsis
  misc_feature (10)..(662): Homolog of NCBI NO: 13398412 NR Description: arabinoxylan arabinofuranohydrolase isoenzyme
  misc_feature (13)..(655): Homolog of NCBI NO: 13398414 NR Description: arabinoxylan arabinofuranohydrolase isoenzyme
  misc_feature (3)..(659): Homolog of NCBI NO: 16417958 NR Description: arabinosidase ARA-1 [Lycopersicon esculentum]
  misc_feature (3)..(671): Homolog of NCBI NO: 33151175 NR Description: alpha-L-arabinofuranosidase [Malus x domestica]
  misc_feature (1)..(678): Homolog of NCBI NO: 22327075 NR Description: glycosyl hydrolase family 51 [Arabidopsis
MDMESWKLLRSVCVLSFLLGSCFVYQSLRVVDAQEDPKPAVTLQVDASNGGGRPIPETLFGIFFEEINHAGAGGLWAELVSNRGFEAGGQNTPSNIWPWSIVGDHSSIYVATDRSSCFERNKIALRMDVLCDSKGCPSGGVGVYNPGYWGMNIEEGKKYKVALYVRSTGDIDLSVSLTSSNGSRTLASEKIIASASDVSKWIKKEVLLEAKATDPSARLQLTTTKKGSIWIDQVSAMPVDTHKGHGFRNDLFQMMADIKPRFIRFPGGCFVEGEWLSNAFRWKETVGPWEERPGHFGDVWKYWTDDGLGHFEFFQMAEDIGAAPIWVFNNGISHNDEVETASIMPFVQEALDGIEFARGDANSTWGSVRAKMGRQEPFELKYVAIGNEDCGKTYYRGNYIVFYDAIKKAYPDIKIISNCDGSSHPLDHPADYYDYHIYTSASNLFSMYHQFDRTSRKGPKAFVSEYAVTGKDAGTGSLLASLAEAAFLIGLEKNSDIVEMASYAPLFVNTNDRRWNPDAIVFNSSHLYGTPSYWVQRFFAESSGATLLTSTLKGNSTSLVASAISWKNNGKDYIRIKAVNFGANSENMQVLVTGLDPNVMRVSGSKKTVLTSTNVMDENSFSQPEKVVPHESLLELAEEDMTVVLPPHSFSSFDLLKESAKIRMPISDSSSHQKTTTV

SEQ ID NO: 48523 - protein, 676 aa, Arabidopsis thaliana
  peptide (1)..(676): Ceres Seq. ID no. 13591884
  misc_feature (75)..(236): Pfam Name: Carbohydrate binding domain Pfam Description: Carbohydrate binding domain
  misc_feature (50)..(550): Homolog of NCBI NO: 29345778 NR Description: alpha-L-arabinofuranosidase A precursor
  misc_feature (41)..(659): Homolog of NCBI NO: 22324432 NR Description: putative arabinoxylan narabinofuranohydrolase
  misc_feature (11)..(653): Homolog of NCBI NO: 38347003 NR Description: OSJNBb0058J09.4 [Oryza sativa (japonica
  misc_feature (125)..(317): Homolog of NCBI NO: 5107819 NR Description: contains similarity to arabinosidase [Arabidopsis
  misc_feature (344)..(676): Homolog of NCBI NO: 5107819 NR Description: contains similarity to arabinosidase [Arabidopsis
  misc_feature (8)..(660): Homolog of NCBI NO: 13398412 NR Description: arabinoxylan arabinofuranohydrolase isoenzyme
  misc_feature (11)..(653): Homolog of NCBI NO: 13398414 NR Description: arabinoxylan arabinofuranohydrolase isoenzyme
  misc_feature (1)..(657): Homolog of NCBI NO: 16417958 NR Description: arabinosidase ARA-1 [Lycopersicon esculentum]
  misc_feature (1)..(669): Homolog of NCBI NO: 33151175 NR Description: alpha-L-arabinofuranosidase [Malus x domestica]
  misc_feature (1)..(676): Homolog of NCBI NO: 22327075 NR Description: glycosyl hydrolase family 51 [Arabidopsis
MESWKLLRSVCVLSFLLGSCFVYQSLRVVDAQEDPKPAVTLQVDASNGGGRPIPETLFGIFFEEINHAGAGGLWAELVSNRGFEAGGQNTPSNIWPWSIVGDHSSIYVATDRSSCFERNKIALRMDVLCDSKGCPSGGVGVYNPGYWGMNIEEGKKYKVALYVRSTGDIDLSVSLTSSNGSRTLASEKIIASASDVSKWIKKEVLLEAKATDPSARLQLTTTKKGSIWIDQVSAMPVDTHKGHGFRNDLFQMMADIKPRFIRFPGGCFVEGEWLSNAFRWKETVGPWEERPGHFGDVWKYWTDDGLGHFEFFQMAEDIGAAPIWVFNNGISHNDEVETASIMPFVQEALDGIEFARGDANSTWGSVRAKMGRQEPFELKYVAIGNEDCGKTYYRGNYIVFYDAIKKAYPDIKIISNCDGSSHPLDHPADYYDYHIYTSASNLFSMYHQFDRTSRKGPKAFVSEYAVTGKDAGTGSLLASLAEAAFLIGLEKNSDIVEMASYAPLFVNTNDRRWNPDAIVFNSSHLYGTPSYWVQRFFAESSGATLLTSTLKGNSTSLVASAISWKNNGKDYIRIKAVNFGANSENMQVLVTGLDPNVMRVSGSKKTVLTSTNVMDENSFSQPEKVVPHESLLELAEEDMTVVLPPHSFSSFDLLKESAKIRMPISDSSSHQKTTTV

SEQ ID NO: 48524 - protein, 552 aa, Arabidopsis thaliana
  peptide (1)..(552): Ceres Seq. ID no. 13591885
  misc_feature (1)..(112): Pfam Name: Carbohydrate binding domain Pfam Description: Carbohydrate binding domain
  misc_feature (1)..(426): Homolog of NCBI NO: 29345778 NR Description: alpha-L-arabinofuranosidase A precursor
  misc_feature (1)..(535): Homolog of NCBI NO: 22324432 NR Description: putative arabinoxylan narabinofuranohydrolase
  misc_feature (1)..(529): Homolog of NCBI NO: 38347003 NR Description: OSJNBb0058J09.4 [Oryza sativa (japonica
  misc_feature (1)..(193): Homolog of NCBI NO: 5107819 NR Description: contains similarity to arabinosidase [Arabidopsis
  misc_feature (220)..(552): Homolog of NCBI NO: 5107819 NR Description: contains similarity to arabinosidase [Arabidopsis
  misc_feature (1)..(536): Homolog of NCBI NO: 13398412 NR Description: arabinoxylan arabinofuranohydrolase isoenzyme
  misc_feature (1)..(529): Homolog of NCBI NO: 13398414 NR Description: arabinoxylan arabinofuranohydrolase isoenzyme
  misc_feature (1)..(533): Homolog of NCBI NO: 16417958 NR Description: arabinosidase ARA-1 [Lycopersicon esculentum]
  misc_feature (1)..(545): Homolog of NCBI NO: 33151175 NR Description: alpha-L-arabinofuranosidase [Malus x domestica]
  misc_feature (1)..(552): Homolog of NCBI NO: 22327075 NR Description: glycosyl hydrolase family 51 [Arabidopsis
MDVLCDSKGCPSGGVGVYNPGYWGMNIEEGKKYKVALYVRSTGDIDLSVSLTSSNGSRTLASEKIIASASDVSKWIKKEVLLEAKATDPSARLQLTTTKKGSIWIDQVSAMPVDTHKGHGFRNDLFQMMADIKPRFIRFPGGCFVEGEWLSNAFRWKETVGPWEERPGHFGDVWKYWTDDGLGHFEFFQMAEDIGAAPIWVFNNGISHNDEVETASIMPFVQEALDGIEFARGDANSTWGSVRAKMGRQEPFELKYVAIGNEDCGKTYYRGNYIVFYDAIKKAYPDIKIISNCDGSSHPLDHPADYYDYHIYTSASNLFSMYHQFDRTSRKGPKAFVSEYAVTGKDAGTGSLLASLAEAAFLIGLEKNSDIVEMASYAPLFVNTNDRRWNPDAIVFNSSHLYGTPSYWVQRFFAESSGATLLTSTLKGNSTSLVASAISWKNNGKDYIRIKAVNFGANSENMQVLVTGLDPNVMRVSGSKKTVLTSTNVMDENSFSQPEKVVPHESLLELAEEDMTVVLPPHSFSSFDLLKESAKIRMPISDSSSHQKTTTV

SEQ ID NO: 48525 - DNA, 2928 bp, Arabidopsis thaliana
  misc_feature (1)..(2928): Ceres Seq. ID no. 12575576
  misc_feature: MA Experiment ID: 20000173 Result: Down-regulated in Transcription
  misc_feature: MA Experiment 20000173 PARAMETER Experiment Name: At_42deg_Heat_P Parameter: Age (day) Value: 14
  misc_feature: MA Experiment 20000173 PARAMETER Experiment Name: At_42deg_Heat_P Parameter: Organism Value: A. thaliana
  misc_feature: MA Experiment 20000173 PARAMETER Experiment Name: At_42deg_Heat_P Parameter: Plant Line Value: WS
  misc_feature: MA Experiment 20000173 PARAMETER Experiment Name: At_42deg_Heat_P Parameter: Temperature (deg C) Value: 42 vs. 22
  misc_feature: MA Experiment 20000173 PARAMETER Experiment Name: At_42deg_Heat_P Parameter: Timepoint (hr) Value: 6
  misc_feature: MA Experiment 20000173 PARAMETER Experiment Name: At_42deg_Heat_P Parameter: Tissue Value: Aerial
  misc_feature: MA Experiment ID: 20000180 Result: Up-regulated in Transcription
  misc_feature: MA Experiment 20000180 PARAMETER Experiment Name: At_Germinating_Seeds_P Parameter: Age (hr) Value: 24 vs. 0
  misc_feature: MA Experiment 20000180 PARAMETER Experiment Name: At_Germinating_Seeds_P Parameter: Tissue Value: Germinating Seeds
  misc_feature: MA Experiment ID: 20001247 Result: Up-regulated in Transcription
  misc_feature: MA Experiment 20001247 PARAMETER Experiment Name: At_Far-red-induction_P Parameter: Age (day) Value: 7
  misc_feature: MA Experiment 20001247 PARAMETER Experiment Name: At_Far-red-induction_P Parameter: Light Value: Far-red vs. White
  misc_feature: MA Experiment 20001247 PARAMETER Experiment Name: At_Far-red-induction_P Parameter: Organism Value: A. thaliana
  misc_feature: MA Experiment 20001247 PARAMETER Experiment Name: At_Far-red-induction_P Parameter: Plant Line Value: Columbia
  misc_feature: MA Experiment 20001247 PARAMETER Experiment Name: At_Far-red-induction_P Parameter: Timepoint (hr) Value: 1
  misc_feature: MA Experiment 20001247 PARAMETER Experiment Name: At_Far-red-induction_P Parameter: Tissue Value: Whole Plant
  misc_feature: MA Experiment ID: 20001906 Result: Down-regulated in Transcription
  misc_feature: MA Experiment 20001906 PARAMETER Experiment Name: At_Drought_Reproduction_P Parameter: Age (day) Value: 35
  misc_feature: MA Experiment 20001906 PARAMETER Experiment Name: At_Drought_Reproduction_P Parameter: Organism Value: A. thaliana
  misc_feature: MA Experiment 20001906 PARAMETER Experiment Name: At_Drought_Reproduction_P Parameter: Plant Line Value: WS
  misc_feature: MA Experiment 20001906 PARAMETER Experiment Name: At_Drought_Reproduction_P Parameter: Timepoint (day) Value: 5
  misc_feature: MA Experiment 20001906 PARAMETER Experiment Name: At_Drought_Reproduction_P Parameter: Tissue Value: Siliques
  misc_feature: MA Experiment 20001906 PARAMETER Experiment Name: At_Drought_Reproduction_P Parameter: Treatment Value: Drought vs. No Drought
actgccaaactccaaacaaaagtaaaaatgttcgtagcatctccggtaaagacgaacttcaacggcgtcagcctagttaaatctccggcgttttccgctctttcatgtcgtaaacaacaccgagttcctatatccagacaggttcgagctgtgatcagccgtgaagaaaaagcggtggatcaagaagacggcaaaaaaagtacaaacaaaccactaataaactcttctcaatttccatggcaaagatctaagtatacgggatcgaagactgttactgcggttgtgaaaatcaggaagaagatcaaagagaagctaacagagagatttgagcatcaattagagcttttcatgaaagctattggtcaagggatgttgattcagcttgtcagtgaagaaatcgatcctgaaactggtaaaggcagaaagagtttagaatctcctgtgatgggactcccaaaggctgtgaaagatccgagatacctcgtattcacagccgatttcactgtcccgattaactttggtaaacctggtgccattcttgtcaccaatcttctttccactgagatttgcttgtcagaaattatcatcgaagattccactgacaccattctcttccctgcaaacacttggattcactctaagaatgataatcctcaagccaggattatctttagaagtcaaccatgcctaccttccgagactccggatgggattaaagaactacgggaaaaggacttggtcagtgtccgtggtgacggaaaaggcgagagaaaacctcatgagagaatttatgactacgatgtttacaacgatttgggagatccacgtaaaacagaacgagttaggccagttctaggtgttccagagacgccttacccaagacgctgcaggaccggccggcctctcgtttcaaaagatccaccgtgtgagagcagaggaaaggagaaggaagaattttatgttccaagagatgaagttttcgaggaaatcaagagagataccttcagagcagggagatttaaggctctcttccacaatcttgtaccatctattgcagcagcattgtcaaacttagacattcccttcacatgcttctcggatatcgataatttatataaaagcaacattgtcttgggacatactgagccaaaagacactggccttggcggctttatcggcggtttcatgaatgggatcctcaacgttactgaaacactgctaaaatatgacactccagccgttataaaatgggacagatttgcgtggctgcgagataatgaattcggacgtcaagctcttgctggtgtcaaccctgtgaacattgagctactaaaggagctgccaattcgaagcaatcttgacccggctctatatggacctcaagaatctgttctcacagaagaaatcatagctcgagaagttgaacattatggaactactatagaaaaggcgcttgaggagaagagattgtttcttgtggattaccatgacatactcttgccatttgtagagaagataaactctatcaaagaagatccaaggaagacatatgcttcaagaacaatcttcttctattcaaagaatggagccctgcggccattggccatagagctctcgctgcctcctacagccgaatccgagaacaagtttgtttatactcatggacatgacgctactactcactggatttggaaactagccaaagctcatgtctgctcaaatgatgctggtgttcaccaacttgtgaaccactggctaaggactcatgcttccatggagccttacatcattgctactaacagacagttgagtacaatgcatccggtttacaagctacttcatcctcatatgcgctacacgcttgaaatcaatgctcgtgcgcgtaaaagcttaatcaacggaggaggaatcatcgaaagttgcttcactcccggaaaatacgcaatggaacttagctctgcagcgtacaagagcatgtggcgatttgacatggaaggacttcctgctgatcttgttcggaggggaatggcagaagaggattcatcagccgaatgtggcgtgaggcttgtgattgacgattatccatatgcagcagacggtcttttgatctggaaagccatcaaggacctagtggaatcttatgttaaacacttttactctgattccaagtccataacatctgaccttgagctgcaagcttggtgggatgagatcaagaacaaaggtcattacgacaagaaagacgagccttggtggcctaaactcaacacaacacaagacttgtcccaaatactaaccaacatgatatggatcgcctcgggtcaacacgcagccataaacttcggacagtacccgtttggagggtatgtcccaaaccgacctaccctgttgaggaaacttataccgcaagaaactgatccggactacgaaatgttcatgcgaaaccctcaatacagctttctaggctctctaccgacacagctccaagcaaccaaagtgatggcggtccaagaaacgctctcaacgcattcccctgacgaagagtacttgatcgagctgagagaagtgcaaagacattggttccaagatgaacaagtggttaagtattttaacaagttctcggaagaacttgtgaagatagagaagacgatcaacgagagaaacaaggacaagaaactaaagaacagaacaggtgctgggatgcctccttatgaactacttctccctacttcaccacatggagtcactggccgtggtattcccaacagcatttccatttagatgtatgcacaacagatttgtatcattattatgtcttatatgctggtagagtctctaatatgaggttacttcttttttttttccaatgtatcaatgataatattatgcacaagaaggtttaataatctctcactgaggttgacggcc

SEQ ID NO: 48526 - protein, 926 aa, Arabidopsis thaliana
  peptide (1)..(926): Ceres Seq. ID no. 12575577
  misc_feature (162)..(223): Pfam Name: PLAT/LH2 domain Pfam Description: PLAT/LH2 domain
  misc_feature (100)..(916): Homolog of NCBI NO: 28911945 NR Description: lipoxygenase [Nicotiana attenuata]
  misc_feature (24)..(926): Homolog of NCBI NO: 18394479 NR Description: lipoxygenase
  misc_feature (24)..(926): Homolog of NCBI NO: 9665131 NR Description: lipoxygenase [Arabidopsis thaliana]
  misc_feature (24)..(926): Homolog of NCBI NO: 6002055 NR Description: lipoxygenase [Arabidopsis thaliana]
  misc_feature (91)..(926): Homolog of NCBI NO: 7433165 NR Description: lipoxygenase (EC 1.13.11.12) loxD - tomato
  misc_feature (20)..(926): Homolog of NCBI NO: 15218506 NR Description: putative lipoxygenase
  misc_feature (91)..(926): Homolog of NCBI NO: 7433167 NR Description: probable lipoxygenase (EC 1.13.11.12) (clone H3)
  misc_feature (22)..(926): Homolog of NCBI NO: 32454714 NR Description: lipoxygenase [Nicotiana attenuata]
  misc_feature (24)..(925): Homolog of NCBI NO: 14589309 NR Description: lipoxygenase [Sesbania rostrata]
  misc_feature (110)..(926): Homolog of NCBI NO: 10505183 NR Description: lipoxygenase [Zantedeschia aethiopica]
TAKLQTKVKMFVASPVKTNFNGVSLVKSPAFSALSCRKQHRVPISRQVRAVISREEKAVDQEDGKKSTNKPLINSSQFPWQRSKYTGSKTVTAVVKIRKKIKEKLTERFEHQLELFMKAIGQGMLIQLVSEEIDPETGKGRKSLESPVMGLPKAVKDPRYLVFTADFTVPINFGKPGAILVTNLLSTEICLSEIIIEDSTDTILFPANTWIHSKNDNPQARIIFRSQPCLPSETPDGIKELREKDLVSVRGDGKGERKPHERIYDYDVYNDLGDPRKTERVRPVLGVPETPYPRRCRTGRPLVSKDPPCESRGKEKEEFYVPRDEVFEEIKRDTFRAGRFKALFHNLVPSIAAALSNLDIPFTCFSDIDNLYKSNIVLGHTEPKDTGLGGFIGGFMNGILNVTETLLKYDTPAVIKWDRFAWLRDNEFGRQALAGVNPVNIELLKELPIRSNLDPALYGPQESVLTEEIIAREVEHYGTTIEKALEEKRLFLVDYHDILLPFVEKINSIKEDPRKTYASRTIFFYSKNGALRPLAIELSLPPTAESENKFVYTHGHDATTHWIWKLAKAHVCSNDAGVHQLVNHWLRTHASMEPYIIATNRQLSTMHPVYKLLHPHMRYTLEINARARKSLINGGGIIESCFTPGKYAMELSSAAYKSMWRFDMEGLPADLVRRGMAEEDSSAECGVRLVIDDYPYAADGLLIWKAIKDLVESYVKHFYSDSKSITSDLELQAWWDEIKNKGHYDKKDEPWWPKLNTTQDLSQILTNMIWIASGQHAAINFGQYPFGGYVPNRPTLLRKLIPQETDPDYEMFMRNPQYSFLGSLPTQLQATKVMAVQETLSTHSPDEEYLIELREVQRHWFQDEQVVKYFNKFSEELVKIEKTINERNKDKKLKNRTGAGMPPYELLLPTSPHGVTGRGIPNSISI

SEQ ID NO: 48527 - protein, 917 aa, Arabidopsis thaliana
  peptide (1)..(917): Ceres Seq. ID no. 12575578
  misc_feature (153)..(214): Pfam Name: PLAT/LH2 domain Pfam Description: PLAT/LH2 domain
  misc_feature (91)..(907): Homolog of NCBI NO: 28911945 NR Description: lipoxygenase [Nicotiana attenuata]
  misc_feature (15)..(917): Homolog of NCBI NO: 18394479 NR Description: lipoxygenase
  misc_feature (15)..(917): Homolog of NCBI NO: 9665131 NR Description: lipoxygenase [Arabidopsis thaliana]
  misc_feature (15)..(917): Homolog of NCBI NO: 6002055 NR Description: lipoxygenase [Arabidopsis thaliana]
  misc_feature (82)..(917): Homolog of NCBI NO: 7433165 NR Description: lipoxygenase (EC 1.13.11.12) loxD - tomato
  misc_feature (11)..(917): Homolog of NCBI NO: 15218506 NR Description: putative lipoxygenase
  misc_feature (82)..(917): Homolog of NCBI NO: 7433167 NR Description: probable lipoxygenase (EC 1.13.11.12) (clone H3)
  misc_feature (13)..(917): Homolog of NCBI NO: 32454714 NR Description: lipoxygenase [Nicotiana attenuata]
  misc_feature (15)..(916): Homolog of NCBI NO: 14589309 NR Description: lipoxygenase [Sesbania rostrata]
  misc_feature (101)..(917): Homolog of NCBI NO: 10505183 NR Description: lipoxygenase [Zantedeschia aethiopica]
MFVASPVKTNFNGVSLVKSPAFSALSCRKQHRVPISRQVRAVISREEKAVDQEDGKKSTNKPLINSSQFPWQRSKYTGSKTVTAVVKIRKKIKEKLTERFEHQLELFMKAIGQGMLIQLVSEEIDPETGKGRKSLESPVMGLPKAVKDPRYLVFTADFTVPINFGKPGAILVTNLLSTEICLSEIIIEDSTDTILFPANTWIHSKNDNPQARIIFRSQPCLPSETPDGIKELREKDLVSVRGDGKGERKPHERIYDYDVYNDLGDPRKTERVRPVLGVPETPYPRRCRTGRPLVSKDPPCESRGKEKEEFYVPRDEVFEEIKRDTFRAGRFKALFHNLVPSIAAALSNLDIPFTCFSDIDNLYKSNIVLGHTEPKDTGLGGFIGGFMNGILNVTETLLKYDTPAVIKWDRFAWLRDNEFGRQALAGVNPVNIELLKELPIRSNLDPALYGPQESVLTEEIIAREVEHYGTTIEKALEEKRLFLVDYHDILLPFVEKINSIKEDPRKTYASRTIFFYSKNGALRPLAIELSLPPTAESENKFVYTHGHDATTHWIWKLAKAHVCSNDAGVHQLVNHWLRTHASMEPYIIATNRQLSTMHPVYKLLHPHMRYTLEINARARKSLINGGGIIESCFTPGKYAMELSSAAYKSMWRFDMEGLPADLVRRGMAEEDSSAECGVRLVIDDYPYAADGLLIWKAIKDLVESYVKHFYSDSKSITSDLELQAWWDEIKNKGHYDKKDEPWWPKLNTTQDLSQILTNMIWIASGQHAAINFGQYPFGGYVPNRPTLLRKLIPQETDPDYEMFMRNPQYSFLGSLPTQLQATKVMAVQETLSTHSPDEEYLIELREVQRHWFQDEQVVKYFNKFSEELVKIEKTINERNKDKKLKNRTGAGMPPYELLLPTSPHGVTGRGIPNSISI

SEQ ID NO: 48528 - protein, 810 aa, Arabidopsis thaliana
  peptide (1)..(810): Ceres Seq. ID no. 12575579
  misc_feature (46)..(107): Pfam Name: PLAT/LH2 domain Pfam Description: PLAT/LH2 domain
  misc_feature (1)..(800): Homolog of NCBI NO: 28911945 NR Description: lipoxygenase [Nicotiana attenuata]
  misc_feature (1)..(810): Homolog of NCBI NO: 9665131 NR Description: lipoxygenase [Arabidopsis thaliana]
  misc_feature (1)..(810): Homolog of NCBI NO: 18394479 NR Description: lipoxygenase
  misc_feature (1)..(810): Homolog of NCBI NO: 6002055 NR Description: lipoxygenase [Arabidopsis thaliana]
  misc_feature (1)..(810): Homolog of NCBI NO: 7433165 NR Description: lipoxygenase (EC 1.13.11.12) loxD - tomato
  misc_feature (1)..(810): Homolog of NCBI NO: 15218506 NR Description: putative lipoxygenase
  misc_feature (1)..(810): Homolog of NCBI NO: 7433167 NR Description: probable lipoxygenase (EC 1.13.11.12) (clone H3)
  misc_feature (1)..(810): Homolog of NCBI NO: 32454714 NR Description: lipoxygenase [Nicotiana attenuata]
  misc_feature (1)..(809): Homolog of NCBI NO: 14589309 NR Description: lipoxygenase [Sesbania rostrata]
  misc_feature (1)..(810): Homolog of NCBI NO: 10505183 NR Description: lipoxygenase [Zantedeschia aethiopica]
MKAIGQGMLIQLVSEEIDPETGKGRKSLESPVMGLPKAVKDPRYLVFTADFTVPINFGKPGAILVTNLLSTEICLSEIIIEDSTDTILFPANTWIHSKNDNPQARIIFRSQPCLPSETPDGIKELREKDLVSVRGDGKGERKPHERIYDYDVYNDLGDPRKTERVRPVLGVPETPYPRRCRTGRPLVSKDPPCESRGKEKEEFYVPRDEVFEEIKRDTFRAGRFKALFHNLVPSIAAALSNLDIPFTCFSDIDNLYKSNIVLGHTEPKDTGLGGFIGGFMNGILNVTETLLKYDTPAVIKWDRFAWLRDNEFGRQALAGVNPVNIELLKELPIRSNLDPALYGPQESVLTEEIIAREVEHYGTTIEKALEEKRLFLVDYHDILLPFVEKINSIKEDPRKTYASRTIFFYSKNGALRPLAIELSLPPTAESENKFVYTHGHDATTHWIWKLAKAHVCSNDAGVHQLVNHWLRTHASMEPYIIATNRQLSTMHPVYKLLHPHMRYTLEINARARKSLINGGGIIESCFTPGKYAMELSSAAYKSMWRFDMEGLPADLVRRGMAEEDSSAECGVRLVIDDYPYAADGLLIWKAIKDLVESYVKHFYSDSKSITSDLELQAWWDEIKNKGHYDKKDEPWWPKLNTTQDLSQILTNMIWIASGQHAAINFGQYPFGGYVPNRPTLLRKLIPQETDPDYEMFMRNPQYSFLGSLPTQLQATKVMAVQETLSTHSPDEEYLIELREVQRHWFQDEQVVKYFNKFSEELVKIEKTINERNKDKKLKNRTGAGMPPYELLLPTSPHGVTGRGIPNSISI

SEQ ID NO: 48529 - DNA, 2220 bp, Arabidopsis thaliana
  misc_feature (1)..(2220): Ceres Seq. ID no. 12575211
  misc_feature: MA Experiment ID: 20000173 Result: Down-regulated in Transcription
  misc_feature: MA Experiment 20000173 PARAMETER Experiment Name: At_42deg_Heat_P Parameter: Age (day) Value: 14
  misc_feature: MA Experiment 20000173 PARAMETER Experiment Name: At_42deg_Heat_P Parameter: Organism Value: A. thaliana
  misc_feature: MA Experiment 20000173 PARAMETER Experiment Name: At_42deg_Heat_P Parameter: Plant Line Value: WS
  misc_feature: MA Experiment 20000173 PARAMETER Experiment Name: At_42deg_Heat_P Parameter: Temperature (deg C) Value: 42 vs. 22
  misc_feature: MA Experiment 20000173 PARAMETER Experiment Name: At_42deg_Heat_P Parameter: Timepoint (hr) Value: 6
  misc_feature: MA Experiment 20000173 PARAMETER Experiment Name: At_42deg_Heat_P Parameter: Tissue Value: Aerial
  misc_feature: MA Experiment ID: 20000185 Result: Up-regulated in Transcription
  misc_feature: MA Experiment 20000185 PARAMETER Experiment Name: At_Roots__P Parameter: Age (day) Value: 7 vs. 21
  misc_feature: MA Experiment 20000185 PARAMETER Experiment Name: At_Roots__P Parameter: Organism Value: A. thaliana
  misc_feature: MA Experiment 20000185 PARAMETER Experiment Name: At_Roots__P Parameter: Tissue Value: Roots vs. Whole Plant
  misc_feature: MA Experiment ID: 20000265 Result: Up-regulated in Transcription
  misc_feature: MA Experiment 20000265 PARAMETER Experiment Name: At_Open_Flower_P Parameter: Age (day) Value: 21
  misc_feature: MA Experiment 20000265 PARAMETER Experiment Name: At_Open_Flower_P Parameter: Plant Line Value: WS
  misc_feature: MA Experiment 20000265 PARAMETER Experiment Name: At_Open_Flower_P Parameter: Tissue Value: Closed Flower vs. Whole Plant
  misc_feature: MA Experiment ID: 20000286 Result: Up-regulated in Transcription
  misc_feature: MA Experiment 20000286 PARAMETER Experiment Name: At_Open_Flower_P Parameter: Age (day) Value: 21
  misc_feature: MA Experiment 20000286 PARAMETER Experiment Name: At_Open_Flower_P Parameter: Plant Line Value: WS
  misc_feature: MA Experiment 20000286 PARAMETER Experiment Name: At_Open_Flower_P Parameter: Tissue Value: Half Open vs. Whole Plant
  misc_feature: MA Experiment ID: 20000439 Result: Up-regulated in Transcription
  misc_feature: MA Experiment 20000439 PARAMETER Experiment Name: At_Roots__P Parameter: Age (day) Value: 14 vs. 21
  misc_feature: MA Experiment 20000439 PARAMETER Experiment Name: At_Roots__P Parameter: Organism Value: A. thaliana
  misc_feature: MA Experiment 20000439 PARAMETER Experiment Name: At_Roots__P Parameter: Tissue Value: Roots vs. Whole Plant
  misc_feature: MA Experiment ID: 20001451 Result: Down-regulated in Transcription
  misc_feature: MA Experiment 20001451 PARAMETER Experiment Name: At_Far-red-induction_P Parameter: Age (day) Value: 7
  misc_feature: MA Experiment 20001451 PARAMETER Experiment Name: At_Far-red-induction_P Parameter: Light Value: Far-red vs. White
  misc_feature: MA Experiment 20001451 PARAMETER Experiment Name: At_Far-red-induction_P Parameter: Organism Value: A. thaliana
  misc_feature: MA Experiment 20001451 PARAMETER Experiment Name: At_Far-red-induction_P Parameter: Plant Line Value: Columbia
  misc_feature: MA Experiment 20001451 PARAMETER Experiment Name: At_Far-red-induction_P Parameter: Timepoint (hr) Value: 24
  misc_feature: MA Experiment 20001451 PARAMETER Experiment Name: At_Far-red-induction_P Parameter: Tissue Value: Whole Plant
  misc_feature: MA Experiment ID: 20001557 Result: Down-regulated in Transcription
  misc_feature: MA Experiment 20001557 PARAMETER Experiment Name: At_Drought_Soil_Dry_P Parameter: Age (day) Value: 27
  misc_feature: MA Experiment 20001557 PARAMETER Experiment Name: At_Drought_Soil_Dry_P Parameter: Organism Value: A. thaliana
  misc_feature: MA Experiment 20001557 PARAMETER Experiment Name: At_Drought_Soil_Dry_P Parameter: Plant Line Value: WS
  misc_feature: MA Experiment 20001557 PARAMETER Experiment Name: At_Drought_Soil_Dry_P Parameter: Post Timepoint (hr) Value: 3
  misc_feature: MA Experiment 20001557 PARAMETER Experiment Name: At_Drought_Soil_Dry_P Parameter: Post-Treatment Value: Re-Water vs. No Drought
  misc_feature: MA Experiment 20001557 PARAMETER Experiment Name: At_Drought_Soil_Dry_P Parameter: Timepoint (day) Value: 13
  misc_feature: MA Experiment 20001557 PARAMETER Experiment Name: At_Drought_Soil_Dry_P Parameter: Treatment Value: Drought vs. No Drought
gatttattcacctttcttttcccttaaatataatctttataaaaaaaattaataattaaaaattaaaaaaaggaagtaaattgaaaaaacaaaattggtcccctgtcttcttttgttcactggacccttttcttggcttcgctaaatcatactatctctatcttctcaccgacactttcttcttctttgatcatatcatatttatcttcactacaaaaaaaaacaagtaaaataaagccaatcttcttaaatatctccagaagatctatcagcatttacgtattcaggtcctccaatttcttctcacaaagaaaaaggaagaaaaaaaagaagttgtgagagcaaaaaaaaatggcagtggataaagtgattgtgaagcagaggaacattatattggttggaattccaattgatgaaagtggcgtagaggttttaaaatgggcacttgaagaagttgcaaaacatggagattgtgttgttgttgtccatgtttgttttacttattaccgtgccttgaaaagcaagtcatcgctggatcggtacttaaaaccatacattgaattctgctcaacaaagaagattgagctcaaaggagaagtgttaaagggaaattcagttctaggggttttagttaaagaagcaaagagatacaacgccatgtcagttgttgttggagttaaacaacaaagtaaattaagatattttttcattagtctaaaaatagctaaaggctgcgcaaaagagcttccttcaaccaccgatattttggccatccacagagggaatatagtctttagacgttccaaccattaccaactacctcttgctcaaaagataagttcaagaccaagttctgaactctctgaaggattttcagacaaagatcttgcgaaaacaacgggtcaagagaagagaaagatatcaggaagatctctatctcttccatcggtagaggtagtagaccagacaccaggttggccattactaagaacatccactttagctactccaatggttcaacatcagactaggaaaatatcagttgtcaattgggtcatgagcttgcctgaaagatttccacatcatccgaatcagacttgtcaacagagcttttgtgataaacaacttaaagacatactcaaggacataaacagatggtttagctatgatgttctcaagacagcaacatcagatttctctttagagaatctgatcggaaaaggaggatgtaatgaagtttacaaagggtttcttgaagatggtaaaggcgtggcagtgaagatcttgaaaccatctgtaaaagaagcagtgaaggagtttgttcatgaagtgagcatagtctcttctttgagtcactcaaacatctctcctttgattggtgtatgcgttcattacaacgacctaatctctgtttacaatctctcttccaaagggagtttggaggagactcttcagggtaagcatgtcttgagatgggaagagagactcaagatagcaatagggttaggggaagctcttgattatctacataaccaatgttctaatcctgtgatccacagagatgtcaaatcttccaatgttcttctctcagatgagttcgaacctcagctttcggatttcggtctttcgatgtggggatcgaagtcttgtcgatacacgatacaaagagatgtggtgggtacatttggatatctagctcctgagtactttatgtatggaaaagttagcgataaagtcgatgtatatgcctttggagtagttttgcttgaactcatttcaggaagaacttctatttcatctgatagcccaagagggcaagagagtttggtcatgtgggcaaaaccaatgatcgaaaaaggcaatgcaaaagagctcttggatccgaatattgctggtactttcgacgaggatcagtttcataagatggttcttgctgctacacattgtctcacaagagcagccacttatcgtcccaatatcaaggagatattgaagctgctaagaggcgaagatgatgtctcgaaatgggtgaagatagaagaagatgacgaagatggtttcgacgacgaggtttacccaaattcgaacacagaattacacttgagcctcgcgatggttgacgtggaggataatgactctgtgtcaaacagtagcttggagagaagtaacaacagccttttttcttcttcttcttcttcctctcaggagcttcagtcttaa

SEQ ID NO: 48530 - protein, 622 aa, Arabidopsis thaliana
  peptide (1)..(622): Ceres Seq. ID no. 12575212
  misc_feature (13)..(150): Homolog of NCBI NO: 15237563 NR Description: putative protein
  misc_feature (268)..(609): Homolog of NCBI NO: 15237563 NR Description: putative protein
  misc_feature (1)..(150): Homolog of NCBI NO: 22329713 NR Description: hypothetical protein
  misc_feature (268)..(604): Homolog of NCBI NO: 22329713 NR Description: hypothetical protein
  misc_feature (184)..(420): Homolog of NCBI NO: 27754592 NR Description: putative protein kinase [Arabidopsis thaliana]
  misc_feature (496)..(604): Homolog of NCBI NO: 15223890 NR Description: hypothetical protein; protein id: At1g77280.1
  misc_feature (14)..(150): Homolog of NCBI NO: 15223890 NR Description: hypothetical protein; protein id: At1g77280.1
  misc_feature (191)..(495): Homolog of NCBI NO: 15223890 NR Description: hypothetical protein; protein id: At1g77280.1
  misc_feature (184)..(520): Homolog of NCBI NO: 15236248 NR Description: protein kinase - like; protein id: At4g35030.1
  misc_feature (159)..(622): Homolog of NCBI NO: 15227291 NR Description: putative protein kinase; protein id: At2g16750.1
MAVDKVIVKQRNIILVGIPIDESGVEVLKWALEEVAKHGDCVVVVHVCFTYYRALKSKSSLDRYLKPYIEFCSTKKIELKGEVLKGNSVLGVLVKEAKRYNAMSVVVGVKQQSKLRYFFISLKIAKGCAKELPSTTDILAIHRGNIVFRRSNHYQLPLAQKISSRPSSELSEGFSDKDLAKTTGQEKRKISGRSLSLPSVEVVDQTPGWPLLRTSTLATPMVQHQTRKISVVNWVMSLPERFPHHPNQTCQQSFCDKQLKDILKDINRWFSYDVLKTATSDFSLENLIGKGGCNEVYKGFLEDGKGVAVKILKPSVKEAVKEFVHEVSIVSSLSHSNISPLIGVCVHYNDLISVYNLSSKGSLEETLQGKHVLRWEERLKIAIGLGEALDYLHNQCSNPVIHRDVKSSNVLLSDEFEPQLSDFGLSMWGSKSCRYTIQRDVVGTFGYLAPEYFMYGKVSDKVDVYAFGVVLLELISGRTSISSDSPRGQESLVMWAKPMIEKGNAKELLDPNIAGTFDEDQFHKMVLAATHCLTRAATYRPNIKEILKLLRGEDDVSKWVKIEEDDEDGFDDEVYPNSNTELHLSLAMVDVEDNDSVSNSSLERSNNSLFSSSSSSSQELQS

SEQ ID NO: 48531 - protein, 520 aa, Arabidopsis thaliana
  peptide (1)..(520): Ceres Seq. ID no. 12575213
  misc_feature (1)..(48): Homolog of NCBI NO: 15237563 NR Description: putative protein
  misc_feature (166)..(507): Homolog of NCBI NO: 15237563 NR Description: putative protein
  misc_feature (1)..(48): Homolog of NCBI NO: 22329713 NR Description: hypothetical protein
  misc_feature (166)..(502): Homolog of NCBI NO: 22329713 NR Description: hypothetical protein
  misc_feature (82)..(318): Homolog of NCBI NO: 27754592 NR Description: putative protein kinase [Arabidopsis thaliana]
  misc_feature (394)..(502): Homolog of NCBI NO: 15223890 NR Description: hypothetical protein; protein id: At1g77280.1
  misc_feature (1)..(48): Homolog of NCBI NO: 15223890 NR Description: hypothetical protein; protein id: At1g77280.1
  misc_feature (89)..(393): Homolog of NCBI NO: 15223890 NR Description: hypothetical protein; protein id: At1g77280.1
  misc_feature (82)..(418): Homolog of NCBI NO: 15236248 NR Description: protein kinase - like; protein id: At4g35030.1
  misc_feature (57)..(520): Homolog of NCBI NO: 15227291 NR Description: putative protein kinase; protein id: At2g16750.1
MSVVVGVKQQSKLRYFFISLKIAKGCAKELPSTTDILAIHRGNIVFRRSNHYQLPLAQKISSRPSSELSEGFSDKDLAKTTGQEKRKISGRSLSLPSVEVVDQTPGWPLLRTSTLATPMVQHQTRKISVVNWVMSLPERFPHHPNQTCQQSFCDKQLKDILKDINRWFSYDVLKTATSDFSLENLIGKGGCNEVYKGFLEDGKGVAVKILKPSVKEAVKEFVHEVSIVSSLSHSNISPLIGVCVHYNDLISVYNLSSKGSLEETLQGKHVLRWEERLKIAIGLGEALDYLHNQCSNPVIHRDVKSSNVLLSDEFEPQLSDFGLSMWGSKSCRYTIQRDVVGTFGYLAPEYFMYGKVSDKVDVYAFGVVLLELISGRTSISSDSPRGQESLVMWAKPMIEKGNAKELLDPNIAGTFDEDQFHKMVLAATHCLTRAATYRPNIKEILKLLRGEDDVSKWVKIEEDDEDGFDDEVYPNSNTELHLSLAMVDVEDNDSVSNSSLERSNNSLFSSSSSSSQELQS

SEQ ID NO: 48532 - protein, 402 aa, Arabidopsis thaliana
  peptide (1)..(402): Ceres Seq. ID no. 12575214
  misc_feature (138)..(402): Homolog of NCBI NO: 15236248 NR Description: protein kinase - like; protein id: At4g35030.1
  misc_feature (1)..(384): Homolog of NCBI NO: 25518708 NR Description: hypothetical protein F24J8.18 - Arabidopsis
  misc_feature (48)..(395): Homolog of NCBI NO: 28376688 NR Description: putative serine/threonine kinase
  misc_feature (48)..(389): Homolog of NCBI NO: 15237563 NR Description: putative protein
  misc_feature (48)..(384): Homolog of NCBI NO: 22329713 NR Description: hypothetical protein
  misc_feature (1)..(200): Homolog of NCBI NO: 27754592 NR Description: putative protein kinase [Arabidopsis thaliana]
  misc_feature (276)..(384): Homolog of NCBI NO: 15223890 NR Description: hypothetical protein; protein id: At1g77280.1
  misc_feature (1)..(275): Homolog of NCBI NO: 15223890 NR Description: hypothetical protein; protein id: At1g77280.1
  misc_feature (1)..(300): Homolog of NCBI NO: 15236248 NR Description: protein kinase - like; protein id: At4g35030.1
  misc_feature (1)..(402): Homolog of NCBI NO: 15227291 NR Description: putative protein kinase; protein id: At2g16750.1
MVQHQTRKISVVNWVMSLPERFPHHPNQTCQQSFCDKQLKDILKDINRWFSYDVLKTATSDFSLENLIGKGGCNEVYKGFLEDGKGVAVKILKPSVKEAVKEFVHEVSIVSSLSHSNISPLIGVCVHYNDLISVYNLSSKGSLEETLQGKHVLRWEERLKIAIGLGEALDYLHNQCSNPVIHRDVKSSNVLLSDEFEPQLSDFGLSMWGSKSCRYTIQRDVVGTFGYLAPEYFMYGKVSDKVDVYAFGVVLLELISGRTSISSDSPRGQESLVMWAKPMIEKGNAKELLDPNIAGTFDEDQFHKMVLAATHCLTRAATYRPNIKEILKLLRGEDDVSKWVKIEEDDEDGFDDEVYPNSNTELHLSLAMVDVEDNDSVSNSSLERSNNSLFSSSSSSSQELQS

SEQ ID NO: 48533 - DNA, 1720 bp, Arabidopsis thaliana
  misc_feature (1)..(1720): Ceres Seq. ID no. 12601134
  misc_feature: MA Experiment ID: 20000171 Result: Up-regulated in Transcription
  misc_feature: MA Experiment 20000171 PARAMETER Experiment Name: At_42deg_Heat_P Parameter: Age (day) Value: 14
  misc_feature: MA Experiment 20000171 PARAMETER Experiment Name: At_42deg_Heat_P Parameter: Organism Value: A. thaliana
  misc_feature: MA Experiment 20000171 PARAMETER Experiment Name: At_42deg_Heat_P Parameter: Plant Line Value: WS
  misc_feature: MA Experiment 20000171 PARAMETER Experiment Name: At_42deg_Heat_P Parameter: Temperature (deg C) Value: 42 vs. 22
  misc_feature: MA Experiment 20000171 PARAMETER Experiment Name: At_42deg_Heat_P Parameter: Timepoint (hr) Value: 1
  misc_feature: MA Experiment 20000171 PARAMETER Experiment Name: At_42deg_Heat_P Parameter: Tissue Value: Aerial
  misc_feature: MA Experiment ID: 20001451 Result: Up-regulated in Transcription
  misc_feature: MA Experiment 20001451 PARAMETER Experiment Name: At_Far-red-induction_P Parameter: Age (day) Value: 7
  misc_feature: MA Experiment 20001451 PARAMETER Experiment Name: At_Far-red-induction_P Parameter: Light Value: Far-red vs. White
  misc_feature: MA Experiment 20001451 PARAMETER Experiment Name: At_Far-red-induction_P Parameter: Organism Value: A. thaliana
  misc_feature: MA Experiment 20001451 PARAMETER Experiment Name: At_Far-red-induction_P Parameter: Plant Line Value: Columbia
  misc_feature: MA Experiment 20001451 PARAMETER Experiment Name: At_Far-red-induction_P Parameter: Timepoint (hr) Value: 24
  misc_feature: MA Experiment 20001451 PARAMETER Experiment Name: At_Far-red-induction_P Parameter: Tissue Value: Whole Plant
aaaaacaatcacgagccaacacctcttcatcttctccaaatcaatccatcaatggagtcttctcccatctctctctcttcctcctcagatctcacactctgaaaaatcccccaaagccatgtcttaccttcttcgctccgatccggtttcacgaatccacccagaacctcaatctctaacctctttcgaccacttcgatctcctccctgactctctcctcctcttaatcttcgacaaagtcgccgacgtcaaagatctcggccgttgctgcatcgtatctcgtagattccactctctcgtccctttcgttgagaacgttctcgtccgtgttgattgtgttatctccgacgatgattcctcttcctccgacgagaatcatcgattctctttaaacactgcatcgatctcagacgccggcggtgctggtggctccttctccgccttgttccgtctcgtattcgctccaattttcaaaccgtttcaaatgttagggcagattctaggaccgaaacgatcgtcttcttcgttcgatgcgtcgttttcagcgattaacgatgagatcggcgtaacgcatcactctccgactcaggtattgaaaaacttcggtgagattcggtttttgaaaatcgaacttcctacaggagaattaggtatcgaggatggtatattgttgaaatggagagctgattttggatctacgcttgataattgtatgatacttggagcatcttcggtgattcagtcgaattcagtgaagaatcatgagaattcggttgatgaagacaatggtaacatacctgagtcgttttacactaatggagggcttaagcttcgtgtggtttggacgataagctcgttaatcgctgcgtcggctcggcattatcttcttcaaccgattatcaatgagcataagtcgttagatcgtttggttttatctgatgctgatgggcaaggtgttttgtgtatgaatagagaacagcttgaagagcttagagttactcctttatcagcttcttctgcttcgaagaggacgcttgtgcctgcgttgaatatgaggttgtggtatgctccggaattggatttacctgatgggacggtgttgaaaggtgcgacattggtggctattaggccgagtgagtctaagaaggaagtttgtgatgcttcttggttgtctgatgcttttgaggaaccgtttgggactgtggcgaagatgttgatcaagaggaggacttattgtttggagatgaactcgttctgatttcgcattatgaccggtttcagatggtgggagcaaacaaatccacatatgttggagaatgaaggaaagagaacagagagttcacaaatgtcctgaagccaaaaaccgcaaatctctcgactttttttgagacatactgcttcgccagtcatgaggcctgcgtcgaatgaatctgcaggcatggaggatgccgaagggaggttctctgaaaccgaagaagaacgccattgtacatacactcttgtaaaagaagtctgcgagtgaggaagaacatgtgtgtgatctgtgttaaaaagaggcacatatgaaggatgtgaatcgtcgtaacacgtaagggattatgttacaaaagagtctgtaataatatgtataagctttatttcgacactttgatgttctgttcttgatacttggatactctgttcttgaagctaactactttagacattgatcttccttttt

SEQ ID NO: 48534 - protein, 418 aa, Arabidopsis thaliana
  peptide (1)..(418): Ceres Seq. ID no. 12601135
  misc_feature (63)..(245): Homolog of NCBI NO: 34909910 NR Description: P0665A11.15 [Oryza sativa (japonica
  misc_feature (63)..(121): Homolog of NCBI NO: 18411823 NR Description: expressed protein
  misc_feature (182)..(418): Homolog of NCBI NO: 18411823 NR Description: expressed protein
  misc_feature (63)..(116): Homolog of NCBI NO: 15219845 NR Description: hypothetical protein; protein id: At1g22220.1
  misc_feature (194)..(418): Homolog of NCBI NO: 15219845 NR Description: hypothetical protein; protein id: At1g22220.1
  misc_feature (133)..(416): Homolog of NCBI NO: 34909194 NR Description: P0425G02.20 [Oryza sativa (japonica
  misc_feature (189)..(418): Homolog of NCBI NO: 34909910 NR Description: P0665A11.15 [Oryza sativa (japonica
  misc_feature (45)..(418): Homolog of NCBI NO: 15237391 NR Description: putative protein
  misc_feature (40)..(418): Homolog of NCBI NO: 15236865 NR Description: hypothetical protein; protein id: At4g18380.1
  misc_feature (40)..(418): Homolog of NCBI NO: 18397400 NR Description: expressed protein
KTITSQHLFIFSKSIHQWSLLPSLSLPPQISHSEKSPKAMSYLLRSDPVSRIHPEPQSLTSFDHFDLLPDSLLLLIFDKVADVKDLGRCCIVSRRFHSLVPFVENVLVRVDCVISDDDSSSSDENHRFSLNTASISDAGGAGGSFSALFRLVFAPIFKPFQMLGQILGPKRSSSSFDASFSAINDEIGVTHHSPTQVLKNFGEIRFLKIELPTGELGIEDGILLKWRADFGSTLDNCMILGASSVIQSNSVKNHENSVDEDNGNIPESFYTNGGLKLRVVWTISSLIAASARHYLLQPIINEHKSLDRLVLSDADGQGVLCMNREQLEELRVTPLSASSASKRTLVPALNMRLWYAPELDLPDGTVLKGATLVAIRPSESKKEVCDASWLSDAFEEPFGTVAKMLIKRRTYCLEMNSF

SEQ ID NO: 48535 - protein, 379 aa, Arabidopsis thaliana
  peptide (1)..(379): Ceres Seq. ID no. 12601136
  misc_feature (24)..(206): Homolog of NCBI NO: 34909910 NR Description: P0665A11.15 [Oryza sativa (japonica
  misc_feature (24)..(82): Homolog of NCBI NO: 18411823 NR Description: expressed protein
  misc_feature (143)..(379): Homolog of NCBI NO: 18411823 NR Description: expressed protein
  misc_feature (24)..(77): Homolog of NCBI NO: 15219845 NR Description: hypothetical protein; protein id: At1g22220.1
  misc_feature (155)..(379): Homolog of NCBI NO: 15219845 NR Description: hypothetical protein; protein id: At1g22220.1
  misc_feature (94)..(377): Homolog of NCBI NO: 34909194 NR Description: P0425G02.20 [Oryza sativa (japonica
  misc_feature (150)..(379): Homolog of NCBI NO: 34909910 NR Description: P0665A11.15 [Oryza sativa (japonica
  misc_feature (6)..(379): Homolog of NCBI NO: 15237391 NR Description: putative protein
  misc_feature (1)..(379): Homolog of NCBI NO: 15236865 NR Description: hypothetical protein; protein id: At4g18380.1
  misc_feature (1)..(379): Homolog of NCBI NO: 18397400 NR Description: expressed protein
MSYLLRSDPVSRIHPEPQSLTSFDHFDLLPDSLLLLIFDKVADVKDLGRCCIVSRRFHSLVPFVENVLVRVDCVISDDDSSSSDENHRFSLNTASISDAGGAGGSFSALFRLVFAPIFKPFQMLGQILGPKRSSSSFDASFSAINDEIGVTHHSPTQVLKNFGEIRFLKIELPTGELGIEDGILLKWRADFGSTLDNCMILGASSVIQSNSVKNHENSVDEDNGNIPESFYTNGGLKLRVVWTISSLIAASARHYLLQPIINEHKSLDRLVLSDADGQGVLCMNREQLEELRVTPLSASSASKRTLVPALNMRLWYAPELDLPDGTVLKGATLVAIRPSESKKEVCDASWLSDAFEEPFGTVAKMLIKRRTYCLEMNSF

SEQ ID NO: 48536 - protein, 257 aa, Arabidopsis thaliana
  peptide (1)..(257): Ceres Seq. ID no. 12601137
  misc_feature (1)..(84): Homolog of NCBI NO: 34909910 NR Description: P0665A11.15 [Oryza sativa (japonica
  misc_feature (21)..(257): Homolog of NCBI NO: 18411823 NR Description: expressed protein
  misc_feature (33)..(257): Homolog of NCBI NO: 15219845 NR Description: hypothetical protein; protein id: At1g22220.1
  misc_feature (1)..(255): Homolog of NCBI NO: 34909194 NR Description: P0425G02.20 [Oryza sativa (japonica
  misc_feature (28)..(257): Homolog of NCBI NO: 34909910 NR Description: P0665A11.15 [Oryza sativa (japonica
  misc_feature (1)..(257): Homolog of NCBI NO: 15237391 NR Description: putative protein
  misc_feature (1)..(257): Homolog of NCBI NO: 15236865 NR Description: hypothetical protein; protein id: At4g18380.1
  misc_feature (1)..(257): Homolog of NCBI NO: 18397400 NR Description: expressed protein
MLGQILGPKRSSSSFDASFSAINDEIGVTHHSPTQVLKNFGEIRFLKIELPTGELGIEDGILLKWRADFGSTLDNCMILGASSVIQSNSVKNHENSVDEDNGNIPESFYTNGGLKLRVVWTISSLIAASARHYLLQPIINEHKSLDRLVLSDADGQGVLCMNREQLEELRVTPLSASSASKRTLVPALNMRLWYAPELDLPDGTVLKGATLVAIRPSESKKEVCDASWLSDAFEEPFGTVAKMLIKRRTYCLEMNSF

SEQ ID NO: 48537 - DNA, 1851 bp, Arabidopsis thaliana
  misc_feature (1)..(1851): Ceres Seq. ID no. 12600999
  misc_feature: MA Experiment ID: 20000184 Result: Down-regulated in Transcription
  misc_feature: MA Experiment 20000184 PARAMETER Experiment Name: At_Shoots__P Parameter: Age (day) Value: 7
  misc_feature: MA Experiment 20000184 PARAMETER Experiment Name: At_Shoots__P Parameter: Tissue Value: Shoots vs. Whole Plant
  misc_feature: MA Experiment ID: 20000234 Result: Down-regulated in Transcription
  misc_feature: MA Experiment 20000234 PARAMETER Experiment Name: At_Siliques_P Parameter: Age (day) Value: 21
  misc_feature: MA Experiment 20000234 PARAMETER Experiment Name: At_Siliques_P Parameter: Organism Value: A. thaliana
  misc_feature: MA Experiment 20000234 PARAMETER Experiment Name: At_Siliques_P Parameter: Plant Line Value: WS
  misc_feature: MA Experiment 20000234 PARAMETER Experiment Name: At_Siliques_P Parameter: Tissue Value: Less Than 5mm Siliques vs. Whole Plant
  misc_feature: MA Experiment ID: 20000264 Result: Down-regulated in Transcription
  misc_feature: MA Experiment 20000264 PARAMETER Experiment Name: At_Open_Flower_P Parameter: Age (day) Value: 21
  misc_feature: MA Experiment 20000264 PARAMETER Experiment Name: At_Open_Flower_P Parameter: Plant Line Value: WS
  misc_feature: MA Experiment 20000264 PARAMETER Experiment Name: At_Open_Flower_P Parameter: Tissue Value: Open Flower vs. Whole Plant
  misc_feature: MA Experiment ID: 20000438 Result: Down-regulated in Transcription
  misc_feature: MA Experiment 20000438 PARAMETER Experiment Name: At_Shoots__P Parameter: Age (day) Value: 14
  misc_feature: MA Experiment 20000438 PARAMETER Experiment Name: At_Shoots__P Parameter: Tissue Value: Shoots vs. Whole Plant
  misc_feature: MA Experiment ID: 20000439 Result: Down-regulated in Transcription
  misc_feature: MA Experiment 20000439 PARAMETER Experiment Name: At_Roots__P Parameter: Age (day) Value: 14 vs. 21
  misc_feature: MA Experiment 20000439 PARAMETER Experiment Name: At_Roots__P Parameter: Organism Value: A. thaliana
  misc_feature: MA Experiment 20000439 PARAMETER Experiment Name: At_Roots__P Parameter: Tissue Value: Roots vs. Whole Plant
  misc_feature: MA Experiment ID: 20001248 Result: Up-regulated in Transcription
  misc_feature: MA Experiment 20001248 PARAMETER Experiment Name: At_Far-red-induction_P Parameter: Age (day) Value: 7
  misc_feature: MA Experiment 20001248 PARAMETER Experiment Name: At_Far-red-induction_P Parameter: Light Value: Far-red vs. White
  misc_feature: MA Experiment 20001248 PARAMETER Experiment Name: At_Far-red-induction_P Parameter: Organism Value: A. thaliana
  misc_feature: MA Experiment 20001248 PARAMETER Experiment Name: At_Far-red-induction_P Parameter: Plant Line Value: Columbia
  misc_feature: MA Experiment 20001248 PARAMETER Experiment Name: At_Far-red-induction_P Parameter: Timepoint (hr) Value: 4
  misc_feature: MA Experiment 20001248 PARAMETER Experiment Name: At_Far-red-induction_P Parameter: Tissue Value: Whole Plant
  misc_feature: MA Experiment ID: 20001757 Result: Up-regulated in Transcription
  misc_feature: MA Experiment 20001757 PARAMETER Experiment Name: At_50mM_NH4NO3_L-to-H_P Parameter: Timepoint (hr) Value: 6
  misc_feature: MA Experiment 20001757 PARAMETER Experiment Name: At_50mM_NH4NO3_L-to-H_P Parameter: Tissue Value: Leaf
  misc_feature: MA Experiment 20001757 PARAMETER Experiment Name: At_50mM_NH4NO3_L-to-H_P Parameter: Treatment Value: 50mM NH4NO3 vs 100mM Mannitol
ctgcattaaaaaaacactgacgtgtaaattttatttatcccaataccgtttacctttagtcaacgatttttttcccaccaaagtccccaaatacactcgtttgcgtttaaacctttcacttgaaactctgttttagactcttttatttgttagacttttttgtttgtttcgtcgttgttgttttttgaccaaaccaccatgcgattcgtcgcgccaccgcctcgttccggcgataactcaccgtcaccttcaccatcttccggtatatccgaagagattctctcccgttcttcggatcctcctttagagtttagtcctccattgatcgccatggtggtggttctagccgccgcttttctattcgtaacttactctcgtctcatctcccgccgttttctttcacctctattccgtcgttttagaaggtggcgatgccgtcgacgccgtctccttcacttatcttcagcttcctctgcttcaacttcatcctccgatctccgatcattttcacctttccctttcgactcttttcattactcttcttactcaccttacggattagacgattccgttatcaaaactttaccgctgtttctctactccgccgctgcttgcaccggaaaacccgcggtggggaaaacctccgccgccaattgcagagattgtgctgtttgtttgttggaattcgaagaaggtgattatgtacgaacacttccgttatgcttccatgcttttcaccttgaatgcatcgatgaatggctccgatctcaccctaactgtccgttatgccgtacggcgattctcggatccgccggagttttaacgcctatgtcgccgttcgttccgttaatggctcctcgaattcgtccgagtctcgatgatgaagagaataacgcgatcatcatccgcggcgaaatcacaccgtcgcggagcaattggaacacaatcgctgccgatacgacgaacgatcaggagatcagagcgtcggtggaagagcaatcatcaccggcgatttctcggttccgggagctgaagagatcgtactcgttcgaatgcgagagagaatctgaatcagagagagtaacgatggagccagcgacggtgtctccatggagataccggagatctacatggaacaaacgtcaatcaccgttcggaaacctaatatcgaaatcaagagtgttctcgttccgttactacagaagcacgaaatcaccgttcttccgacggagatcatcggcgggagtgttttacccgatatcagaacggattccagcgacgggaagctcatcgcggcgaacgaaatcgatgacgagtccgatgttcttcagaacagcaccgcactcatcgagccggttaagatgcggagatccagaggcactgttatcgccggagagatggagaagaagagacacgtgtagggcagagatgtaagatgaaatttggacggtggtgatgataaaaagaaatattgaagtggaaggagagagcattaatggaatgtggggtttaagcatttaatggaattaaaatgaacgaaacagaagaagatagagagattcagaaattgctcagctgctcacattcacaacaagacaaaagacgccaagacgatgaaggttttggagcctgtacgacggcgttttggctgatgattcgttttttcctctctttggagttatcaaaatgcattaacttcaaaagctgccaaagttatcatagaaacgaaagtcaacaacacattgaatttcgtttctataataactttacatcgtcggtggctttactgttttctgttaccgaattttatgttcaaacttttagctgtcgatttaatttttgaccaaattt

SEQ ID NO: 48538 - protein, 411 aa, Arabidopsis thaliana
  peptide (1)..(411): Ceres Seq. ID no. 12601000
  misc_feature (156)..(197): Pfam Name: Zinc finger, C3HC4 type (RING finger) Pfam Description: Zinc finger, C3HC4 type (RING finger)
  misc_feature (87)..(204): Homolog of NCBI NO: 11358786 NR Description: RING-H2 finger protein RHX1a
  misc_feature (97)..(250): Homolog of NCBI NO: 15228830 NR Description: RING-H2 zinc finger protein ATL5
  misc_feature (82)..(230): Homolog of NCBI NO: 8698835 NR Description: RING finger 1 [Oryza sativa (japonica
  misc_feature (97)..(250): Homolog of NCBI NO: 4928401 NR Description: RING-H2 zinc finger protein ATL5 [Arabidopsis
  misc_feature (78)..(204): Homolog of NCBI NO: 15232280 NR Description: RING-H2 zinc finger protein ATL4
  misc_feature (37)..(273): Homolog of NCBI NO: 18396583 NR Description: expressed protein
  misc_feature (78)..(204): Homolog of NCBI NO: 25456491 NR Description: RING-H2 zinc finger protein ATL4
  misc_feature (37)..(255): Homolog of NCBI NO: 6017119 NR Description: unknown protein [Arabidopsis thaliana]
  misc_feature (74)..(210): Homolog of NCBI NO: 34907968 NR Description: P0446G04.15 [Oryza sativa (japonica
  misc_feature (1)..(411): Homolog of NCBI NO: 15230241 NR Description: unknown protein
MRFVAPPPRSGDNSPSPSPSSGISEEILSRSSDPPLEFSPPLIAMVVVLAAAFLFVTYSRLISRRFLSPLFRRFRRWRCRRRRLLHLSSASSASTSSSDLRSFSPFPFDSFHYSSYSPYGLDDSVIKTLPLFLYSAAACTGKPAVGKTSAANCRDCAVCLLEFEEGDYVRTLPLCFHAFHLECIDEWLRSHPNCPLCRTAILGSAGVLTPMSPFVPLMAPRIRPSLDDEENNAIIIRGEITPSRSNWNTIAADTTNDQEIRASVEEQSSPAISRFRELKRSYSFECERESESERVTMEPATVSPWRYRRSTWNKRQSPFGNLISKSRVFSFRYYRSTKSPFFRRRSSAGVFYPISERIPATGSSSRRTKSMTSPMFFRTAPHSSSRLRCGDPEALLSPERWRRRDTCRAEM

SEQ ID NO: 48539 - protein, 367 aa, Arabidopsis thaliana
  peptide (1)..(367): Ceres Seq. ID no. 12601001
  misc_feature (112)..(153): Pfam Name: Zinc finger, C3HC4 type (RING finger) Pfam Description: Zinc finger, C3HC4 type (RING finger)
  misc_feature (43)..(160): Homolog of NCBI NO: 11358786 NR Description: RING-H2 finger protein RHX1a
  misc_feature (53)..(206): Homolog of NCBI NO: 15228830 NR Description: RING-H2 zinc finger protein ATL5
  misc_feature (38)..(186): Homolog of NCBI NO: 8698835 NR Description: RING finger 1 [Oryza sativa (japonica
  misc_feature (53)..(206): Homolog of NCBI NO: 4928401 NR Description: RING-H2 zinc finger protein ATL5 [Arabidopsis
  misc_feature (34)..(160): Homolog of NCBI NO: 15232280 NR Description: RING-H2 zinc finger protein ATL4
  misc_feature (1)..(229): Homolog of NCBI NO: 18396583 NR Description: expressed protein
  misc_feature (34)..(160): Homolog of NCBI NO: 25456491 NR Description: RING-H2 zinc finger protein ATL4
  misc_feature (1)..(211): Homolog of NCBI NO: 6017119 NR Description: unknown protein [Arabidopsis thaliana]
  misc_feature (30)..(166): Homolog of NCBI NO: 34907968 NR Description: P0446G04.15 [Oryza sativa (japonica
  misc_feature (1)..(367): Homolog of NCBI NO: 15230241 NR Description: unknown protein
MVVVLAAAFLFVTYSRLISRRFLSPLFRRFRRWRCRRRRLLHLSSASSASTSSSDLRSFSPFPFDSFHYSSYSPYGLDDSVIKTLPLFLYSAAACTGKPAVGKTSAANCRDCAVCLLEFEEGDYVRTLPLCFHAFHLECIDEWLRSHPNCPLCRTAILGSAGVLTPMSPFVPLMAPRIRPSLDDEENNAIIIRGEITPSRSNWNTIAADTTNDQEIRASVEEQSSPAISRFRELKRSYSFECERESESERVTMEPATVSPWRYRRSTWNKRQSPFGNLISKSRVFSFRYYRSTKSPFFRRRSSAGVFYPISERIPATGSSSRRTKSMTSPMFFRTAPHSSSRLRCGDPEALLSPERWRRRDTCRAEM

SEQ ID NO: 48540 - DNA, 1962 bp, Arabidopsis thaliana
  misc_feature (1)..(1962): Ceres Seq. ID no. 12575215
  misc_feature: MA Experiment ID: 20000179 Result: Down-regulated in Transcription
  misc_feature: MA Experiment 20000179 PARAMETER Experiment Name: At_Germinating_Seeds_P Parameter: Age (hr) Value: 6 vs. 0
  misc_feature: MA Experiment 20000179 PARAMETER Experiment Name: At_Germinating_Seeds_P Parameter: Tissue Value: Germinating Seeds
  misc_feature: MA Experiment ID: 20000180 Result: Down-regulated in Transcription
  misc_feature: MA Experiment 20000180 PARAMETER Experiment Name: At_Germinating_Seeds_P Parameter: Age (hr) Value: 24 vs. 0
  misc_feature: MA Experiment 20000180 PARAMETER Experiment Name: At_Germinating_Seeds_P Parameter: Tissue Value: Germinating Seeds
gtgaccctttaaaggaaagctattagcgattgattcgagagatgtgcaaagcttgttgatttgaggctctctctctactagggtttgttgatttgagttttctattcctcctatacgtgttcttcgattctcctgggatttttttttgaaaaagggaatagaagaagaagttgctgaattctcgatatggaatccatcatggaagaagctgatagttacattgagtatgtatcagtggcggagcggagagcgattgcagcgcagaagatacttcagcggaagggaaaagcttcggaattggaagaagaagctgacaaggaaaagctcgctgaagctaaacctagtttacttgttcaagcaactcagctcaagcgagatgtacccgaagttagtgctactgagcaaatcatcttacaagagaaagagatgatggagcatttatctgataagaagacgcttatgtctgttcgtgaacttgccaaaggtatcacttatacagagcctctcttaactgggtggaaacctcctttgcatattaggaagatgtctagtaagcagagagatttgattaggaagcaatggcatattattgttaatggtgatgatattcctcctcctattaagaactttaaggatatgaagtttcctagacctgttctcgatactctcaaggagaaaggtattgtgcagcctactcctattcaagttcagggtcttcctgtgattttggctgggagagatatgattgggattgctttcactggttccggaaagactttggttttcgtgcttcccatgatcatgattgctctccaagaagagatgatgatgcctattgctgctggtgaaggtcccattgggcttattgtttgcccttctagagagcttgctaggcagacttatgaagtggttgagcagtttgtggctcctttggttgaggctgggtacccgccattgaggtcgttgctatgtattggaggtattgatatgagatcccagttggaggttgtcaagagaggtgtccatattgttgttgcaacccctgggaggttaaaggatatgctcgccaagaaaaagatgagcttagatgcttgcaggtacctgacactagatgaggcagataggttggttgatttgggtttcgaagatgacataagggaagtctttgaccactttaagtctcaacgtcaaacactattgttctctgccacaatgcccacaaagattcaaatctttgccagaagtgctctggtgaaacctgtgacagttaatgtaggaagagctggagctgcgaatctggatgtgatccaggaggtagaatacgtcaaacaagaagcaaagattgtttacctcctcgagtgtctacagaaaacctctccgccggttttgatattctgtgagaacaaagctgatgttgatgatattcacgagtacttgttactgaaaggagtggaagcagtggccatccatggaggaaaagatcaagaagacagagagtacgcaatctcttcgtttaaagctgggaaaaaagatgtgttggttgcgactgatgttgcttcaaagggtctagatttccctgatatacaacacgtaatcaactacgacatgccagcagagattgagaactatgtgcataggataggacgaacaggtcggtgtggtaaaactgggatagcaacgacgtttataaacaagaatcaaagcgaaaccactctgctggatttgaaacacttgttgcaagaagctaaacagaggattccacctgtccttgctgagctgaatgatccaatggaagaagcagagaccattgctaatgcaagtggtgtcaagggttgtgcctattgtggtggtcttggacatcgtatccgagactgtccaaaacttgagcaccagaagagtgtcgccatttctaactcaagaaaagattattttggctcgggtggctacagaggagaaatataa

SEQ ID NO: 48541 - protein, 591 aa, Arabidopsis thaliana
  peptide (1)..(591): Ceres Seq. ID no. 12575216
  misc_feature (159)..(376): Pfam Name: DEAD/DEAH box helicase Pfam Description: DEAD/DEAH box helicase
  misc_feature (60)..(587): Homolog of NCBI NO: 23613298 NR Description: RNA helicase-1 [Plasmodium falciparum 3D7]
  misc_feature (53)..(584): Homolog of NCBI NO: 6118254 NR Description: DEAD-box protein abstrakt [Drosophila
  misc_feature (26)..(581): Homolog of NCBI NO: 6118555 NR Description: DEAD-box protein abstrakt [Homo sapiens]
  misc_feature (6)..(581): Homolog of NCBI NO: 14042692 NR Description: unnamed protein product [Homo sapiens]
  misc_feature (6)..(581): Homolog of NCBI NO: 7022398 NR Description: unnamed protein product [Homo sapiens]
  misc_feature (6)..(581): Homolog of NCBI NO: 21536246 NR Description: expressed sequence AI324246 [Mus musculus]
  misc_feature (6)..(581): Homolog of NCBI NO: 30584005 NR Description: Homo sapiens DEAD-box protein abstrakt [synthetic
  misc_feature (6)..(581): Homolog of NCBI NO: 21071032 NR Description: DEAD-box protein abstrakt; putative RNA helicase
  misc_feature (79)..(591): Homolog of NCBI NO: 15234166 NR Description: DEAD-box protein abstrakt, putative; protein id:
  misc_feature (1)..(591): Homolog of NCBI NO: 15241415 NR Description: DEAD-box protein abstrakt, putative; protein id:
MESIMEEADSYIEYVSVAERRAIAAQKILQRKGKASELEEEADKEKLAEAKPSLLVQATQLKRDVPEVSATEQIILQEKEMMEHLSDKKTLMSVRELAKGITYTEPLLTGWKPPLHIRKMSSKQRDLIRKQWHIIVNGDDIPPPIKNFKDMKFPRPVLDTLKEKGIVQPTPIQVQGLPVILAGRDMIGIAFTGSGKTLVFVLPMIMIALQEEMMMPIAAGEGPIGLIVCPSRELARQTYEVVEQFVAPLVEAGYPPLRSLLCIGGIDMRSQLEVVKRGVHIVVATPGRLKDMLAKKKMSLDACRYLTLDEADRLVDLGFEDDIREVFDHFKSQRQTLLFSATMPTKIQIFARSALVKPVTVNVGRAGAANLDVIQEVEYVKQEAKIVYLLECLQKTSPPVLIFCENKADVDDIHEYLLLKGVEAVAIHGGKDQEDREYAISSFKAGKKDVLVATDVASKGLDFPDIQHVINYDMPAEIENYVHRIGRTGRCGKTGIATTFINKNQSETTLLDLKHLLQEAKQRIPPVLAELNDPMEEAETIANASGVKGCAYCGGLGHRIRDCPKLEHQKSVAISNSRKDYFGSGGYRGEI

SEQ ID NO: 48542 - protein, 587 aa, Arabidopsis thaliana
  peptide (1)..(587): Ceres Seq. ID no. 12575217
  misc_feature (155)..(372): Pfam Name: DEAD/DEAH box helicase Pfam Description: DEAD/DEAH box helicase
  misc_feature (56)..(583): Homolog of NCBI NO: 23613298 NR Description: RNA helicase-1 [Plasmodium falciparum 3D7]
  misc_feature (49)..(580): Homolog of NCBI NO: 6118254 NR Description: DEAD-box protein abstrakt [Drosophila
  misc_feature (22)..(577): Homolog of NCBI NO: 6118555 NR Description: DEAD-box protein abstrakt [Homo sapiens]
  misc_feature (2)..(577): Homolog of NCBI NO: 14042692 NR Description: unnamed protein product [Homo sapiens]
  misc_feature (2)..(577): Homolog of NCBI NO: 7022398 NR Description: unnamed protein product [Homo sapiens]
  misc_feature (2)..(577): Homolog of NCBI NO: 21536246 NR Description: expressed sequence AI324246 [Mus musculus]
  misc_feature (2)..(577): Homolog of NCBI NO: 30584005 NR Description: Homo sapiens DEAD-box protein abstrakt [synthetic
  misc_feature (2)..(577): Homolog of NCBI NO: 21071032 NR Description: DEAD-box protein abstrakt; putative RNA helicase
  misc_feature (75)..(587): Homolog of NCBI NO: 15234166 NR Description: DEAD-box protein abstrakt, putative; protein id:
  misc_feature (1)..(587): Homolog of NCBI NO: 15241415 NR Description: DEAD-box protein abstrakt, putative; protein id:
MEEADSYIEYVSVAERRAIAAQKILQRKGKASELEEEADKEKLAEAKPSLLVQATQLKRDVPEVSATEQIILQEKEMMEHLSDKKTLMSVRELAKGITYTEPLLTGWKPPLHIRKMSSKQRDLIRKQWHIIVNGDDIPPPIKNFKDMKFPRPVLDTLKEKGIVQPTPIQVQGLPVILAGRDMIGIAFTGSGKTLVFVLPMIMIALQEEMMMPIAAGEGPIGLIVCPSRELARQTYEVVEQFVAPLVEAGYPPLRSLLCIGGIDMRSQLEVVKRGVHIVVATPGRLKDMLAKKKMSLDACRYLTLDEADRLVDLGFEDDIREVFDHFKSQRQTLLFSATMPTKIQIFARSALVKPVTVNVGRAGAANLDVIQEVEYVKQEAKIVYLLECLQKTSPPVLIFCENKADVDDIHEYLLLKGVEAVAIHGGKDQEDREYAISSFKAGKKDVLVATDVASKGLDFPDIQHVINYDMPAEIENYVHRIGRTGRCGKTGIATTFINKNQSETTLLDLKHLLQEAKQRIPPVLAELNDPMEEAETIANASGVKGCAYCGGLGHRIRDCPKLEHQKSVAISNSRKDYFGSGGYRGEI

SEQ ID NO: 48543 - protein, 511 aa, Arabidopsis thaliana
  peptide (1)..(511): Ceres Seq. ID no. 12575218
  misc_feature (79)..(296): Pfam Name: DEAD/DEAH box helicase Pfam Description: DEAD/DEAH box helicase
  misc_feature (1)..(507): Homolog of NCBI NO: 23613298 NR Description: RNA helicase-1 [Plasmodium falciparum 3D7]
  misc_feature (1)..(504): Homolog of NCBI NO: 6118254 NR Description: DEAD-box protein abstrakt [Drosophila
  misc_feature (1)..(501): Homolog of NCBI NO: 6118555 NR Description: DEAD-box protein abstrakt [Homo sapiens]
  misc_feature (1)..(501): Homolog of NCBI NO: 14042692 NR Description: unnamed protein product [Homo sapiens]
  misc_feature (1)..(501): Homolog of NCBI NO: 7022398 NR Description: unnamed protein product [Homo sapiens]
  misc_feature (1)..(501): Homolog of NCBI NO: 21536246 NR Description: expressed sequence AI324246 [Mus musculus]
  misc_feature (1)..(501): Homolog of NCBI NO: 30584005 NR Description: Homo sapiens DEAD-box protein abstrakt [synthetic
  misc_feature (1)..(501): Homolog of NCBI NO: 21071032 NR Description: DEAD-box protein abstrakt; putative RNA helicase
  misc_feature (1)..(511): Homolog of NCBI NO: 15234166 NR Description: DEAD-box protein abstrakt, putative; protein id:
  misc_feature (1)..(511): Homolog of NCBI NO: 15241415 NR Description: DEAD-box protein abstrakt, putative; protein id:
MMEHLSDKKTLMSVRELAKGITYTEPLLTGWKPPLHIRKMSSKQRDLIRKQWHIIVNGDDIPPPIKNFKDMKFPRPVLDTLKEKGIVQPTPIQVQGLPVILAGRDMIGIAFTGSGKTLVFVLPMIMIALQEEMMMPIAAGEGPIGLIVCPSRELARQTYEVVEQFVAPLVEAGYPPLRSLLCIGGIDMRSQLEVVKRGVHIVVATPGRLKDMLAKKKMSLDACRYLTLDEADRLVDLGFEDDIREVFDHFKSQRQTLLFSATMPTKIQIFARSALVKPVTVNVGRAGAANLDVIQEVEYVKQEAKIVYLLECLQKTSPPVLIFCENKADVDDIHEYLLLKGVEAVAIHGGKDQEDREYAISSFKAGKKDVLVATDVASKGLDFPDIQHVINYDMPAEIENYVHRIGRTGRCGKTGIATTFINKNQSETTLLDLKHLLQEAKQRIPPVLAELNDPMEEAETIANASGVKGCAYCGGLGHRIRDCPKLEHQKSVAISNSRKDYFGSGGYRGEI

SEQ ID NO: 48544 - DNA, 1495 bp, Arabidopsis thaliana
  misc_feature (1)..(1495): Ceres Seq. ID no. 12575219
  misc_feature: MA Experiment ID: 20000180 Result: Down-regulated in Transcription
  misc_feature: MA Experiment 20000180 PARAMETER Experiment Name: At_Germinating_Seeds_P Parameter: Age (hr) Value: 24 vs. 0
  misc_feature: MA Experiment 20000180 PARAMETER Experiment Name: At_Germinating_Seeds_P Parameter: Tissue Value: Germinating Seeds
  misc_feature: MA Experiment ID: 20001911 Result: Up-regulated in Transcription
  misc_feature: MA Experiment 20001911 PARAMETER Experiment Name: At_Drought_Reproduction_P Parameter: Age (day) Value: 40
  misc_feature: MA Experiment 20001911 PARAMETER Experiment Name: At_Drought_Reproduction_P Parameter: Organism Value: A. thaliana
  misc_feature: MA Experiment 20001911 PARAMETER Experiment Name: At_Drought_Reproduction_P Parameter: Plant Line Value: WS
  misc_feature: MA Experiment 20001911 PARAMETER Experiment Name: At_Drought_Reproduction_P Parameter: Timepoint (day) Value: 10
  misc_feature: MA Experiment 20001911 PARAMETER Experiment Name: At_Drought_Reproduction_P Parameter: Tissue Value: Flowers
  misc_feature: MA Experiment 20001911 PARAMETER Experiment Name: At_Drought_Reproduction_P Parameter: Treatment Value: Drought vs. No Drought
aaaccctactctcgaagaaacttgctgtgctcaagcttcttcaatggcggatgatggctccgcctctaatcgaagggacccaataaagtcttcagttggaaatgttgcgggacaaagaagacgaaaacaagctgttacagtggcgaaggaaagaagggaattactggttagggcaaagcggctttgtagggtgggtactaatggcgatgttgaggatgctcttgttgagaatgagatgatggttgatgaagagcagcctatattggaggctcaagccagtaaatctgtggaagagctcaagtccgctgttcaataccagggaaaaggtgcaatgcagaagagggtgactgctcttcgggaactcaggcgtttattatcaaaatctgagttccctcctgttgaagctgcgctccgtgctggtgcaatacctttacttgtgcagtgtctttcatttggctcccccgacgaacagttacttgagtcagcttggtgtcttaccaacattgctgctggaaaacctgaagaaacaaaagctctattacctgcattgccgttactcattgctcaccttggagaaaagagctccgcaccggtggctgagcagtgcgcatgggcaattggtaatgttgccggtgaaggagaagatttgagaaatgttcttttgtctcaaggggctttgccacctctagcacgtatgatttttcccgacaagggttcaacagtgagaacagctgcatgggcattgtcaaatctgattaagggacctgagtcaaaggcagcagcacaacttgttaaaattgatgggatactggatgcaattcttcgacacttgaagaaaacggatgaggaaactgccacggaaattgcatggatcattgtttacctatctgccctctcagatatcgctacaagtatgctcttgaagggaggcattcttcaactacttattgacagattagcaacctcaagtagcctacaacttctcatcccgtgcttaagaagcgagcaccgtgttttaaagaaggaagctgcttgggtgctatctaatatagcggcgggatctattgaacacaagagaatgatacattctactgaagtaatgccattgttgctacggattctttccacatccccctttgatataaggaaagaagttgcctatgtcttgggaaatctctgtgtagaatctgcagaaggagacagaaaaccaaggataattcaagagcatttagtctctattgtcagtggcggttgcctccggggtttcattgagctggtcagatctcctgatatcgaagctgctaggcttggtcttcagttcattgagctggttttaagaggaatgccaaacggggaagggccaaagcttgtggaaggagaagacggtatcgatgcaatggaacggtttcagtttcatgagaacgaagagctgagagtcatggcgaacagtcttgtggataaatactttggtgaagattatggaatcgatgaatga

SEQ ID NO: 48545 - protein, 497 aa, Arabidopsis thaliana
  peptide (1)..(497): Ceres Seq. ID no. 12575220
  misc_feature (129)..(170): Pfam Name: Armadillo/beta-catenin-like repeat Pfam Description: Armadillo/beta-catenin-like repeat
  misc_feature (98)..(398): Homolog of NCBI NO: 38493061 NR Description: Chain A, Crystal Structure Of Yeast Karyopherin
  misc_feature (97)..(398): Homolog of NCBI NO: 7546354 NR Description: Chain A, Yeast Karyopherin (Importin) Alpha In A
  misc_feature (97)..(398): Homolog of NCBI NO: 7546348 NR Description: Chain A, Crystal Structure Of Yeast Karyopherin
  misc_feature (38)..(398): Homolog of NCBI NO: 6324140 NR Description: karyopherin alpha homolog of 60 kDa; Srp1p
  misc_feature (10)..(497): Homolog of NCBI NO: 34879336 NR Description: similar to karyopherin (importin) alpha 2 [Rattus
  misc_feature (79)..(497): Homolog of NCBI NO: 7489596 NR Description: SRP1 protein homolog - rice
  misc_feature (79)..(497): Homolog of NCBI NO: 34895988 NR Description: putative importin alpha [Oryza sativa (japonica
  misc_feature (10)..(398): Homolog of NCBI NO: 34895988 NR Description: putative importin alpha [Oryza sativa (japonica
  misc_feature (10)..(398): Homolog of NCBI NO: 7489596 NR Description: SRP1 protein homolog - rice
  misc_feature (15)..(497): Homolog of NCBI NO: 15242618 NR Description: importin alpha - like protein; protein id:
NPTLEETCCAQASSMADDGSASNRRDPIKSSVGNVAGQRRRKQAVTVAKERRELLVRAKRLCRVGTNGDVEDALVENEMMVDEEQPILEAQASKSVEELKSAVQYQGKGAMQKRVTALRELRRLLSKSEFPPVEAALRAGAIPLLVQCLSFGSPDEQLLESAWCLTNIAAGKPEETKALLPALPLLIAHLGEKSSAPVAEQCAWAIGNVAGEGEDLRNVLLSQGALPPLARMIFPDKGSTVRTAAWALSNLIKGPESKAAAQLVKIDGILDAILRHLKKTDEETATEIAWIIVYLSALSDIATSMLLKGGILQLLIDRLATSSSLQLLIPCLRSEHRVLKKEAAWVLSNIAAGSIEHKRMIHSTEVMPLLLRILSTSPFDIRKEVAYVLGNLCVESAEGDRKPRIIQEHLVSIVSGGCLRGFIELVRSPDIEAARLGLQFIELVLRGMPNGEGPKLVEGEDGIDAMERFQFHENEELRVMANSLVDKYFGEDYGIDE

SEQ ID NO: 48546 - protein, 483 aa, Arabidopsis thaliana
  peptide (1)..(483): Ceres Seq. ID no. 12575221
  misc_feature (115)..(156): Pfam Name: Armadillo/beta-catenin-like repeat Pfam Description: Armadillo/beta-catenin-like repeat
  misc_feature (84)..(384): Homolog of NCBI NO: 38493061 NR Description: Chain A, Crystal Structure Of Yeast Karyopherin
  misc_feature (83)..(384): Homolog of NCBI NO: 7546354 NR Description: Chain A, Yeast Karyopherin (Importin) Alpha In A
  misc_feature (83)..(384): Homolog of NCBI NO: 7546348 NR Description: Chain A, Crystal Structure Of Yeast Karyopherin
  misc_feature (24)..(384): Homolog of NCBI NO: 6324140 NR Description: karyopherin alpha homolog of 60 kDa; Srp1p
  misc_feature (1)..(483): Homolog of NCBI NO: 34879336 NR Description: similar to karyopherin (importin) alpha 2 [Rattus
  misc_feature (65)..(483): Homolog of NCBI NO: 7489596 NR Description: SRP1 protein homolog - rice
  misc_feature (65)..(483): Homolog of NCBI NO: 34895988 NR Description: putative importin alpha [Oryza sativa (japonica
  misc_feature (1)..(384): Homolog of NCBI NO: 34895988 NR Description: putative importin alpha [Oryza sativa (japonica
  misc_feature (1)..(384): Homolog of NCBI NO: 7489596 NR Description: SRP1 protein homolog - rice
  misc_feature (1)..(483): Homolog of NCBI NO: 15242618 NR Description: importin alpha - like protein; protein id:
MADDGSASNRRDPIKSSVGNVAGQRRRKQAVTVAKERRELLVRAKRLCRVGTNGDVEDALVENEMMVDEEQPILEAQASKSVEELKSAVQYQGKGAMQKRVTALRELRRLLSKSEFPPVEAALRAGAIPLLVQCLSFGSPDEQLLESAWCLTNIAAGKPEETKALLPALPLLIAHLGEKSSAPVAEQCAWAIGNVAGEGEDLRNVLLSQGALPPLARMIFPDKGSTVRTAAWALSNLIKGPESKAAAQLVKIDGILDAILRHLKKTDEETATEIAWIIVYLSALSDIATSMLLKGGILQLLIDRLATSSSLQLLIPCLRSEHRVLKKEAAWVLSNIAAGSIEHKRMIHSTEVMPLLLRILSTSPFDIRKEVAYVLGNLCVESAEGDRKPRIIQEHLVSIVSGGCLRGFIELVRSPDIEAARLGLQFIELVLRGMPNGEGPKLVEGEDGIDAMERFQFHENEELRVMANSLVDKYFGEDYGIDE

SEQ ID NO: 48547 - protein, 419 aa, Arabidopsis thaliana
  peptide (1)..(419): Ceres Seq. ID no. 12575222
  misc_feature (51)..(92): Pfam Name: Armadillo/beta-catenin-like repeat Pfam Description: Armadillo/beta-catenin-like repeat
  misc_feature (20)..(320): Homolog of NCBI NO: 38493061 NR Description: Chain A, Crystal Structure Of Yeast Karyopherin
  misc_feature (19)..(320): Homolog of NCBI NO: 7546354 NR Description: Chain A, Yeast Karyopherin (Importin) Alpha In A
  misc_feature (19)..(320): Homolog of NCBI NO: 7546348 NR Description: Chain A, Crystal Structure Of Yeast Karyopherin
  misc_feature (1)..(320): Homolog of NCBI NO: 6324140 NR Description: karyopherin alpha homolog of 60 kDa; Srp1p
  misc_feature (1)..(419): Homolog of NCBI NO: 34879336 NR Description: similar to karyopherin (importin) alpha 2 [Rattus
  misc_feature (1)..(419): Homolog of NCBI NO: 7489596 NR Description: SRP1 protein homolog - rice
  misc_feature (1)..(419): Homolog of NCBI NO: 34895988 NR Description: putative importin alpha [Oryza sativa (japonica
  misc_feature (1)..(320): Homolog of NCBI NO: 34895988 NR Description: putative importin alpha [Oryza sativa (japonica
  misc_feature (1)..(320): Homolog of NCBI NO: 7489596 NR Description: SRP1 protein homolog - rice
  misc_feature (1)..(419): Homolog of NCBI NO: 15242618 NR Description: importin alpha - like protein; protein id:
MMVDEEQPILEAQASKSVEELKSAVQYQGKGAMQKRVTALRELRRLLSKSEFPPVEAALRAGAIPLLVQCLSFGSPDEQLLESAWCLTNIAAGKPEETKALLPALPLLIAHLGEKSSAPVAEQCAWAIGNVAGEGEDLRNVLLSQGALPPLARMIFPDKGSTVRTAAWALSNLIKGPESKAAAQLVKIDGILDAILRHLKKTDEETATEIAWIIVYLSALSDIATSMLLKGGILQLLIDRLATSSSLQLLIPCLRSEHRVLKKEAAWVLSNIAAGSIEHKRMIHSTEVMPLLLRILSTSPFDIRKEVAYVLGNLCVESAEGDRKPRIIQEHLVSIVSGGCLRGFIELVRSPDIEAARLGLQFIELVLRGMPNGEGPKLVEGEDGIDAMERFQFHENEELRVMANSLVDKYFGEDYGIDE

SEQ ID NO: 48548 - DNA, 1598 bp, Arabidopsis thaliana
  misc_feature (1)..(1598): Ceres Seq. ID no. 12575223
  misc_feature: MA Experiment ID: 20000794 Result: Up-regulated in Transcription
  misc_feature: MA Experiment 20000794 PARAMETER Experiment Name: At_Petals_P Parameter: Age (day) Value: 23-25 days
  misc_feature: MA Experiment 20000794 PARAMETER Experiment Name: At_Petals_P Parameter: Plant Line Value: WS
  misc_feature: MA Experiment 20000794 PARAMETER Experiment Name: At_Petals_P Parameter: Tissue Value: Petals vs. Whole plant
  misc_feature: MA Experiment ID: 20001248 Result: Up-regulated in Transcription
  misc_feature: MA Experiment 20001248 PARAMETER Experiment Name: At_Far-red-induction_P Parameter: Age (day) Value: 7
  misc_feature: MA Experiment 20001248 PARAMETER Experiment Name: At_Far-red-induction_P Parameter: Light Value: Far-red vs. White
  misc_feature: MA Experiment 20001248 PARAMETER Experiment Name: At_Far-red-induction_P Parameter: Organism Value: A. thaliana
  misc_feature: MA Experiment 20001248 PARAMETER Experiment Name: At_Far-red-induction_P Parameter: Plant Line Value: Columbia
  misc_feature: MA Experiment 20001248 PARAMETER Experiment Name: At_Far-red-induction_P Parameter: Timepoint (hr) Value: 4
  misc_feature: MA Experiment 20001248 PARAMETER Experiment Name: At_Far-red-induction_P Parameter: Tissue Value: Whole Plant
  misc_feature: MA Experiment ID: 20001451 Result: Up-regulated in Transcription
  misc_feature: MA Experiment 20001451 PARAMETER Experiment Name: At_Far-red-induction_P Parameter: Age (day) Value: 7
  misc_feature: MA Experiment 20001451 PARAMETER Experiment Name: At_Far-red-induction_P Parameter: Light Value: Far-red vs. White
  misc_feature: MA Experiment 20001451 PARAMETER Experiment Name: At_Far-red-induction_P Parameter: Organism Value: A. thaliana
  misc_feature: MA Experiment 20001451 PARAMETER Experiment Name: At_Far-red-induction_P Parameter: Plant Line Value: Columbia
  misc_feature: MA Experiment 20001451 PARAMETER Experiment Name: At_Far-red-induction_P Parameter: Timepoint (hr) Value: 24
  misc_feature: MA Experiment 20001451 PARAMETER Experiment Name: At_Far-red-induction_P Parameter: Tissue Value: Whole Plant
  misc_feature: MA Experiment ID: 20001911 Result: Up-regulated in Transcription
  misc_feature: MA Experiment 20001911 PARAMETER Experiment Name: At_Drought_Reproduction_P Parameter: Age (day) Value: 40
  misc_feature: MA Experiment 20001911 PARAMETER Experiment Name: At_Drought_Reproduction_P Parameter: Organism Value: A. thaliana
  misc_feature: MA Experiment 20001911 PARAMETER Experiment Name: At_Drought_Reproduction_P Parameter: Plant Line Value: WS
  misc_feature: MA Experiment 20001911 PARAMETER Experiment Name: At_Drought_Reproduction_P Parameter: Timepoint (day) Value: 10
  misc_feature: MA Experiment 20001911 PARAMETER Experiment Name: At_Drought_Reproduction_P Parameter: Tissue Value: Flowers
  misc_feature: MA Experiment 20001911 PARAMETER Experiment Name: At_Drought_Reproduction_P Parameter: Treatment Value: Drought vs. No Drought
ggttttctgctttcttaggtactcagtgcaggtttctctgctccaactccaattcaagctcagtcatggcccattgcgatgcaaggtagggacatagtagccattgctaaaactggctcgggaaaaactttgggttacttgattcctggatttttgcatcttcaacgtatccgaaatgattcgcgaatgggcccaacaatcttggtattgtctccaacgagagagctggccacacaaatccaagaagaagctgttaaatttgggaggtcatcaagaatttcgtgtacgtgtttgtatggtggtgcaccaaagggccctcagttgagggatttagaaagaggagcagatatcgtggttgcaactcctgggagattgaatgatatccttgaaatgaggaggattagtctgcgtcagatatcttatcttgtgctagatgaggcagatagaatgttggacatgggttttgaacctcagataaggaagattgtgaaagaaattcccactaagcgtcaaacccttatgtacacagctacatggccaaagggagttaggaaaattgcagctgacttgcttgttaaccctgctcaagtcaacattggcaatgttgacgagcttgtggctaacaagtcaatcacacagcatattgaagtggtagcaccaatggagaaacagaggaggttagagcagatcttgcggtctcaggaaccaggctcaaaggtgataatattctgctcaaccaaaaggatgtgtgatcaactaacacgcaatctaacccgccaatttggagctgctgctatacatggagacaagtcccagcctgagagagacaatgttcttaatcaattccgcagtggcagaactccggttcttgtagcaaccgatgttgctgctcgtggtctggacgttaaggacatcagggcggtcgtaaactatgatttccccaatggagtggaagactatgttcatagaatcggaagaacaggaagagctggagcgactggtcaggcattcacattctttggtgatcaagattcgaaacatgcttcggatctgatcaagattttggaaggagcaaaccagcgagttcctcctcagatccgcgaaatggctacacgtggtggtgggggaatgaacaaattcagtcgttggggacctccttccggcggccgtggtcgtggtggcgactctggttatggtggcagaggtagctttgcttcccgtgacagaagcagcaatggatggggaagagagcgagaaaggagccgtagccctgagagattcaacagagctccaccaccgtcttccaccggatctcctcctcgcagcttccacgagacgatgatgatgaaacacagatgaaaagagagatacaaagctctgataaagccaagtgacagaagattgtgttgtgggggatttcccttatcattgtgacattatatattttttggccgatgaagaaacaaaagaaaaaaaaacaagaccaagaagactgttccctcccattggaaatttacgctcaaaactacaattgatatcttacagtttgtatttcatcttatttattattgcagctcagagattggtaagaatgtttc

SEQ ID NO: 48549 - protein, 426 aa, Arabidopsis thaliana
  peptide (1)..(426): Ceres Seq. ID no. 12575224
  misc_feature (1)..(188): Pfam Name: DEAD/DEAH box helicase Pfam Description: DEAD/DEAH box helicase
  misc_feature (1)..(387): Homolog of NCBI NO: 15230730 NR Description: putative RNA helicase; protein id: At3g06480.1
  misc_feature (1)..(426): Homolog of NCBI NO: 34913856 NR Description: putative RNA helicase, DRH1
  misc_feature (1)..(391): Homolog of NCBI NO: 15528719 NR Description: putative RNA helicase, DRH1
  misc_feature (1)..(426): Homolog of NCBI NO: 6137207 NR Description: P72 DEAD box protein [Pisum sativum]
  misc_feature (1)..(398): Homolog of NCBI NO: 1169228 NR Description: RNA helicase-like protein DB10
  misc_feature (1)..(412): Homolog of NCBI NO: 15241445 NR Description: DRH1 DEAD box protein - like; protein id:
  misc_feature (4)..(426): Homolog of NCBI NO: 23397305 NR Description: putative RNA helicase, DRH1 [Arabidopsis thaliana]
  misc_feature (1)..(426): Homolog of NCBI NO: 17065030 NR Description: RNA helicase, DRH1 [Arabidopsis thaliana]
  misc_feature (1)..(426): Homolog of NCBI NO: 30678365 NR Description: DEAD box RNA helicase (DRH1) [Arabidopsis
  misc_feature (1)..(426): Homolog of NCBI NO: 18395852 NR Description: RNA helicase, DRH1
MQGRDIVAIAKTGSGKTLGYLIPGFLHLQRIRNDSRMGPTILVLSPTRELATQIQEEAVKFGRSSRISCTCLYGGAPKGPQLRDLERGADIVVATPGRLNDILEMRRISLRQISYLVLDEADRMLDMGFEPQIRKIVKEIPTKRQTLMYTATWPKGVRKIAADLLVNPAQVNIGNVDELVANKSITQHIEVVAPMEKQRRLEQILRSQEPGSKVIIFCSTKRMCDQLTRNLTRQFGAAAIHGDKSQPERDNVLNQFRSGRTPVLVATDVAARGLDVKDIRAVVNYDFPNGVEDYVHRIGRTGRAGATGQAFTFFGDQDSKHASDLIKILEGANQRVPPQIREMATRGGGGMNKFSRWGPPSGGRGRGGDSGYGGRGSFASRDRSSNGWGRERERSRSPERFNRAPPPSSTGSPPRSFHETMMMKHR

SEQ ID NO: 48550 - protein, 390 aa, Arabidopsis thaliana
  peptide (1)..(390): Ceres Seq. ID no. 12575225
  misc_feature (1)..(152): Pfam Name: DEAD/DEAH box helicase Pfam Description: DEAD/DEAH box helicase
  misc_feature (1)..(351): Homolog of NCBI NO: 15230730 NR Description: putative RNA helicase; protein id: At3g06480.1
  misc_feature (1)..(390): Homolog of NCBI NO: 34913856 NR Description: putative RNA helicase, DRH1
  misc_feature (1)..(355): Homolog of NCBI NO: 15528719 NR Description: putative RNA helicase, DRH1
  misc_feature (1)..(390): Homolog of NCBI NO: 6137207 NR Description: P72 DEAD box protein [Pisum sativum]
  misc_feature (1)..(362): Homolog of NCBI NO: 1169228 NR Description: RNA helicase-like protein DB10
  misc_feature (1)..(376): Homolog of NCBI NO: 15241445 NR Description: DRH1 DEAD box protein - like; protein id:
  misc_feature (1)..(390): Homolog of NCBI NO: 23397305 NR Description: putative RNA helicase, DRH1 [Arabidopsis thaliana]
  misc_feature (1)..(390): Homolog of NCBI NO: 17065030 NR Description: RNA helicase, DRH1 [Arabidopsis thaliana]
  misc_feature (1)..(390): Homolog of NCBI NO: 30678365 NR Description: DEAD box RNA helicase (DRH1) [Arabidopsis
  misc_feature (1)..(390): Homolog of NCBI NO: 18395852 NR Description: RNA helicase, DRH1
MGPTILVLSPTRELATQIQEEAVKFGRSSRISCTCLYGGAPKGPQLRDLERGADIVVATPGRLNDILEMRRISLRQISYLVLDEADRMLDMGFEPQIRKIVKEIPTKRQTLMYTATWPKGVRKIAADLLVNPAQVNIGNVDELVANKSITQHIEVVAPMEKQRRLEQILRSQEPGSKVIIFCSTKRMCDQLTRNLTRQFGAAAIHGDKSQPERDNVLNQFRSGRTPVLVATDVAARGLDVKDIRAVVNYDFPNGVEDYVHRIGRTGRAGATGQAFTFFGDQDSKHASDLIKILEGANQRVPPQIREMATRGGGGMNKFSRWGPPSGGRGRGGDSGYGGRGSFASRDRSSNGWGRERERSRSPERFNRAPPPSSTGSPPRSFHETMMMKHR

SEQ ID NO: 48551 - protein, 322 aa, Arabidopsis thaliana
  peptide (1)..(322): Ceres Seq. ID no. 12575226
  misc_feature (1)..(84): Pfam Name: DEAD/DEAH box helicase Pfam Description: DEAD/DEAH box helicase
  misc_feature (1)..(283): Homolog of NCBI NO: 15230730 NR Description: putative RNA helicase; protein id: At3g06480.1
  misc_feature (1)..(322): Homolog of NCBI NO: 34913856 NR Description: putative RNA helicase, DRH1
  misc_feature (1)..(287): Homolog of NCBI NO: 15528719 NR Description: putative RNA helicase, DRH1
  misc_feature (1)..(322): Homolog of NCBI NO: 6137207 NR Description: P72 DEAD box protein [Pisum sativum]
  misc_feature (1)..(294): Homolog of NCBI NO: 1169228 NR Description: RNA helicase-like protein DB10
  misc_feature (1)..(308): Homolog of NCBI NO: 15241445 NR Description: DRH1 DEAD box protein - like; protein id:
  misc_feature (1)..(322): Homolog of NCBI NO: 23397305 NR Description: putative RNA helicase, DRH1 [Arabidopsis thaliana]
  misc_feature (1)..(322): Homolog of NCBI NO: 17065030 NR Description: RNA helicase, DRH1 [Arabidopsis thaliana]
  misc_feature (1)..(322): Homolog of NCBI NO: 30678365 NR Description: DEAD box RNA helicase (DRH1) [Arabidopsis
  misc_feature (1)..(322): Homolog of NCBI NO: 18395852 NR Description: RNA helicase, DRH1
MRRISLRQISYLVLDEADRMLDMGFEPQIRKIVKEIPTKRQTLMYTATWPKGVRKIAADLLVNPAQVNIGNVDELVANKSITQHIEVVAPMEKQRRLEQILRSQEPGSKVIIFCSTKRMCDQLTRNLTRQFGAAAIHGDKSQPERDNVLNQFRSGRTPVLVATDVAARGLDVKDIRAVVNYDFPNGVEDYVHRIGRTGRAGATGQAFTFFGDQDSKHASDLIKILEGANQRVPPQIREMATRGGGGMNKFSRWGPPSGGRGRGGDSGYGGRGSFASRDRSSNGWGRERERSRSPERFNRAPPPSSTGSPPRSFHETMMMKHR

SEQ ID NO: 48552 - DNA, 1763 bp, Arabidopsis thaliana
  misc_feature (1)..(1763): Ceres Seq. ID no. 12575385
  misc_feature: MA Experiment ID: 108488 Result: Down-regulated in Transcription
  misc_feature: MA Experiment ID: 108573 Result: Down-regulated in Transcription
  misc_feature: MA Experiment 108573 PARAMETER Experiment Name: At_Drought_cDNA_P Parameter: Timepoint (hr) Value: 6
  misc_feature: MA Experiment 108573 PARAMETER Experiment Name: At_Drought_cDNA_P Parameter: Tissue Value: Aerial
  misc_feature: MA Experiment 108573 PARAMETER Experiment Name: At_Drought_cDNA_P Parameter: Treatment Value: Drought vs. No Drought
  misc_feature: MA Experiment ID: 20000071 Result: Up-regulated in Transcription
  misc_feature: MA Experiment 20000071 PARAMETER Experiment Name: At_100uM_ABA_Mutants_cDNA_P Parameter: Plant Line Value: CS8104
  misc_feature: MA Experiment 20000071 PARAMETER Experiment Name: At_100uM_ABA_Mutants_cDNA_P Parameter: Timepoint (hr) Value: 6
  misc_feature: MA Experiment 20000071 PARAMETER Experiment Name: At_100uM_ABA_Mutants_cDNA_P Parameter: Tissue Value: Aerial
  misc_feature: MA Experiment 20000071 PARAMETER Experiment Name: At_100uM_ABA_Mutants_cDNA_P Parameter: Treatment Value: 100uM ABA vs. No Treatment
  misc_feature: MA Experiment ID: 20000171 Result: Down-regulated in Transcription
  misc_feature: MA Experiment 20000171 PARAMETER Experiment Name: At_42deg_Heat_P Parameter: Age (day) Value: 14
  misc_feature: MA Experiment 20000171 PARAMETER Experiment Name: At_42deg_Heat_P Parameter: Organism Value: A. thaliana
  misc_feature: MA Experiment 20000171 PARAMETER Experiment Name: At_42deg_Heat_P Parameter: Plant Line Value: WS
  misc_feature: MA Experiment 20000171 PARAMETER Experiment Name: At_42deg_Heat_P Parameter: Temperature (deg C) Value: 42 vs. 22
  misc_feature: MA Experiment 20000171 PARAMETER Experiment Name: At_42deg_Heat_P Parameter: Timepoint (hr) Value: 1
  misc_feature: MA Experiment 20000171 PARAMETER Experiment Name: At_42deg_Heat_P Parameter: Tissue Value: Aerial
  misc_feature: MA Experiment ID: 20000173 Result: Down-regulated in Transcription
  misc_feature: MA Experiment 20000173 PARAMETER Experiment Name: At_42deg_Heat_P Parameter: Age (day) Value: 14
  misc_feature: MA Experiment 20000173 PARAMETER Experiment Name: At_42deg_Heat_P Parameter: Organism Value: A. thaliana
  misc_feature: MA Experiment 20000173 PARAMETER Experiment Name: At_42deg_Heat_P Parameter: Plant Line Value: WS
  misc_feature: MA Experiment 20000173 PARAMETER Experiment Name: At_42deg_Heat_P Parameter: Temperature (deg C) Value: 42 vs. 22
  misc_feature: MA Experiment 20000173 PARAMETER Experiment Name: At_42deg_Heat_P Parameter: Timepoint (hr) Value: 6
  misc_feature: MA Experiment 20000173 PARAMETER Experiment Name: At_42deg_Heat_P Parameter: Tissue Value: Aerial
  misc_feature: MA Experiment ID: 20000180 Result: Up-regulated in Transcription
  misc_feature: MA Experiment 20000180 PARAMETER Experiment Name: At_Germinating_Seeds_P Parameter: Age (hr) Value: 24 vs. 0
  misc_feature: MA Experiment 20000180 PARAMETER Experiment Name: At_Germinating_Seeds_P Parameter: Tissue Value: Germinating Seeds
  misc_feature: MA Experiment ID: 20000182 Result: Down-regulated in Transcription
  misc_feature: MA Experiment 20000182 PARAMETER Experiment Name: At_2mM_SA_P Parameter: Age (day) Value: 14
  misc_feature: MA Experiment 20000182 PARAMETER Experiment Name: At_2mM_SA_P Parameter: Organism Value: A. thaliana
  misc_feature: MA Experiment 20000182 PARAMETER Experiment Name: At_2mM_SA_P Parameter: Plant Line Value: WS
  misc_feature: MA Experiment 20000182 PARAMETER Experiment Name: At_2mM_SA_P Parameter: Timepoint (hr) Value: 6
  misc_feature: MA Experiment 20000182 PARAMETER Experiment Name: At_2mM_SA_P Parameter: Tissue Value: Aerial
  misc_feature: MA Experiment 20000182 PARAMETER Experiment Name: At_2mM_SA_P Parameter: Treatment Value: 2mM SA vs. No Treatment
  misc_feature: MA Experiment ID: 20000184 Result: Up-regulated in Transcription
  misc_feature: MA Experiment 20000184 PARAMETER Experiment Name: At_Shoots__P Parameter: Age (day) Value: 7
  misc_feature: MA Experiment 20000184 PARAMETER Experiment Name: At_Shoots__P Parameter: Tissue Value: Shoots vs. Whole Plant
  misc_feature: MA Experiment ID: 20000214 Result: Down-regulated in Transcription
  misc_feature: MA Experiment 20000214 PARAMETER Experiment Name: At_4deg_Cold_P Parameter: Timepoint (hr) Value: 6
  misc_feature: MA Experiment ID: 20000227 Result: Up-regulated in Transcription
  misc_feature: MA Experiment 20000227 PARAMETER Experiment Name: At_Root-Tips-vs-Tops_P Parameter: Tissue Value: Root Tips vs. Root Tops
  misc_feature: MA Experiment ID: 20000436 Result: Down-regulated in Transcription
  misc_feature: MA Experiment 20000436 PARAMETER Experiment Name: At_Drought_P Parameter: Age (day) Value: 7
  misc_feature: MA Experiment 20000436 PARAMETER Experiment Name: At_Drought_P Parameter: Organism Value: A. thaliana
  misc_feature: MA Experiment 20000436 PARAMETER Experiment Name: At_Drought_P Parameter: Plant Line Value: WS
  misc_feature: MA Experiment 20000436 PARAMETER Experiment Name: At_Drought_P Parameter: Timepoint (hr) Value: 12
  misc_feature: MA Experiment 20000436 PARAMETER Experiment Name: At_Drought_P Parameter: Tissue Value: Whole Plant
  misc_feature: MA Experiment 20000436 PARAMETER Experiment Name: At_Drought_P Parameter: Treatment Value: Drought vs. No Drought
  misc_feature: MA Experiment ID: 20000437 Result: Down-regulated in Transcription
  misc_feature: MA Experiment 20000437 PARAMETER Experiment Name: At_Drought_P Parameter: Age (day) Value: 8
  misc_feature: MA Experiment 20000437 PARAMETER Experiment Name: At_Drought_P Parameter: Organism Value: A. thaliana
  misc_feature: MA Experiment 20000437 PARAMETER Experiment Name: At_Drought_P Parameter: Plant Line Value: WS
  misc_feature: MA Experiment 20000437 PARAMETER Experiment Name: At_Drought_P Parameter: Timepoint (hr) Value: 24
  misc_feature: MA Experiment 20000437 PARAMETER Experiment Name: At_Drought_P Parameter: Tissue Value: Whole Plant
  misc_feature: MA Experiment 20000437 PARAMETER Experiment Name: At_Drought_P Parameter: Treatment Value: Drought vs. No Drought
  misc_feature: MA Experiment ID: 20000438 Result: Up-regulated in Transcription
  misc_feature: MA Experiment 20000438 PARAMETER Experiment Name: At_Shoots__P Parameter: Age (day) Value: 14
  misc_feature: MA Experiment 20000438 PARAMETER Experiment Name: At_Shoots__P Parameter: Tissue Value: Shoots vs. Whole Plant
  misc_feature: MA Experiment ID: 20000794 Result: Down-regulated in Transcription
  misc_feature: MA Experiment 20000794 PARAMETER Experiment Name: At_Petals_P Parameter: Age (day) Value: 23-25 days
  misc_feature: MA Experiment 20000794 PARAMETER Experiment Name: At_Petals_P Parameter: Plant Line Value: WS
  misc_feature: MA Experiment 20000794 PARAMETER Experiment Name: At_Petals_P Parameter: Tissue Value: Petals vs. Whole plant
  misc_feature: MA Experiment ID: 20001554 Result: Down-regulated in Transcription
  misc_feature: MA Experiment 20001554 PARAMETER Experiment Name: At_Drought_Soil_Dry_P Parameter: Age (day) Value: 21
  misc_feature: MA Experiment 20001554 PARAMETER Experiment Name: At_Drought_Soil_Dry_P Parameter: Organism Value: A. thaliana
  misc_feature: MA Experiment 20001554 PARAMETER Experiment Name: At_Drought_Soil_Dry_P Parameter: Plant Line Value: WS
  misc_feature: MA Experiment 20001554 PARAMETER Experiment Name: At_Drought_Soil_Dry_P Parameter: Post Timepoint (hr) Value: None
  misc_feature: MA Experiment 20001554 PARAMETER Experiment Name: At_Drought_Soil_Dry_P Parameter: Post-Treatment Value: None
  misc_feature: MA Experiment 20001554 PARAMETER Experiment Name: At_Drought_Soil_Dry_P Parameter: Timepoint (day) Value: 7
  misc_feature: MA Experiment 20001554 PARAMETER Experiment Name: At_Drought_Soil_Dry_P Parameter: Treatment Value: Drought vs. No Drought
  misc_feature: MA Experiment ID: 20001555 Result: Down-regulated in Transcription
  misc_feature: MA Experiment 20001555 PARAMETER Experiment Name: At_Drought_Soil_Dry_P Parameter: Age (day) Value: 24
  misc_feature: MA Experiment 20001555 PARAMETER Experiment Name: At_Drought_Soil_Dry_P Parameter: Organism Value: A. thaliana
  misc_feature: MA Experiment 20001555 PARAMETER Experiment Name: At_Drought_Soil_Dry_P Parameter: Plant Line Value: WS
  misc_feature: MA Experiment 20001555 PARAMETER Experiment Name: At_Drought_Soil_Dry_P Parameter: Post Timepoint (hr) Value: None
  misc_feature: MA Experiment 20001555 PARAMETER Experiment Name: At_Drought_Soil_Dry_P Parameter: Post-Treatment Value: None
  misc_feature: MA Experiment 20001555 PARAMETER Experiment Name: At_Drought_Soil_Dry_P Parameter: Timepoint (day) Value: 10
  misc_feature: MA Experiment 20001555 PARAMETER Experiment Name: At_Drought_Soil_Dry_P Parameter: Treatment Value: Drought vs. No Drought
  misc_feature: MA Experiment ID: 20001556 Result: Down-regulated in Transcription
  misc_feature: MA Experiment 20001556 PARAMETER Experiment Name: At_Drought_Soil_Dry_P Parameter: Age (day) Value: 26
  misc_feature: MA Experiment 20001556 PARAMETER Experiment Name: At_Drought_Soil_Dry_P Parameter: Organism Value: A. thaliana
  misc_feature: MA Experiment 20001556 PARAMETER Experiment Name: At_Drought_Soil_Dry_P Parameter: Plant Line Value: WS
  misc_feature: MA Experiment 20001556 PARAMETER Experiment Name: At_Drought_Soil_Dry_P Parameter: Post Timepoint (hr) Value: None
  misc_feature: MA Experiment 20001556 PARAMETER Experiment Name: At_Drought_Soil_Dry_P Parameter: Post-Treatment Value: None
  misc_feature: MA Experiment 20001556 PARAMETER Experiment Name: At_Drought_Soil_Dry_P Parameter: Timepoint (day) Value: 12
  misc_feature: MA Experiment 20001556 PARAMETER Experiment Name: At_Drought_Soil_Dry_P Parameter: Treatment Value: Drought vs. No Drought
  misc_feature: MA Experiment ID: 20001558 Result: Up-regulated in Transcription
  misc_feature: MA Experiment 20001558 PARAMETER Experiment Name: At_Drought_Soil_Dry_P Parameter: Age (day) Value: 27
  misc_feature: MA Experiment 20001558 PARAMETER Experiment Name: At_Drought_Soil_Dry_P Parameter: Organism Value: A. thaliana
  misc_feature: MA Experiment 20001558 PARAMETER Experiment Name: At_Drought_Soil_Dry_P Parameter: Plant Line Value: WS
  misc_feature: MA Experiment 20001558 PARAMETER Experiment Name: At_Drought_Soil_Dry_P Parameter: Post Timepoint (hr) Value: 6
  misc_feature: MA Experiment 20001558 PARAMETER Experiment Name: At_Drought_Soil_Dry_P Parameter: Post-Treatment Value: Re-Water vs. No Drought
  misc_feature: MA Experiment 20001558 PARAMETER Experiment Name: At_Drought_Soil_Dry_P Parameter: Timepoint (day) Value: 13
  misc_feature: MA Experiment 20001558 PARAMETER Experiment Name: At_Drought_Soil_Dry_P Parameter: Treatment Value: Drought vs. No Drought
  misc_feature: MA Experiment ID: 20001559 Result: Down-regulated in Transcription
  misc_feature: MA Experiment 20001559 PARAMETER Experiment Name: At_Drought_Soil_Dry_P Parameter: Age (day) Value: 28
  misc_feature: MA Experiment 20001559 PARAMETER Experiment Name: At_Drought_Soil_Dry_P Parameter: Organism Value: A. thaliana
  misc_feature: MA Experiment 20001559 PARAMETER Experiment Name: At_Drought_Soil_Dry_P Parameter: Plant Line Value: WS
  misc_feature: MA Experiment 20001559 PARAMETER Experiment Name: At_Drought_Soil_Dry_P Parameter: Post Timepoint (hr) Value: 29
  misc_feature: MA Experiment 20001559 PARAMETER Experiment Name: At_Drought_Soil_Dry_P Parameter: Post-Treatment Value: Re-Water vs. No Drought
  misc_feature: MA Experiment 20001559 PARAMETER Experiment Name: At_Drought_Soil_Dry_P Parameter: Timepoint (day) Value: 14
  misc_feature: MA Experiment 20001559 PARAMETER Experiment Name: At_Drought_Soil_Dry_P Parameter: Treatment Value: Drought vs. No Drought
  misc_feature: MA Experiment ID: 20001560 Result: Up-regulated in Transcription
  misc_feature: MA Experiment 20001560 PARAMETER Experiment Name: At_Drought_Soil_Dry_P Parameter: Age (day) Value: 28
  misc_feature: MA Experiment 20001560 PARAMETER Experiment Name: At_Drought_Soil_Dry_P Parameter: Organism Value: A. thaliana
  misc_feature: MA Experiment 20001560 PARAMETER Experiment Name: At_Drought_Soil_Dry_P Parameter: Plant Line Value: WS
  misc_feature: MA Experiment 20001560 PARAMETER Experiment Name: At_Drought_Soil_Dry_P Parameter: Post Timepoint (hr) Value: None
  misc_feature: MA Experiment 20001560 PARAMETER Experiment Name: At_Drought_Soil_Dry_P Parameter: Post-Treatment Value: None
  misc_feature: MA Experiment 20001560 PARAMETER Experiment Name: At_Drought_Soil_Dry_P Parameter: Timepoint (day) Value: 14
  misc_feature: MA Experiment 20001560 PARAMETER Experiment Name: At_Drought_Soil_Dry_P Parameter: Treatment Value: Drought vs. No Drought
  misc_feature: MA Experiment ID: 20001904 Result: Down-regulated in Transcription
  misc_feature: MA Experiment 20001904 PARAMETER Experiment Name: At_Drought_Reproduction_P Parameter: Age (day) Value: 37
  misc_feature: MA Experiment 20001904 PARAMETER Experiment Name: At_Drought_Reproduction_P Parameter: Organism Value: A. thaliana
  misc_feature: MA Experiment 20001904 PARAMETER Experiment Name: At_Drought_Reproduction_P Parameter: Plant Line Value: WS
  misc_feature: MA Experiment 20001904 PARAMETER Experiment Name: At_Drought_Reproduction_P Parameter: Timepoint (day) Value: 7
  misc_feature: MA Experiment 20001904 PARAMETER Experiment Name: At_Drought_Reproduction_P Parameter: Tissue Value: Rosettes
  misc_feature: MA Experiment 20001904 PARAMETER Experiment Name: At_Drought_Reproduction_P Parameter: Treatment Value: Drought vs. No Drought
  misc_feature: MA Experiment ID: 20001906 Result: Down-regulated in Transcription
  misc_feature: MA Experiment 20001906 PARAMETER Experiment Name: At_Drought_Reproduction_P Parameter: Age (day) Value: 35
  misc_feature: MA Experiment 20001906 PARAMETER Experiment Name: At_Drought_Reproduction_P Parameter: Organism Value: A. thaliana
  misc_feature: MA Experiment 20001906 PARAMETER Experiment Name: At_Drought_Reproduction_P Parameter: Plant Line Value: WS
  misc_feature: MA Experiment 20001906 PARAMETER Experiment Name: At_Drought_Reproduction_P Parameter: Timepoint (day) Value: 5
  misc_feature: MA Experiment 20001906 PARAMETER Experiment Name: At_Drought_Reproduction_P Parameter: Tissue Value: Siliques
  misc_feature: MA Experiment 20001906 PARAMETER Experiment Name: At_Drought_Reproduction_P Parameter: Treatment Value: Drought vs. No Drought
  misc_feature: MA Experiment ID: 20001911 Result: Down-regulated in Transcription
  misc_feature: MA Experiment 20001911 PARAMETER Experiment Name: At_Drought_Reproduction_P Parameter: Age (day) Value: 40
  misc_feature: MA Experiment 20001911 PARAMETER Experiment Name: At_Drought_Reproduction_P Parameter: Organism Value: A. thaliana
  misc_feature: MA Experiment 20001911 PARAMETER Experiment Name: At_Drought_Reproduction_P Parameter: Plant Line Value: WS
  misc_feature: MA Experiment 20001911 PARAMETER Experiment Name: At_Drought_Reproduction_P Parameter: Timepoint (day) Value: 10
  misc_feature: MA Experiment 20001911 PARAMETER Experiment Name: At_Drought_Reproduction_P Parameter: Tissue Value: Flowers
  misc_feature: MA Experiment 20001911 PARAMETER Experiment Name: At_Drought_Reproduction_P Parameter: Treatment Value: Drought vs. No Drought
gctaggttgtccctttctcggaattgctcttcttcatcgtttctttaactatttacttctctatttttcatcattccgttggatcggattctaaacagtttgacaaacctggatctgtaattctaactcagattcttctgttgtagcaggtggtaacaatcttgatactggcattaaccagtgttattcccatttacgcaaacgttcacggcgccgggaaaatatgcgacgaacttggccggcgatcattgagtacaagaccacacagtgtctccattacagattttggagctgttggagatggcaaaacgctcaacactcttgcgtttcaaaacgccgttttctatcttatgtctttcgccgacaaaggtggggcccagctctatgttccgccgggacattggctcaccgggagttttagcctcaccagccacctcactctctttctcgaaaacggcgccgttatagtcgcttctcaggatccatcgcattgggaagtggttgatcctttaccttcatacggaaggggaattgatttgcctgggaagcgatacaagagtttgatcaacggtaacaagctacatgatgttgttgtaacaggtgataatggaactatagatggtcaaggcttggtttggtgggatcggtttacttctcattccttaaagtataaccgtcctcacctcatcgagtttctttcttctgaaaatgtaattgtctccaatcttacgttcttgaatgctcctgcttattcaatctattcaatctactctagccatgtatatattcataagatattggcccattcttctcctaaatctccttatacaatcggtattgtaccagattcttctgattacgtctgcatccaaaactctaccattaacgtggggtatgacgcgatttccctcaaaagcggttgggatgaatatggaattgcctattctcgtcccactgaaaatgttcatataagaaatgtgtaccttcgaggagcttctggttcctctatctcctttggcagtgaaatgtctggtggaatatctgatgtcgtggttgataacgctcatatacactactcgttaaccggcattgcctttagaaccacaaaaggcagaggtggttatatcaaagagatcgatatttcaaacatcgatatgttgagaataggtactgccattgttgctaatggtagctttggatctcaccctgatgataaatatgatgtgaatgctctcccacttgtgagtcacatcagattaagcaacatttctggagagaacattggcattgcggggaaattgtttgggatcaaagaatctccatttagctcagtgactttgtcgaatgtttctttgtcgatgagctcaggttcttctgtttcttggcaatgctcctacgtttacgggtcctcggagtcagtcattcctgaaccgtgtcccgagctgaagagagatgctgatgcttacggtagagctgcagtctagtgaaacagactgcaaaagaaaaaagaaaaaaaaagcaagaaacatttcttgggattctttgataggattcaattcatcaatcatttcatattttgtggagttagagaaggtcagattctttcctcaagtaaaccacattgtctttagatcatacatgttcctttcggttattctggtttcctatttttatgttgtttgcatattctgagataagaaatctgtacaggttcatttcttcattcatgtgtaaacaaagaaattttgtttcagcagttttcc

SEQ ID NO: 48553 - protein, 377 aa, Arabidopsis thaliana
  peptide (1)..(377): Ceres Seq. ID no. 12575386
  misc_feature (6)..(362): Pfam Name: Glycosyl hydrolases family 28 Pfam Description: Glycosyl hydrolases family 28
  misc_feature (1)..(366): Homolog of NCBI NO: 11263971 NR Description: hypothetical protein T17J13.70 - Arabidopsis
  misc_feature (1)..(366): Homolog of NCBI NO: 18412253 NR Description: polygalacturonase, putative
  misc_feature (1)..(368): Homolog of NCBI NO: 40714685 NR Description: putative polygalacturonase
  misc_feature (1)..(365): Homolog of NCBI NO: 21553827 NR Description: polygalacturonase, putative [Arabidopsis thaliana]
  misc_feature (1)..(365): Homolog of NCBI NO: 15228881 NR Description: polygalacturonase, putative
  misc_feature (1)..(365): Homolog of NCBI NO: 7939578 NR Description: polygalacturonase-like protein [Arabidopsis
  misc_feature (1)..(375): Homolog of NCBI NO: 22327662 NR Description: Expressed protein
  misc_feature (1)..(377): Homolog of NCBI NO: 21593399 NR Description: polygalacturonase-like protein [Arabidopsis
  misc_feature (1)..(377): Homolog of NCBI NO: 18397713 NR Description: polygalacturonase, putative
  misc_feature (1)..(377): Homolog of NCBI NO: 30679999 NR Description: polygalacturonase, putative [Arabidopsis
MSFADKGGAQLYVPPGHWLTGSFSLTSHLTLFLENGAVIVASQDPSHWEVVDPLPSYGRGIDLPGKRYKSLINGNKLHDVVVTGDNGTIDGQGLVWWDRFTSHSLKYNRPHLIEFLSSENVIVSNLTFLNAPAYSIYSIYSSHVYIHKILAHSSPKSPYTIGIVPDSSDYVCIQNSTINVGYDAISLKSGWDEYGIAYSRPTENVHIRNVYLRGASGSSISFGSEMSGGISDVVVDNAHIHYSLTGIAFRTTKGRGGYIKEIDISNIDMLRIGTAIVANGSFGSHPDDKYDVNALPLVSHIRLSNISGENIGIAGKLFGIKESPFSSVTLSNVSLSMSSGSSVSWQCSYVYGSSESVIPEPCPELKRDADAYGRAAV

SEQ ID NO: 48554 - DNA, 739 bp, Arabidopsis thaliana
  misc_feature (1)..(739): Ceres Seq. ID no. 14310314
  misc_feature: MA Experiment ID: 20001451 Result: Down-regulated in Transcription
  misc_feature: MA Experiment 20001451 PARAMETER Experiment Name: At_Far-red-induction_P Parameter: Age (day) Value: 7
  misc_feature: MA Experiment 20001451 PARAMETER Experiment Name: At_Far-red-induction_P Parameter: Light Value: Far-red vs. White
  misc_feature: MA Experiment 20001451 PARAMETER Experiment Name: At_Far-red-induction_P Parameter: Organism Value: A. thaliana
  misc_feature: MA Experiment 20001451 PARAMETER Experiment Name: At_Far-red-induction_P Parameter: Plant Line Value: Columbia
  misc_feature: MA Experiment 20001451 PARAMETER Experiment Name: At_Far-red-induction_P Parameter: Timepoint (hr) Value: 24
  misc_feature: MA Experiment 20001451 PARAMETER Experiment Name: At_Far-red-induction_P Parameter: Tissue Value: Whole Plant
tcactagtcccccccccccccccctgccgattcttcgtccccgcggctaaggagtgtaccgtttccggtggtattttccgatcaaaggcgccggcgaagcatggaacctagcaatgtctatgtggagcaggcaaggctcttgcttatggtgcaaaagaaaagggggccaaagttgtaattgctaatcgaacttacgaacgagcactagaactcgcagaagcaataggaggcaaagcgttatctctgacagatttagataactatcacccagaagatggcatggttttggcaaacaccacatctatgggtatgcaaccaaatgttgaggagactccaatttctaaggatgcattgaagcactatgcactggtctttgatgcggtatacactccgagaatcaccagactgttgagggaagcagaagaaagtggagccataactgtctcagggtcagagatgtttgtcaggcaggcttacgagcagtttgagatcttcaccggtttacccgctccaaaggaactctactggcaaataatgtcaaagtactgagacatagcttaagtgtgtgtgtgtgtacttccatgaaaagtcgtcgattcaataaagctttagattgccatttgtatgttccgagaatgtccttttttgaggccataagctgaatgactggttctctctttgtatttatatatatgtataaactattaagcctaacattaatcttttttaagtttctttg

SEQ ID NO: 48555 - protein, 89 aa, Arabidopsis thaliana
  peptide (1)..(89): Ceres Seq. ID no. 14310315
  misc_feature (1)..(75): Pfam Name: Shikimate / quinate 5-dehydrogenase Pfam Description: Shikimate / quinate 5-dehydrogenase
  misc_feature (1)..(81): Homolog of NCBI NO: 21227376 NR Description: Shikimate 5-dehydrogenase [Methanosarcina mazei
  misc_feature (1)..(81): Homolog of NCBI NO: 32474293 NR Description: 3-dehydroquinate dehydratase / shikimate
  misc_feature (1)..(81): Homolog of NCBI NO: 20093378 NR Description: shikimate 5-dehydrogenase [Methanosarcina
  misc_feature (1)..(81): Homolog of NCBI NO: 23051387 NR Description: hypothetical protein [Methanosarcina barkeri]
  misc_feature (1)..(78): Homolog of NCBI NO: 15789636 NR Description: shikimate 5-dehydrogenase; AroE [Halobacterium
  misc_feature (1)..(73): Homolog of NCBI NO: 34914828 NR Description: putative 3-dehydroquinate dehydratase / shikimate
  misc_feature (1)..(89): Homolog of NCBI NO: 34914824 NR Description: putative 3-dehydroquinate dehydratase
  misc_feature (1)..(79): Homolog of NCBI NO: 629688 NR Description: 3-dehydroquinate dehydratase (EC 4.2.1.10) /
  misc_feature (1)..(89): Homolog of NCBI NO: 7436862 NR Description: 3-dehydroquinate dehydratase (EC 4.2.1.10) /
  misc_feature (1)..(89): Homolog of NCBI NO: 15230703 NR Description: dehydroquinate dehydratase/shikimate
MVLANTTSMGMQPNVEETPISKDALKHYALVFDAVYTPRITRLLREAEESGAITVSGSEMFVRQAYEQFEIFTGLPAPKELYWQIMSKY

SEQ ID NO: 48556 - protein, 81 aa, Arabidopsis thaliana
  peptide (1)..(81): Ceres Seq. ID no. 14310316
  misc_feature (1)..(67): Pfam Name: Shikimate / quinate 5-dehydrogenase Pfam Description: Shikimate / quinate 5-dehydrogenase
  misc_feature (1)..(73): Homolog of NCBI NO: 21227376 NR Description: Shikimate 5-dehydrogenase [Methanosarcina mazei
  misc_feature (1)..(73): Homolog of NCBI NO: 32474293 NR Description: 3-dehydroquinate dehydratase / shikimate
  misc_feature (1)..(73): Homolog of NCBI NO: 20093378 NR Description: shikimate 5-dehydrogenase [Methanosarcina
  misc_feature (1)..(73): Homolog of NCBI NO: 23051387 NR Description: hypothetical protein [Methanosarcina barkeri]
  misc_feature (1)..(70): Homolog of NCBI NO: 15789636 NR Description: shikimate 5-dehydrogenase; AroE [Halobacterium
  misc_feature (1)..(65): Homolog of NCBI NO: 34914828 NR Description: putative 3-dehydroquinate dehydratase / shikimate
  misc_feature (1)..(81): Homolog of NCBI NO: 34914824 NR Description: putative 3-dehydroquinate dehydratase
  misc_feature (1)..(71): Homolog of NCBI NO: 629688 NR Description: 3-dehydroquinate dehydratase (EC 4.2.1.10) /
  misc_feature (1)..(81): Homolog of NCBI NO: 7436862 NR Description: 3-dehydroquinate dehydratase (EC 4.2.1.10) /
  misc_feature (1)..(81): Homolog of NCBI NO: 15230703 NR Description: dehydroquinate dehydratase/shikimate
MGMQPNVEETPISKDALKHYALVFDAVYTPRITRLLREAEESGAITVSGSEMFVRQAYEQFEIFTGLPAPKELYWQIMSKY

SEQ ID NO: 48557 - protein, 79 aa, Arabidopsis thaliana
  peptide (1)..(79): Ceres Seq. ID no. 14310317
  misc_feature (1)..(65): Pfam Name: Shikimate / quinate 5-dehydrogenase Pfam Description: Shikimate / quinate 5-dehydrogenase
  misc_feature (1)..(71): Homolog of NCBI NO: 21227376 NR Description: Shikimate 5-dehydrogenase [Methanosarcina mazei
  misc_feature (1)..(71): Homolog of NCBI NO: 32474293 NR Description: 3-dehydroquinate dehydratase / shikimate
  misc_feature (1)..(71): Homolog of NCBI NO: 20093378 NR Description: shikimate 5-dehydrogenase [Methanosarcina
  misc_feature (1)..(71): Homolog of NCBI NO: 23051387 NR Description: hypothetical protein [Methanosarcina barkeri]
  misc_feature (1)..(68): Homolog of NCBI NO: 15789636 NR Description: shikimate 5-dehydrogenase; AroE [Halobacterium
  misc_feature (1)..(63): Homolog of NCBI NO: 34914828 NR Description: putative 3-dehydroquinate dehydratase / shikimate
  misc_feature (1)..(79): Homolog of NCBI NO: 34914824 NR Description: putative 3-dehydroquinate dehydratase
  misc_feature (1)..(69): Homolog of NCBI NO: 629688 NR Description: 3-dehydroquinate dehydratase (EC 4.2.1.10) /
  misc_feature (1)..(79): Homolog of NCBI NO: 7436862 NR Description: 3-dehydroquinate dehydratase (EC 4.2.1.10) /
  misc_feature (1)..(79): Homolog of NCBI NO: 15230703 NR Description: dehydroquinate dehydratase/shikimate
MQPNVEETPISKDALKHYALVFDAVYTPRITRLLREAEESGAITVSGSEMFVRQAYEQFEIFTGLPAPKELYWQIMSKY

SEQ ID NO: 48558 - DNA, 1371 bp, Arabidopsis thaliana
  misc_feature (1)..(1371): Ceres Seq. ID no. 15168697
  misc_feature: MA Experiment ID: 20000184 Result: Down-regulated in Transcription
  misc_feature: MA Experiment 20000184 PARAMETER Experiment Name: At_Shoots__P Parameter: Age (day) Value: 7
  misc_feature: MA Experiment 20000184 PARAMETER Experiment Name: At_Shoots__P Parameter: Tissue Value: Shoots vs. Whole Plant
acttgacagaaacattcgcatttaacttcatcgtcttctctctgtttctttcttctccaacaaatcaccaaaaatggagagattcaatttctttaatctgatgatcatagctttatgtttatcatccttcgttcacagtctcgagatgggagaaacatgtagttcgaccagcgaatgcgacgccggattgagctgtcaaagttgtccggcgaatggaaataccggctctacttgtacccggatccaacctcttaacccgacttcaaaggtgaatggtttgccgtttaacaagtactcgtggctaacaacacacaattcgtacgcaatcacgggggcaaattcggcaactggttcattccttgtctctccaaagaatcaagaagactccatcaccaatcagcttaagaatggtgtgagaggtataatgctagatacatatgattttcaaaacgatatatggttgtgtcattccactggagggacttgctttaacttcacagcctttcaaccagctatcaatgcacttaaagagatcaatgattttcttgaatcaaacttgtctgagattgttactatcatacttgaagattatgtcaaatctcaaatgggattgactaatgtattcaatgcatctggattgagtaagttcttgttaccaatctcgagaatgccgaaagacggtacagactggccaacggttgatgatatggtgaagcagaaccaaaggcttgtggtttttacttccaagaaggataaagaagcttctgaaggtcttgcttaccagtggaattacatggttgaaaatcaatatggtaatgatggaatgaaggatggatcatgctcgagtcgatctgaatcttcttcactagataccatgtctcggtctttggtgtttcagaactactttgaaaccagtccgaattcaacgcaagcgtgtgcggataattcctctccgttgatcgaaatgatgagaacttgccatgaagcagcgggtaaaaggtggcctaacttcatagctgttgatttttatcagaggagtgatagtggaggagctgccgaagctgtagatgaagcaaacggtcgtctcacatgtggttgtgacagcttagtctattgcaagtcaaacgcaccttttggcacttgtgatgctcctcctccgaagtcgtctccatcaccagtctccggagggaaggatacttcacggaaaccaagaaatcttcctgcgggtaatgctgattctacagctattggattgtcatctctctttctaatctctgcggcgactctcttgctgtggtgatagttcctcagtgagctcagtttgctttgatctgatacaaatgatttttgatttcccctttatacgtttcc

SEQ ID NO: 48559 - protein, 408 aa, Arabidopsis thaliana
  peptide (1)..(408): Ceres Seq. ID no. 15168698
  misc_feature (1)..(348): Homolog of NCBI NO: 25372964 NR Description: hypothetical protein F21F23.12 - Arabidopsis
  misc_feature (10)..(349): Homolog of NCBI NO: 5777622 NR Description: CAA303710.1 protein [Oryza sativa]
  misc_feature (11)..(340): Homolog of NCBI NO: 34897530 NR Description: OSJNBa0042L16.2 [Oryza sativa (japonica
  misc_feature (10)..(383): Homolog of NCBI NO: 38345515 NR Description: OSJNBa0039K24.18 [Oryza sativa (japonica
  misc_feature (11)..(379): Homolog of NCBI NO: 38345461 NR Description: OSJNBa0042L16.16 [Oryza sativa (japonica
  misc_feature (10)..(355): Homolog of NCBI NO: 18402763 NR Description: expressed protein [Arabidopsis thaliana]
  misc_feature (14)..(406): Homolog of NCBI NO: 27754722 NR Description: unknown protein [Arabidopsis thaliana]
  misc_feature (2)..(406): Homolog of NCBI NO: 15230348 NR Description: expressed protein [Arabidopsis thaliana]
  misc_feature (9)..(407): Homolog of NCBI NO: 38637049 NR Description: MAP3K-like protein kinase [Oryza sativa (japonica
  misc_feature (22)..(373): Homolog of NCBI NO: 25407778 NR Description: MAP3K-like protein kinase [imported] -
MERFNFFNLMIIALCLSSFVHSLEMGETCSSTSECDAGLSCQSCPANGNTGSTCTRIQPLNPTSKVNGLPFNKYSWLTTHNSYAITGANSATGSFLVSPKNQEDSITNQLKNGVRGIMLDTYDFQNDIWLCHSTGGTCFNFTAFQPAINALKEINDFLESNLSEIVTIILEDYVKSQMGLTNVFNASGLSKFLLPISRMPKDGTDWPTVDDMVKQNQRLVVFTSKKDKEASEGLAYQWNYMVENQYGNDGMKDGSCSSRSESSSLDTMSRSLVFQNYFETSPNSTQACADNSSPLIEMMRTCHEAAGKRWPNFIAVDFYQRSDSGGAAEAVDEANGRLTCGCDSLVYCKSNAPFGTCDAPPPKSSPSPVSGGKDTSRKPRNLPAGNADSTAIGLSSLFLISAATLLLW

SEQ ID NO: 48560 - protein, 399 aa, Arabidopsis thaliana
  peptide (1)..(399): Ceres Seq. ID no. 15168699
  misc_feature (1)..(339): Homolog of NCBI NO: 25372964 NR Description: hypothetical protein F21F23.12 - Arabidopsis
  misc_feature (1)..(340): Homolog of NCBI NO: 5777622 NR Description: CAA303710.1 protein [Oryza sativa]
  misc_feature (2)..(331): Homolog of NCBI NO: 34897530 NR Description: OSJNBa0042L16.2 [Oryza sativa (japonica
  misc_feature (1)..(374): Homolog of NCBI NO: 38345515 NR Description: OSJNBa0039K24.18 [Oryza sativa (japonica
  misc_feature (2)..(370): Homolog of NCBI NO: 38345461 NR Description: OSJNBa0042L16.16 [Oryza sativa (japonica
  misc_feature (1)..(346): Homolog of NCBI NO: 18402763 NR Description: expressed protein [Arabidopsis thaliana]
  misc_feature (5)..(397): Homolog of NCBI NO: 27754722 NR Description: unknown protein [Arabidopsis thaliana]
  misc_feature (1)..(397): Homolog of NCBI NO: 15230348 NR Description: expressed protein [Arabidopsis thaliana]
  misc_feature (1)..(398): Homolog of NCBI NO: 38637049 NR Description: MAP3K-like protein kinase [Oryza sativa (japonica
  misc_feature (13)..(364): Homolog of NCBI NO: 25407778 NR Description: MAP3K-like protein kinase [imported] -
MIIALCLSSFVHSLEMGETCSSTSECDAGLSCQSCPANGNTGSTCTRIQPLNPTSKVNGLPFNKYSWLTTHNSYAITGANSATGSFLVSPKNQEDSITNQLKNGVRGIMLDTYDFQNDIWLCHSTGGTCFNFTAFQPAINALKEINDFLESNLSEIVTIILEDYVKSQMGLTNVFNASGLSKFLLPISRMPKDGTDWPTVDDMVKQNQRLVVFTSKKDKEASEGLAYQWNYMVENQYGNDGMKDGSCSSRSESSSLDTMSRSLVFQNYFETSPNSTQACADNSSPLIEMMRTCHEAAGKRWPNFIAVDFYQRSDSGGAAEAVDEANGRLTCGCDSLVYCKSNAPFGTCDAPPPKSSPSPVSGGKDTSRKPRNLPAGNADSTAIGLSSLFLISAATLLLW

SEQ ID NO: 48561 - protein, 384 aa, Arabidopsis thaliana
  peptide (1)..(384): Ceres Seq. ID no. 15168700
  misc_feature (1)..(324): Homolog of NCBI NO: 25372964 NR Description: hypothetical protein F21F23.12 - Arabidopsis
  misc_feature (1)..(325): Homolog of NCBI NO: 5777622 NR Description: CAA303710.1 protein [Oryza sativa]
  misc_feature (1)..(316): Homolog of NCBI NO: 34897530 NR Description: OSJNBa0042L16.2 [Oryza sativa (japonica
  misc_feature (1)..(359): Homolog of NCBI NO: 38345515 NR Description: OSJNBa0039K24.18 [Oryza sativa (japonica
  misc_feature (1)..(355): Homolog of NCBI NO: 38345461 NR Description: OSJNBa0042L16.16 [Oryza sativa (japonica
  misc_feature (1)..(331): Homolog of NCBI NO: 18402763 NR Description: expressed protein [Arabidopsis thaliana]
  misc_feature (1)..(382): Homolog of NCBI NO: 27754722 NR Description: unknown protein [Arabidopsis thaliana]
  misc_feature (1)..(382): Homolog of NCBI NO: 15230348 NR Description: expressed protein [Arabidopsis thaliana]
  misc_feature (1)..(383): Homolog of NCBI NO: 38637049 NR Description: MAP3K-like protein kinase [Oryza sativa (japonica
  misc_feature (1)..(349): Homolog of NCBI NO: 25407778 NR Description: MAP3K-like protein kinase [imported] -
MGETCSSTSECDAGLSCQSCPANGNTGSTCTRIQPLNPTSKVNGLPFNKYSWLTTHNSYAITGANSATGSFLVSPKNQEDSITNQLKNGVRGIMLDTYDFQNDIWLCHSTGGTCFNFTAFQPAINALKEINDFLESNLSEIVTIILEDYVKSQMGLTNVFNASGLSKFLLPISRMPKDGTDWPTVDDMVKQNQRLVVFTSKKDKEASEGLAYQWNYMVENQYGNDGMKDGSCSSRSESSSLDTMSRSLVFQNYFETSPNSTQACADNSSPLIEMMRTCHEAAGKRWPNFIAVDFYQRSDSGGAAEAVDEANGRLTCGCDSLVYCKSNAPFGTCDAPPPKSSPSPVSGGKDTSRKPRNLPAGNADSTAIGLSSLFLISAATLLLW

SEQ ID NO: 48562 - DNA, 1933 bp, Arabidopsis thaliana; identical to SEQ ID NO: 48481
  misc_feature (1)..(1933): Ceres Seq. ID no. 12600905
  misc_feature: MA Experiment ID: 20000314 Result: Down-regulated in Transcription
  misc_feature: MA Experiment 20000314 PARAMETER Experiment Name: At_14day_Shoots-Roots_Sub_P Parameter: Age (day) Value: 14
  misc_feature: MA Experiment 20000314 PARAMETER Experiment Name: At_14day_Shoots-Roots_Sub_P Parameter: Organism Value: A. thaliana
  misc_feature: MA Experiment 20000314 PARAMETER Experiment Name: At_14day_Shoots-Roots_Sub_P Parameter: Plant Line Value: WS
  misc_feature: MA Experiment 20000314 PARAMETER Experiment Name: At_14day_Shoots-Roots_Sub_P Parameter: Tissue Value: Roots vs. Whole Plant
  misc_feature: MA Experiment ID: 20000315 Result: Down-regulated in Transcription
  misc_feature: MA Experiment 20000315 PARAMETER Experiment Name: At_14day_Shoots-Roots_Sub_P Parameter: Age (day) Value: 14
  misc_feature: MA Experiment 20000315 PARAMETER Experiment Name: At_14day_Shoots-Roots_Sub_P Parameter: Organism Value: A. thaliana
  misc_feature: MA Experiment 20000315 PARAMETER Experiment Name: At_14day_Shoots-Roots_Sub_P Parameter: Plant Line Value: WS
  misc_feature: MA Experiment 20000315 PARAMETER Experiment Name: At_14day_Shoots-Roots_Sub_P Parameter: Tissue Value: Shoots vs. Whole Plant
  misc_feature: MA Experiment ID: 20000327 Result: Down-regulated in Transcription
  misc_feature: MA Experiment 20000327 PARAMETER Experiment Name: At_42deg_Heat_Sub_P Parameter: Age (day) Value: 14
  misc_feature: MA Experiment 20000327 PARAMETER Experiment Name: At_42deg_Heat_Sub_P Parameter: Organism Value: A. thaliana
  misc_feature: MA Experiment 20000327 PARAMETER Experiment Name: At_42deg_Heat_Sub_P Parameter: Plant Line Value: WS
  misc_feature: MA Experiment 20000327 PARAMETER Experiment Name: At_42deg_Heat_Sub_P Parameter: Temperature (deg C) Value: 42 vs. 22
  misc_feature: MA Experiment 20000327 PARAMETER Experiment Name: At_42deg_Heat_Sub_P Parameter: Timepoint (hr) Value: 1
  misc_feature: MA Experiment 20000327 PARAMETER Experiment Name: At_42deg_Heat_Sub_P Parameter: Tissue Value: Aerial
  misc_feature: MA Experiment ID: 20000328 Result: Down-regulated in Transcription
  misc_feature: MA Experiment 20000328 PARAMETER Experiment Name: At_42deg_Heat_Sub_P Parameter: Age (day) Value: 14
  misc_feature: MA Experiment 20000328 PARAMETER Experiment Name: At_42deg_Heat_Sub_P Parameter: Organism Value: A. thaliana
  misc_feature: MA Experiment 20000328 PARAMETER Experiment Name: At_42deg_Heat_Sub_P Parameter: Plant Line Value: WS
  misc_feature: MA Experiment 20000328 PARAMETER Experiment Name: At_42deg_Heat_Sub_P Parameter: Temperature (deg C) Value: 42 vs. 22
  misc_feature: MA Experiment 20000328 PARAMETER Experiment Name: At_42deg_Heat_Sub_P Parameter: Timepoint (hr) Value: 6
  misc_feature: MA Experiment 20000328 PARAMETER Experiment Name: At_42deg_Heat_Sub_P Parameter: Tissue Value: Aerial
  misc_feature: MA Experiment ID: 20000329 Result: Up-regulated in Transcription
  misc_feature: MA Experiment 20000329 PARAMETER Experiment Name: At_4deg_Cold_Sub_P Parameter: Age (day) Value: 14
  misc_feature: MA Experiment 20000329 PARAMETER Experiment Name: At_4deg_Cold_Sub_P Parameter: Organism Value: A. thaliana
  misc_feature: MA Experiment 20000329 PARAMETER Experiment Name: At_4deg_Cold_Sub_P Parameter: Plant Line Value: WS
  misc_feature: MA Experiment 20000329 PARAMETER Experiment Name: At_4deg_Cold_Sub_P Parameter: Temperature (deg C) Value: 4 vs. 22
  misc_feature: MA Experiment 20000329 PARAMETER Experiment Name: At_4deg_Cold_Sub_P Parameter: Timepoint (hr) Value: 6
  misc_feature: MA Experiment 20000329 PARAMETER Experiment Name: At_4deg_Cold_Sub_P Parameter: Tissue Value: Aerial
  misc_feature: MA Experiment ID: 20000332 Result: Up-regulated in Transcription
  misc_feature: MA Experiment 20000332 PARAMETER Experiment Name: At_4deg_Cold_Sub_P Parameter: Age (day) Value: 14
  misc_feature: MA Experiment 20000332 PARAMETER Experiment Name: At_4deg_Cold_Sub_P Parameter: Organism Value: A. thaliana
  misc_feature: MA Experiment 20000332 PARAMETER Experiment Name: At_4deg_Cold_Sub_P Parameter: Plant Line Value: WS
  misc_feature: MA Experiment 20000332 PARAMETER Experiment Name: At_4deg_Cold_Sub_P Parameter: Temperature (deg C) Value: 4 vs. 22
  misc_feature: MA Experiment 20000332 PARAMETER Experiment Name: At_4deg_Cold_Sub_P Parameter: Timepoint (hr) Value: 2
  misc_feature: MA Experiment 20000332 PARAMETER Experiment Name: At_4deg_Cold_Sub_P Parameter: Tissue Value: Aerial
  misc_feature: MA Experiment ID: 20000349 Result: Down-regulated in Transcription
  misc_feature: MA Experiment 20000349 PARAMETER Experiment Name: At_100uM_ABA_Sub_P Parameter: Age (day) Value: 14
  misc_feature: MA Experiment 20000349 PARAMETER Experiment Name: At_100uM_ABA_Sub_P Parameter: Organism Value: A. thaliana
  misc_feature: MA Experiment 20000349 PARAMETER Experiment Name: At_100uM_ABA_Sub_P Parameter: Plant Line Value: WS
  misc_feature: MA Experiment 20000349 PARAMETER Experiment Name: At_100uM_ABA_Sub_P Parameter: Timepoint (hr) Value: 6
  misc_feature: MA Experiment 20000349 PARAMETER Experiment Name: At_100uM_ABA_Sub_P Parameter: Tissue Value: Aerial
  misc_feature: MA Experiment 20000349 PARAMETER Experiment Name: At_100uM_ABA_Sub_P Parameter: Treatment Value: 100uM ABA vs. No Treatment
  misc_feature: MA Experiment ID: 20000352 Result: Down-regulated in Transcription
  misc_feature: MA Experiment 20000352 PARAMETER Experiment Name: At_Drought_Sub_P Parameter: Age (day) Value: 7
  misc_feature: MA Experiment 20000352 PARAMETER Experiment Name: At_Drought_Sub_P Parameter: Organism Value: A. thaliana
  misc_feature: MA Experiment 20000352 PARAMETER Experiment Name: At_Drought_Sub_P Parameter: Plant Line Value: WS
  misc_feature: MA Experiment 20000352 PARAMETER Experiment Name: At_Drought_Sub_P Parameter: Timepoint (hr) Value: 6
  misc_feature: MA Experiment 20000352 PARAMETER Experiment Name: At_Drought_Sub_P Parameter: Tissue Value: Whole Plant
  misc_feature: MA Experiment 20000352 PARAMETER Experiment Name: At_Drought_Sub_P Parameter: Treatment Value: Drought vs. No Drought

SEQ ID NO: 48563 - protein, 513 aa, Arabidopsis thaliana; identical to SEQ ID NO: 48482
  peptide (1)..(513): Ceres Seq. ID no. 12600906
  misc_feature (33)..(473): Pfam Name: Sugar (and other) transporter Pfam Description: Sugar (and other) transporter
  misc_feature (33)..(473): Pfam Name: Sugar (and other) transporter Pfam Description: Sugar (and other) transporter
  misc_feature (12)..(497): Homolog of NCBI NO: 15225986 NR Description: putative sucrose-proton symporter; protein id:
  misc_feature (11)..(497): Homolog of NCBI NO: 15239921 NR Description: sucrose transporter protein; protein id:
  misc_feature (7)..(513): Homolog of NCBI NO: 18091781 NR Description: sucrose transporter SUC2 [Brassica oleracea]
  misc_feature (1)..(513): Homolog of NCBI NO: 20147213 NR Description: At1g22710/T22J18_12 [Arabidopsis thaliana]
  misc_feature (1)..(513): Homolog of NCBI NO: 481131 NR Description: sucrose transport protein SUC2 - Arabidopsis
  misc_feature (12)..(497): Homolog of NCBI NO: 15225986 NR Description: putative sucrose-proton symporter; protein id:
  misc_feature (7)..(513): Homolog of NCBI NO: 18091781 NR Description: sucrose transporter SUC2 [Brassica oleracea]
  misc_feature (1)..(513): Homolog of NCBI NO: 481131 NR Description: sucrose transport protein SUC2 - Arabidopsis
  misc_feature (1)..(513): Homolog of NCBI NO: 15217601 NR Description: sucrose transport protein SUC1
  misc_feature (1)..(513): Homolog of NCBI NO: 18091779 NR Description: sucrose transporter SUC1 [Brassica oleracea]
  misc_feature (1)..(513): Homolog of NCBI NO: 15217602 NR Description: putative sucrose transport protein; protein id:
  misc_feature (1)..(504): Homolog of NCBI NO: 12057172 NR Description: sucrose trasporter [Arabidopsis thaliana]
  misc_feature (1)..(513): Homolog of NCBI NO: 15219938 NR Description: putative sucrose transport protein, SUC2
  misc_feature (1)..(513): Homolog of NCBI NO: 20147213 NR Description: At1g22710/T22J18_12 [Arabidopsis thaliana]
  misc_feature (11)..(497): Homolog of NCBI NO: 15239921 NR Description: sucrose transporter protein; protein id:
  misc_feature (1)..(513): Homolog of NCBI NO: 15219938 NR Description: putative sucrose transport protein, SUC2
  misc_feature (1)..(504): Homolog of NCBI NO: 12057172 NR Description: sucrose trasporter [Arabidopsis thaliana]
  misc_feature (1)..(513): Homolog of NCBI NO: 15217602 NR Description: putative sucrose transport protein; protein id:
  misc_feature (1)..(513): Homolog of NCBI NO: 18091779 NR Description: sucrose transporter SUC1 [Brassica oleracea]
  misc_feature (1)..(513): Homolog of NCBI NO: 15217601 NR Description: sucrose transport protein SUC1

SEQ ID NO: 48564 - protein, 434 aa, Arabidopsis thaliana; identical to SEQ ID NO: 48483
  peptide (1)..(434): Ceres Seq. ID no. 12600907
  misc_feature (1)..(394): Pfam Name: Sugar (and other) transporter Pfam Description: Sugar (and other) transporter
  misc_feature (1)..(394): Pfam Name: Sugar (and other) transporter Pfam Description: Sugar (and other) transporter
  misc_feature (1)..(418): Homolog of NCBI NO: 15225986 NR Description: putative sucrose-proton symporter; protein id:
  misc_feature (1)..(418): Homolog of NCBI NO: 15239921 NR Description: sucrose transporter protein; protein id:
  misc_feature (1)..(434): Homolog of NCBI NO: 18091781 NR Description: sucrose transporter SUC2 [Brassica oleracea]
  misc_feature (1)..(434): Homolog of NCBI NO: 20147213 NR Description: At1g22710/T22J18_12 [Arabidopsis thaliana]
  misc_feature (1)..(434): Homolog of NCBI NO: 481131 NR Description: sucrose transport protein SUC2 - Arabidopsis
  misc_feature (1)..(418): Homolog of NCBI NO: 15225986 NR Description: putative sucrose-proton symporter; protein id:
  misc_feature (1)..(434): Homolog of NCBI NO: 18091781 NR Description: sucrose transporter SUC2 [Brassica oleracea]
  misc_feature (1)..(434): Homolog of NCBI NO: 481131 NR Description: sucrose transport protein SUC2 - Arabidopsis
  misc_feature (1)..(434): Homolog of NCBI NO: 15217601 NR Description: sucrose transport protein SUC1
  misc_feature (1)..(434): Homolog of NCBI NO: 18091779 NR Description: sucrose transporter SUC1 [Brassica oleracea]
  misc_feature (1)..(434): Homolog of NCBI NO: 15217602 NR Description: putative sucrose transport protein; protein id:
  misc_feature (1)..(425): Homolog of NCBI NO: 12057172 NR Description: sucrose trasporter [Arabidopsis thaliana]
  misc_feature (1)..(434): Homolog of NCBI NO: 15219938 NR Description: putative sucrose transport protein, SUC2
  misc_feature (1)..(434): Homolog of NCBI NO: 20147213 NR Description: At1g22710/T22J18_12 [Arabidopsis thaliana]
  misc_feature (1)..(418): Homolog of NCBI NO: 15239921 NR Description: sucrose transporter protein; protein id:
  misc_feature (1)..(434): Homolog of NCBI NO: 15219938 NR Description: putative sucrose transport protein, SUC2
  misc_feature (1)..(425): Homolog of NCBI NO: 12057172 NR Description: sucrose trasporter [Arabidopsis thaliana]
  misc_feature (1)..(434): Homolog of NCBI NO: 15217602 NR Description: putative sucrose transport protein; protein id:
  misc_feature (1)..(434): Homolog of NCBI NO: 18091779 NR Description: sucrose transporter SUC1 [Brassica oleracea]
  misc_feature (1)..(434): Homolog of NCBI NO: 15217601 NR Description: sucrose transport protein SUC1

SEQ ID NO: 48565 - protein, 386 aa, Arabidopsis thaliana; identical to SEQ ID NO: 48484
  peptide (1)..(386): Ceres Seq. ID no. 12600908
  misc_feature (1)..(346): Pfam Name: Sugar (and other) transporter Pfam Description: Sugar (and other) transporter
  misc_feature (1)..(346): Pfam Name: Sugar (and other) transporter Pfam Description: Sugar (and other) transporter
  misc_feature (1)..(370): Homolog of NCBI NO: 15225986 NR Description: putative sucrose-proton symporter; protein id:
  misc_feature (1)..(370): Homolog of NCBI NO: 15239921 NR Description: sucrose transporter protein; protein id:
  misc_feature (1)..(386): Homolog of NCBI NO: 18091781 NR Description: sucrose transporter SUC2 [Brassica oleracea]
  misc_feature (1)..(386): Homolog of NCBI NO: 20147213 NR Description: At1g22710/T22J18_12 [Arabidopsis thaliana]
  misc_feature (1)..(386): Homolog of NCBI NO: 481131 NR Description: sucrose transport protein SUC2 - Arabidopsis
  misc_feature (1)..(370): Homolog of NCBI NO: 15225986 NR Description: putative sucrose-proton symporter; protein id:
  misc_feature (1)..(386): Homolog of NCBI NO: 18091781 NR Description: sucrose transporter SUC2 [Brassica oleracea]
  misc_feature (1)..(386): Homolog of NCBI NO: 481131 NR Description: sucrose transport protein SUC2 - Arabidopsis
  misc_feature (1)..(386): Homolog of NCBI NO: 15217601 NR Description: sucrose transport protein SUC1
  misc_feature (1)..(386): Homolog of NCBI NO: 18091779 NR Description: sucrose transporter SUC1 [Brassica oleracea]
  misc_feature (1)..(386): Homolog of NCBI NO: 15217602 NR Description: putative sucrose transport protein; protein id:
  misc_feature (1)..(377): Homolog of NCBI NO: 12057172 NR Description: sucrose trasporter [Arabidopsis thaliana]
  misc_feature (1)..(386): Homolog of NCBI NO: 15219938 NR Description: putative sucrose transport protein, SUC2
  misc_feature (1)..(386): Homolog of NCBI NO: 20147213 NR Description: At1g22710/T22J18_12 [Arabidopsis thaliana]
  misc_feature (1)..(370): Homolog of NCBI NO: 15239921 NR Description: sucrose transporter protein; protein id:
  misc_feature (1)..(386): Homolog of NCBI NO: 15219938 NR Description: putative sucrose transport protein, SUC2
  misc_feature (1)..(377): Homolog of NCBI NO: 12057172 NR Description: sucrose trasporter [Arabidopsis thaliana]
  misc_feature (1)..(386): Homolog of NCBI NO: 15217602 NR Description: putative sucrose transport protein; protein id:
  misc_feature (1)..(386): Homolog of NCBI NO: 18091779 NR Description: sucrose transporter SUC1 [Brassica oleracea]
  misc_feature (1)..(386): Homolog of NCBI NO: 15217601 NR Description: sucrose transport protein SUC1

SEQ ID NO: 48566 - DNA, 1557 bp, Arabidopsis thaliana
  misc_feature (1)..(1557): Ceres Seq. ID no. 13578925
  misc_feature: MA Experiment ID: 20000307 Result: Up-regulated in Transcription
  misc_feature: MA Experiment 20000307 PARAMETER Experiment Name: At_Germinating_Seeds_Sub_P Parameter: Age (hr) Value: 24 vs. 0
  misc_feature: MA Experiment 20000307 PARAMETER Experiment Name: At_Germinating_Seeds_Sub_P Parameter: Organism Value: A. thaliana
  misc_feature: MA Experiment 20000307 PARAMETER Experiment Name: At_Germinating_Seeds_Sub_P Parameter: Plant Line Value: WS
  misc_feature: MA Experiment 20000307 PARAMETER Experiment Name: At_Germinating_Seeds_Sub_P Parameter: Tissue Value: Germinating Seeds
  misc_feature: MA Experiment ID: 20000355 Result: Up-regulated in Transcription
  misc_feature: MA Experiment 20000355 PARAMETER Experiment Name: At_Siliques_Sub_P Parameter: Age (day) Value: 21
  misc_feature: MA Experiment 20000355 PARAMETER Experiment Name: At_Siliques_Sub_P Parameter: Organism Value: A. thaliana
  misc_feature: MA Experiment 20000355 PARAMETER Experiment Name: At_Siliques_Sub_P Parameter: Plant Line Value: WS
  misc_feature: MA Experiment 20000355 PARAMETER Experiment Name: At_Siliques_Sub_P Parameter: Tissue Value: Less Than 5mm Siliques vs. Whole Plant
gaaaaaccaatccaagaaaaaaaagaaacctcaaagaagaagaagattctctctgtagaggtaaatatgaagcaaatgtcgcatcttgatgatattccttcgacgcctggcaagttcaagccctacttccaccgtacgcggtggcaatcctccgtcgccaagctcgccttttggtctctcgtcttcgttggtttgatcttcatcttcttctaccgatctcccgtttcctccaatcccgccgatccttctcgccgttctcttcgtacctactcctggggtggacccgcttgggagaaacgggtcagatcctccgcccgtctccgtacccgccgcggtttctctgttctcgtcaccggagccgccggtttcgtcggtacccatgtctccgccgctctcaaacgccgcggagatggcgttctggggcttgacaacttcaacgattactacgatccatcgctcaagagagcaaggcaagcccttttggagagaagcggagtgtttgttgttgaaggagacatcaatgacgctgctctcttgaagaagctctttgaagttgttccctttacccacgttatgcatttggctgctcaagctggtgtcaggtacgccatggaaaatcctagctcttatgttcacagtaacatcgctggcttcgtcaatctccttgaggtttgcaaatctgccaatccccaacccgccattgtctgggcttcctctagctctgtctacgggctcaacactaaggtccccttctccgagaaagacagaactgaccaaccagctagtctctatgctgctactaagaaggctggtgaagagattgctcacacttacaatcacatctatggactctctcttactggcttgaggtttttcaccgtctatggtccttggggaaggcctgacatggcctatttcttcttcaccagagacattctcaaagggaaagccatttcaatctttgagggggtcaaccatggaaccgtggctagggacttcacttacattgatgacattgtcaaggggtgtttaggggctttggacacggctgagaagagcactggtagtggtggtaagaagcgcggtgcggctcagttacgggttttcaatctcggcaacacttcgcccgttccagtgactgatcttgtcaccattcttgagagacttctcaaagtcaaggccaagaggaacattatgaagttgccgaggaacggggatgtgcagttcactcatgctaatatcagttctgcgcagagagagctcggctacaaacccaccaccgatcttcagacgggtctcaagaagtttgcgagatggtatttgggttactacaatggcggaaagaaagctgcaagctgatgattgactatctgcaatgagtttgtagcctctctttttttttttgattctgagattcttgtgattgtttcactctttaacacttgctctttttgttggttctttggccggctcataccctgtctttgccgtatatgtttttactcaaaaccatttatactccataagaaccattatttcgggattacattctttgtc

SEQ ID NO: 48567 - protein, 452 aa, Arabidopsis thaliana
  peptide (1)..(452): Ceres Seq. ID no. 13578926
  misc_feature (115)..(444): Pfam Name: NAD dependent epimerase/dehydratase family Pfam Description: NAD dependent epimerase/dehydratase family
  misc_feature (91)..(444): Homolog of NCBI NO: 29647497 NR Description: OJ1191_A10.21 [Oryza sativa (japonica
  misc_feature (91)..(444): Homolog of NCBI NO: 24417280 NR Description: unknown [Arabidopsis thaliana]
  misc_feature (91)..(444): Homolog of NCBI NO: 15229524 NR Description: NAD-dependent epimerase/dehydratase family
  misc_feature (26)..(450): Homolog of NCBI NO: 15234745 NR Description: nucleotide sugar epimerase family [Arabidopsis
  misc_feature (26)..(452): Homolog of NCBI NO: 15293119 NR Description: putative nucleotide sugar epimerase [Arabidopsis
  misc_feature (26)..(452): Homolog of NCBI NO: 15234486 NR Description: nucleotide sugar epimerase family [Arabidopsis
  misc_feature (26)..(452): Homolog of NCBI NO: 15225451 NR Description: nucleotide sugar epimerase family [Arabidopsis
  misc_feature (41)..(452): Homolog of NCBI NO: 21536982 NR Description: nucleotide sugar epimerase, putative [Arabidopsis
  misc_feature (26)..(452): Homolog of NCBI NO: 15217591 NR Description: nucleotide sugar epimerase family [Arabidopsis
  misc_feature (23)..(452): Homolog of NCBI NO: 15236712 NR Description: nucleotide sugar epimerase family [Arabidopsis
EKPIQEKKETSKKKKILSVEVNMKQMSHLDDIPSTPGKFKPYFHRTRWQSSVAKLAFWSLVFVGLIFIFFYRSPVSSNPADPSRRSLRTYSWGGPAWEKRVRSSARLRTRRGFSVLVTGAAGFVGTHVSAALKRRGDGVLGLDNFNDYYDPSLKRARQALLERSGVFVVEGDINDAALLKKLFEVVPFTHVMHLAAQAGVRYAMENPSSYVHSNIAGFVNLLEVCKSANPQPAIVWASSSSVYGLNTKVPFSEKDRTDQPASLYAATKKAGEEIAHTYNHIYGLSLTGLRFFTVYGPWGRPDMAYFFFTRDILKGKAISIFEGVNHGTVARDFTYIDDIVKGCLGALDTAEKSTGSGGKKRGAAQLRVFNLGNTSPVPVTDLVTILERLLKVKAKRNIMKLPRNGDVQFTHANISSAQRELGYKPTTDLQTGLKKFARWYLGYYNGGKKAAS

SEQ ID NO: 48568 - protein, 430 aa, Arabidopsis thaliana
  peptide (1)..(430): Ceres Seq. ID no. 13578927
  misc_feature (93)..(422): Pfam Name: NAD dependent epimerase/dehydratase family Pfam Description: NAD dependent epimerase/dehydratase family
  misc_feature (69)..(422): Homolog of NCBI NO: 29647497 NR Description: OJ1191_A10.21 [Oryza sativa (japonica
  misc_feature (69)..(422): Homolog of NCBI NO: 24417280 NR Description: unknown [Arabidopsis thaliana]
  misc_feature (69)..(422): Homolog of NCBI NO: 15229524 NR Description: NAD-dependent epimerase/dehydratase family
  misc_feature (4)..(428): Homolog of NCBI NO: 15234745 NR Description: nucleotide sugar epimerase family [Arabidopsis
  misc_feature (4)..(430): Homolog of NCBI NO: 15293119 NR Description: putative nucleotide sugar epimerase [Arabidopsis
  misc_feature (4)..(430): Homolog of NCBI NO: 15234486 NR Description: nucleotide sugar epimerase family [Arabidopsis
  misc_feature (4)..(430): Homolog of NCBI NO: 15225451 NR Description: nucleotide sugar epimerase family [Arabidopsis
  misc_feature (19)..(430): Homolog of NCBI NO: 21536982 NR Description: nucleotide sugar epimerase, putative [Arabidopsis
  misc_feature (4)..(430): Homolog of NCBI NO: 15217591 NR Description: nucleotide sugar epimerase family [Arabidopsis
  misc_feature (1)..(430): Homolog of NCBI NO: 15236712 NR Description: nucleotide sugar epimerase family [Arabidopsis
MKQMSHLDDIPSTPGKFKPYFHRTRWQSSVAKLAFWSLVFVGLIFIFFYRSPVSSNPADPSRRSLRTYSWGGPAWEKRVRSSARLRTRRGFSVLVTGAAGFVGTHVSAALKRRGDGVLGLDNFNDYYDPSLKRARQALLERSGVFVVEGDINDAALLKKLFEVVPFTHVMHLAAQAGVRYAMENPSSYVHSNIAGFVNLLEVCKSANPQPAIVWASSSSVYGLNTKVPFSEKDRTDQPASLYAATKKAGEEIAHTYNHIYGLSLTGLRFFTVYGPWGRPDMAYFFFTRDILKGKAISIFEGVNHGTVARDFTYIDDIVKGCLGALDTAEKSTGSGGKKRGAAQLRVFNLGNTSPVPVTDLVTILERLLKVKAKRNIMKLPRNGDVQFTHANISSAQRELGYKPTTDLQTGLKKFARWYLGYYNGGKKAAS

SEQ ID NO: 48569 - protein, 427 aa, Arabidopsis thaliana
  peptide (1)..(427): Ceres Seq. ID no. 13578928
  misc_feature (90)..(419): Pfam Name: NAD dependent epimerase/dehydratase family Pfam Description: NAD dependent epimerase/dehydratase family
  misc_feature (66)..(419): Homolog of NCBI NO: 29647497 NR Description: OJ1191_A10.21 [Oryza sativa (japonica
  misc_feature (66)..(419): Homolog of NCBI NO: 24417280 NR Description: unknown [Arabidopsis thaliana]
  misc_feature (66)..(419): Homolog of NCBI NO: 15229524 NR Description: NAD-dependent epimerase/dehydratase family
  misc_feature (1)..(425): Homolog of NCBI NO: 15234745 NR Description: nucleotide sugar epimerase family [Arabidopsis
  misc_feature (1)..(427): Homolog of NCBI NO: 15293119 NR Description: putative nucleotide sugar epimerase [Arabidopsis
  misc_feature (1)..(427): Homolog of NCBI NO: 15234486 NR Description: nucleotide sugar epimerase family [Arabidopsis
  misc_feature (1)..(427): Homolog of NCBI NO: 15225451 NR Description: nucleotide sugar epimerase family [Arabidopsis
  misc_feature (16)..(427): Homolog of NCBI NO: 21536982 NR Description: nucleotide sugar epimerase, putative [Arabidopsis
  misc_feature (1)..(427): Homolog of NCBI NO: 15217591 NR Description: nucleotide sugar epimerase family [Arabidopsis
  misc_feature (1)..(427): Homolog of NCBI NO: 15236712 NR Description: nucleotide sugar epimerase family [Arabidopsis
MSHLDDIPSTPGKFKPYFHRTRWQSSVAKLAFWSLVFVGLIFIFFYRSPVSSNPADPSRRSLRTYSWGGPAWEKRVRSSARLRTRRGFSVLVTGAAGFVGTHVSAALKRRGDGVLGLDNFNDYYDPSLKRARQALLERSGVFVVEGDINDAALLKKLFEVVPFTHVMHLAAQAGVRYAMENPSSYVHSNIAGFVNLLEVCKSANPQPAIVWASSSSVYGLNTKVPFSEKDRTDQPASLYAATKKAGEEIAHTYNHIYGLSLTGLRFFTVYGPWGRPDMAYFFFTRDILKGKAISIFEGVNHGTVARDFTYIDDIVKGCLGALDTAEKSTGSGGKKRGAAQLRVFNLGNTSPVPVTDLVTILERLLKVKAKRNIMKLPRNGDVQFTHANISSAQRELGYKPTTDLQTGLKKFARWYLGYYNGGKKAAS

SEQ ID NO: 48570 - DNA, 1786 bp, Arabidopsis thaliana
  misc_feature (1)..(1786): Ceres Seq. ID no. 12575003
  misc_feature: MA Experiment ID: 20000180 Result: Down-regulated in Transcription
  misc_feature: MA Experiment 20000180 PARAMETER Experiment Name: At_Germinating_Seeds_P Parameter: Age (hr) Value: 24 vs. 0
  misc_feature: MA Experiment 20000180 PARAMETER Experiment Name: At_Germinating_Seeds_P Parameter: Tissue Value: Germinating Seeds
  misc_feature: MA Experiment ID: 20000185 Result: Up-regulated in Transcription
  misc_feature: MA Experiment 20000185 PARAMETER Experiment Name: At_Roots__P Parameter: Age (day) Value: 7 vs. 21
  misc_feature: MA Experiment 20000185 PARAMETER Experiment Name: At_Roots__P Parameter: Organism Value: A. thaliana
  misc_feature: MA Experiment 20000185 PARAMETER Experiment Name: At_Roots__P Parameter: Tissue Value: Roots vs. Whole Plant
  misc_feature: MA Experiment ID: 20000439 Result: Up-regulated in Transcription
  misc_feature: MA Experiment 20000439 PARAMETER Experiment Name: At_Roots__P Parameter: Age (day) Value: 14 vs. 21
  misc_feature: MA Experiment 20000439 PARAMETER Experiment Name: At_Roots__P Parameter: Organism Value: A. thaliana
  misc_feature: MA Experiment 20000439 PARAMETER Experiment Name: At_Roots__P Parameter: Tissue Value: Roots vs. Whole Plant
  misc_feature: MA Experiment ID: 20000573 Result: Up-regulated in Transcription
  misc_feature: MA Experiment 20000573 PARAMETER Experiment Name: At_100uM_ABA_Mutants__P Parameter: Organism Value: A. thaliana
  misc_feature: MA Experiment 20000573 PARAMETER Experiment Name: At_100uM_ABA_Mutants__P Parameter: Plant Line Value: CS22 vs. Ler wt
  misc_feature: MA Experiment 20000573 PARAMETER Experiment Name: At_100uM_ABA_Mutants__P Parameter: Timepoint (hr) Value: N/A
  misc_feature: MA Experiment 20000573 PARAMETER Experiment Name: At_100uM_ABA_Mutants__P Parameter: Tissue Value: Whole Plant
  misc_feature: MA Experiment 20000573 PARAMETER Experiment Name: At_100uM_ABA_Mutants__P Parameter: Treatment Value: None
  misc_feature: MA Experiment ID: 20000574 Result: Up-regulated in Transcription
  misc_feature: MA Experiment 20000574 PARAMETER Experiment Name: At_100uM_ABA_Mutants__P Parameter: Organism Value: A. thaliana
  misc_feature: MA Experiment 20000574 PARAMETER Experiment Name: At_100uM_ABA_Mutants__P Parameter: Plant Line Value: CS23 vs. Ler wt
  misc_feature: MA Experiment 20000574 PARAMETER Experiment Name: At_100uM_ABA_Mutants__P Parameter: Timepoint (hr) Value: N/A
  misc_feature: MA Experiment 20000574 PARAMETER Experiment Name: At_100uM_ABA_Mutants__P Parameter: Tissue Value: Whole Plant
  misc_feature: MA Experiment 20000574 PARAMETER Experiment Name: At_100uM_ABA_Mutants__P Parameter: Treatment Value: None
  misc_feature: MA Experiment ID: 20001451 Result: Down-regulated in Transcription
  misc_feature: MA Experiment 20001451 PARAMETER Experiment Name: At_Far-red-induction_P Parameter: Age (day) Value: 7
  misc_feature: MA Experiment 20001451 PARAMETER Experiment Name: At_Far-red-induction_P Parameter: Light Value: Far-red vs. White
  misc_feature: MA Experiment 20001451 PARAMETER Experiment Name: At_Far-red-induction_P Parameter: Organism Value: A. thaliana
  misc_feature: MA Experiment 20001451 PARAMETER Experiment Name: At_Far-red-induction_P Parameter: Plant Line Value: Columbia
  misc_feature: MA Experiment 20001451 PARAMETER Experiment Name: At_Far-red-induction_P Parameter: Timepoint (hr) Value: 24
  misc_feature: MA Experiment 20001451 PARAMETER Experiment Name: At_Far-red-induction_P Parameter: Tissue Value: Whole Plant
aacttgtataatcaaaactccagtgacagccaaaaagtctcaatctttataaagacccacaaaaacttgcggactccagagtgagtgtgagaatcggagatgtctttttcagtagtagcagctttaccggtgcttgtagcagtagtggtactgtggacatggcggatcgtgaagtgggtctggataaaaccaaagatgcttgagagttctttgaaaagacagggtcttaccggaactccttacactcctctcgtcggagatataaagaggaatgttgatatgatgatggaagcgagatctaaacccatcaatgtaacggatgatatcaccccacgtctccttcctcttgccttaaagatgctcaattctcacggaaagactttcttcatatggattggaccacttccaacgattgtgataacgaatcctgagcagatcaaggaagtctttaataaagtcaacgactttgagaaagcttctacattccctttgatcagattgttagcaggtgggcttgcaagttacaagggagataaatgggcgagtcacaggaggatcatcaacccggcttttcacctcgaaaaaatcaagaacatgatccctgcgttctaccattgttgcagcgaggttgtctgtcaatgggagaagctatttacagataaagaatcgcctcttgaagtcgatgtttggccttggcttgtgaatatgactgcggatgtcatctcacatactgcttttggaagtagctataaagaagggcagagaatatttcaactacaaggggaattggctgagcttatcgcacaagcttttaagaaatcttacatccctggatcgaggttttacccaacaaagagcaatagaaggatgaaagcaatagatagagaagtagacgtaatattgagaggtattgtgagcaaacgggagaaagcgagagaagctggagaaccagcaaacgatgatttgttggggatattgcttgaatccaattcagaggaatctcaaggaaatggaatgagcgtagaagatgtgatgaaagagtgcaagttgttttatttcgcgggacaagagacaacttcagtacttttggtgtggactatggttttattaagccatcaccaagactggcaagctcgcgcacgagaggaagtgatgcaagtactcggtgaaaataataaacctgatatggagtcccttaacaaccttaaagtcatgactatgatcttcaatgaggttttgaggctataccctccggtggctcagcttaaacgagttgtcaacaaagaaatgaagctcggagagttgacccttccagctggaattcaaatttacttaccaactattcttgtccagcgtgacaccgagctttggggcgatgatgcagcggattttaaacccgagcggttcagagacgggctctcaaaggcaacaaagaaccaggtctctttcttcccctttggatggggacctaggatttgcatcggtcagaattttgctatgttggaggcaaagatggcaatggctttgattctacaaaagttctccttcgagctctctccttcttatgttcacgcgcctcaaacagtcatgaccactcgtccccaattcggagctcatctaattctgcacaagctctgattttgtatatccatggatatgtcatcaaaagtctcatattatgtaacaaaaagatgtcatagaaagccctgtagccatatgttgtgaaattgtcaatatctttgtctgaaactagtcgctattctataaggtaaaagtcttcttcagt

SEQ ID NO: 48571 - protein, 512 aa, Arabidopsis thaliana
  peptide (1)..(512): Ceres Seq. ID no. 12575004
  misc_feature (91)..(487): Pfam Name: Cytochrome P450 Pfam Description: Cytochrome P450
  misc_feature (12)..(59): Homolog of NCBI NO: 9294385 NR Description: cytochrome P450-like protein [Arabidopsis
  misc_feature (113)..(512): Homolog of NCBI NO: 9294385 NR Description: cytochrome P450-like protein [Arabidopsis
  misc_feature (1)..(512): Homolog of NCBI NO: 9294386 NR Description: cytochrome P450 [Arabidopsis thaliana]
  misc_feature (1)..(512): Homolog of NCBI NO: 15231906 NR Description: cytochrome P450, putative
  misc_feature (12)..(512): Homolog of NCBI NO: 15231897 NR Description: cytochrome P450, putative; protein id:
  misc_feature (1)..(512): Homolog of NCBI NO: 15231907 NR Description: cytochrome P450, putative
  misc_feature (1)..(512): Homolog of NCBI NO: 15231899 NR Description: cytochrome P450, putative; protein id:
  misc_feature (6)..(512): Homolog of NCBI NO: 15231901 NR Description: cytochrome P450, putative; protein id:
  misc_feature (6)..(512): Homolog of NCBI NO: 15231903 NR Description: cytochrome P450, putative
  misc_feature (1)..(512): Homolog of NCBI NO: 15231889 NR Description: cytochrome P450, putative
MSFSVVAALPVLVAVVVLWTWRIVKWVWIKPKMLESSLKRQGLTGTPYTPLVGDIKRNVDMMMEARSKPINVTDDITPRLLPLALKMLNSHGKTFFIWIGPLPTIVITNPEQIKEVFNKVNDFEKASTFPLIRLLAGGLASYKGDKWASHRRIINPAFHLEKIKNMIPAFYHCCSEVVCQWEKLFTDKESPLEVDVWPWLVNMTADVISHTAFGSSYKEGQRIFQLQGELAELIAQAFKKSYIPGSRFYPTKSNRRMKAIDREVDVILRGIVSKREKAREAGEPANDDLLGILLESNSEESQGNGMSVEDVMKECKLFYFAGQETTSVLLVWTMVLLSHHQDWQARAREEVMQVLGENNKPDMESLNNLKVMTMIFNEVLRLYPPVAQLKRVVNKEMKLGELTLPAGIQIYLPTILVQRDTELWGDDAADFKPERFRDGLSKATKNQVSFFPFGWGPRICIGQNFAMLEAKMAMALILQKFSFELSPSYVHAPQTVMTTRPQFGAHLILHKL

SEQ ID NO: 48572 - protein, 480 aa, Arabidopsis thaliana
  peptide (1)..(480): Ceres Seq. ID no. 12575005
  misc_feature (59)..(455): Pfam Name: Cytochrome P450 Pfam Description: Cytochrome P450
  misc_feature (1)..(27): Homolog of NCBI NO: 9294385 NR Description: cytochrome P450-like protein [Arabidopsis
  misc_feature (81)..(480): Homolog of NCBI NO: 9294385 NR Description: cytochrome P450-like protein [Arabidopsis
  misc_feature (1)..(480): Homolog of NCBI NO: 9294386 NR Description: cytochrome P450 [Arabidopsis thaliana]
  misc_feature (1)..(480): Homolog of NCBI NO: 15231906 NR Description: cytochrome P450, putative
  misc_feature (1)..(480): Homolog of NCBI NO: 15231897 NR Description: cytochrome P450, putative; protein id:
  misc_feature (1)..(480): Homolog of NCBI NO: 15231907 NR Description: cytochrome P450, putative
  misc_feature (1)..(480): Homolog of NCBI NO: 15231899 NR Description: cytochrome P450, putative; protein id:
  misc_feature (1)..(480): Homolog of NCBI NO: 15231901 NR Description: cytochrome P450, putative; protein id:
  misc_feature (1)..(480): Homolog of NCBI NO: 15231903 NR Description: cytochrome P450, putative
  misc_feature (1)..(480): Homolog of NCBI NO: 15231889 NR Description: cytochrome P450, putative
MLESSLKRQGLTGTPYTPLVGDIKRNVDMMMEARSKPINVTDDITPRLLPLALKMLNSHGKTFFIWIGPLPTIVITNPEQIKEVFNKVNDFEKASTFPLIRLLAGGLASYKGDKWASHRRIINPAFHLEKIKNMIPAFYHCCSEVVCQWEKLFTDKESPLEVDVWPWLVNMTADVISHTAFGSSYKEGQRIFQLQGELAELIAQAFKKSYIPGSRFYPTKSNRRMKAIDREVDVILRGIVSKREKAREAGEPANDDLLGILLESNSEESQGNGMSVEDVMKECKLFYFAGQETTSVLLVWTMVLLSHHQDWQARAREEVMQVLGENNKPDMESLNNLKVMTMIFNEVLRLYPPVAQLKRVVNKEMKLGELTLPAGIQIYLPTILVQRDTELWGDDAADFKPERFRDGLSKATKNQVSFFPFGWGPRICIGQNFAMLEAKMAMALILQKFSFELSPSYVHAPQTVMTTRPQFGAHLILHKL

SEQ ID NO: 48573 - protein, 452 aa, Arabidopsis thaliana
  peptide (1)..(452): Ceres Seq. ID no. 12575006
  misc_feature (31)..(427): Pfam Name: Cytochrome P450 Pfam Description: Cytochrome P450
  misc_feature (1)..(452): Homolog of NCBI NO: 17386114 NR Description: AT3g14620/MIE1_12 [Arabidopsis thaliana]
  misc_feature (53)..(452): Homolog of NCBI NO: 9294385 NR Description: cytochrome P450-like protein [Arabidopsis
  misc_feature (1)..(452): Homolog of NCBI NO: 9294386 NR Description: cytochrome P450 [Arabidopsis thaliana]
  misc_feature (1)..(452): Homolog of NCBI NO: 15231906 NR Description: cytochrome P450, putative
  misc_feature (1)..(452): Homolog of NCBI NO: 15231897 NR Description: cytochrome P450, putative; protein id:
  misc_feature (1)..(452): Homolog of NCBI NO: 15231907 NR Description: cytochrome P450, putative
  misc_feature (1)..(452): Homolog of NCBI NO: 15231899 NR Description: cytochrome P450, putative; protein id:
  misc_feature (1)..(452): Homolog of NCBI NO: 15231901 NR Description: cytochrome P450, putative; protein id:
  misc_feature (1)..(452): Homolog of NCBI NO: 15231903 NR Description: cytochrome P450, putative
  misc_feature (1)..(452): Homolog of NCBI NO: 15231889 NR Description: cytochrome P450, putative
MMMEARSKPINVTDDITPRLLPLALKMLNSHGKTFFIWIGPLPTIVITNPEQIKEVFNKVNDFEKASTFPLIRLLAGGLASYKGDKWASHRRIINPAFHLEKIKNMIPAFYHCCSEVVCQWEKLFTDKESPLEVDVWPWLVNMTADVISHTAFGSSYKEGQRIFQLQGELAELIAQAFKKSYIPGSRFYPTKSNRRMKAIDREVDVILRGIVSKREKAREAGEPANDDLLGILLESNSEESQGNGMSVEDVMKECKLFYFAGQETTSVLLVWTMVLLSHHQDWQARAREEVMQVLGENNKPDMESLNNLKVMTMIFNEVLRLYPPVAQLKRVVNKEMKLGELTLPAGIQIYLPTILVQRDTELWGDDAADFKPERFRDGLSKATKNQVSFFPFGWGPRICIGQNFAMLEAKMAMALILQKFSFELSPSYVHAPQTVMTTRPQFGAHLILHKL

SEQ ID NO: 48574 - DNA, 2268 bp, Arabidopsis thaliana
  misc_feature (1)..(2268): Ceres Seq. ID no. 13591988
  misc_feature: MA Experiment ID: 20000794 Result: Up-regulated in Transcription
  misc_feature: MA Experiment 20000794 PARAMETER Experiment Name: At_Petals_P Parameter: Age (day) Value: 23-25 days
  misc_feature: MA Experiment 20000794 PARAMETER Experiment Name: At_Petals_P Parameter: Plant Line Value: WS
  misc_feature: MA Experiment 20000794 PARAMETER Experiment Name: At_Petals_P Parameter: Tissue Value: Petals vs. Whole plant
  misc_feature: MA Experiment ID: 20001248 Result: Up-regulated in Transcription
  misc_feature: MA Experiment 20001248 PARAMETER Experiment Name: At_Far-red-induction_P Parameter: Age (day) Value: 7
  misc_feature: MA Experiment 20001248 PARAMETER Experiment Name: At_Far-red-induction_P Parameter: Light Value: Far-red vs. White
  misc_feature: MA Experiment 20001248 PARAMETER Experiment Name: At_Far-red-induction_P Parameter: Organism Value: A. thaliana
  misc_feature: MA Experiment 20001248 PARAMETER Experiment Name: At_Far-red-induction_P Parameter: Plant Line Value: Columbia
  misc_feature: MA Experiment 20001248 PARAMETER Experiment Name: At_Far-red-induction_P Parameter: Timepoint (hr) Value: 4
  misc_feature: MA Experiment 20001248 PARAMETER Experiment Name: At_Far-red-induction_P Parameter: Tissue Value: Whole Plant
  misc_feature: MA Experiment ID: 20001451 Result: Up-regulated in Transcription
  misc_feature: MA Experiment 20001451 PARAMETER Experiment Name: At_Far-red-induction_P Parameter: Age (day) Value: 7
  misc_feature: MA Experiment 20001451 PARAMETER Experiment Name: At_Far-red-induction_P Parameter: Light Value: Far-red vs. White
  misc_feature: MA Experiment 20001451 PARAMETER Experiment Name: At_Far-red-induction_P Parameter: Organism Value: A. thaliana
  misc_feature: MA Experiment 20001451 PARAMETER Experiment Name: At_Far-red-induction_P Parameter: Plant Line Value: Columbia
  misc_feature: MA Experiment 20001451 PARAMETER Experiment Name: At_Far-red-induction_P Parameter: Timepoint (hr) Value: 24
  misc_feature: MA Experiment 20001451 PARAMETER Experiment Name: At_Far-red-induction_P Parameter: Tissue Value: Whole Plant
  misc_feature: MA Experiment ID: 20001911 Result: Up-regulated in Transcription
  misc_feature: MA Experiment 20001911 PARAMETER Experiment Name: At_Drought_Reproduction_P Parameter: Age (day) Value: 40
  misc_feature: MA Experiment 20001911 PARAMETER Experiment Name: At_Drought_Reproduction_P Parameter: Organism Value: A. thaliana
  misc_feature: MA Experiment 20001911 PARAMETER Experiment Name: At_Drought_Reproduction_P Parameter: Plant Line Value: WS
  misc_feature: MA Experiment 20001911 PARAMETER Experiment Name: At_Drought_Reproduction_P Parameter: Timepoint (day) Value: 10
  misc_feature: MA Experiment 20001911 PARAMETER Experiment Name: At_Drought_Reproduction_P Parameter: Tissue Value: Flowers
  misc_feature: MA Experiment 20001911 PARAMETER Experiment Name: At_Drought_Reproduction_P Parameter: Treatment Value: Drought vs. No Drought
aaaagttggacatccttgcttttggtctaactttctctctcttgcttctacgcttcttcttgtggcgtagattgttatagagagggaaaccaaaaaagggaatctcaaaagctcgagttcacagatttgacccgagtctttaatccaatctgctggttcgttttccacattcaaactcgactcttgaatatcaaatcagaagtctttgctatggctgctaccgctgctgcttctgttgtccgttacgcacctgaggatcatactcttcccaagccctggaaaggccttatcgatgatagaactggttacttgtacttttggaatcctgagaccaatgttactcagtacgagaaaccaaccccctctctacctcctaagttttctcccgccgtttctgttagctcttccgttcaggttcaacaaactgatgcctatgctcctcccaaggatgacgataagtactccagaggctctgaacgtgtgtccaggttttctgagggtggcaggagtggaccgccttattcgaacggtgctgctaatggagttggggattctgcttatggtgcagcatctaccagagttcctcttccttcatcagctccagcaagtgaactatcccctgaggcctattcccgccgtcatgaaattactgtcagtgggggccaagtaccaccacctctaatgtcctttgaagctactggttttccacctgagcttctgcgggaggtactcagtgcaggtttctctgctccaactccaattcaagctcagtcatggcccattgctatgcaaggtagggacatagtagccattgctaaaactggctcgggaaaaactttgggttacttgattcctggatttttgcatcttcaacgtatccgaaatgattcgcgaatgggcccaacaatcttggtattgtctccaacgagagagctggccacacaaatccaagaagaagctgttaaatttgggaggtcatcaagaatttcgtgtacgtgtttgtatggtggtgcaccaaagggccctcagttgagggatttagaaagaggagcagatatcgtggttgcaactcctgggagattgaatgatatccttgaaatgaggaggattagtctgcgtcagatatcttatcttgtgctagatgaggcagatagaatgttggacatgggttttgaacctcagataaggaagattgtgaaagaaattcccactaagcgtcaaacccttatgtacacagctacatggccaaagggagttaggaaaattgcagctgacttgcttgttaaccctgctcaagtcaacattggcaatgttgacgagcttgtggctaacaagtcaatcacacagcatattgaagtggtagcaccaatggagaaacagaggaggttagagcagatcttgcggtctcaggaaccaggctcaaaggtgataatattctgctcaaccaaaaggatgtgtgatcaactaacacgcaatctaacccgccaatttggagctgctgctatacatggagacaagtcccagcctgagagagacaatgttcttaatcaattccgcagtggcagaactccggttcttgtagcaaccgatgttgctgctcgtggtctggacgttaaggacatcagggcggtcgtaaactatgatttccccaatggagtggaagactatgttcatagaatcggaagaacaggaagagctggagcgactggtcaggcattcacattctttggtgatcaagattcgaaacatgcttcggatctgatcaagattttggaaggagcaaaccagcgagttcctcctcagatccgcgaaatggctacacgtggtggtgggggaatgaacaaattcagtcgttggggacctccttccggcggccgtggtcgtggtggcgactctggttatggtggcagaggtagctttgcttcccgtgacagaagcagcaatggatggggaagagagcgagaaaggagccgtagccctgagagattcaacagagctccaccaccgtcttccaccggatctcctcctcgcagcttccacgagacgatgatgatgaaacacagatgaaaagagagatacaaagctctgataaagccaagtgacagaagattgtgttgtgggggatttcccttatcattgtgacattatatattttttggccgatgaagaaacaaaagaaaaaaaaacaagaccaagaagactgttccctcccattggaaatttacgctcaaaactacaattgatatcttacagtttgtatttcatctt

SEQ ID NO: 48575 - protein, 618 aa, Arabidopsis thaliana
  peptide (1)..(618): Ceres Seq. ID no. 13591989
  misc_feature (171)..(380): Pfam Name: DEAD/DEAH box helicase Pfam Description: DEAD/DEAH box helicase
  misc_feature (4)..(69): Homolog of NCBI NO: 15230730 NR Description: DEAD box RNA helicase, putative [Arabidopsis
  misc_feature (101)..(579): Homolog of NCBI NO: 15230730 NR Description: DEAD box RNA helicase, putative [Arabidopsis
  misc_feature (1)..(618): Homolog of NCBI NO: 34913856 NR Description: putative RNA helicase, DRH1
  misc_feature (1)..(59): Homolog of NCBI NO: 15528719 NR Description: putative RNA helicase, DRH1
  misc_feature (115)..(583): Homolog of NCBI NO: 15528719 NR Description: putative RNA helicase, DRH1
  misc_feature (21)..(618): Homolog of NCBI NO: 6137207 NR Description: P72 DEAD box protein [Pisum sativum]
  misc_feature (4)..(590): Homolog of NCBI NO: 1169228 NR Description: RNA helicase-like protein DB10
  misc_feature (196)..(618): Homolog of NCBI NO: 23397305 NR Description: putative RNA helicase, DRH1 [Arabidopsis thaliana]
  misc_feature (1)..(172): Homolog of NCBI NO: 15241445 NR Description: DEAD box RNA helicase, putative [Arabidopsis
  misc_feature (155)..(604): Homolog of NCBI NO: 15241445 NR Description: DEAD box RNA helicase, putative [Arabidopsis
MAATAAASVVRYAPEDHTLPKPWKGLIDDRTGYLYFWNPETNVTQYEKPTPSLPPKFSPAVSVSSSVQVQQTDAYAPPKDDDKYSRGSERVSRFSEGGRSGPPYSNGAANGVGDSAYGAASTRVPLPSSAPASELSPEAYSRRHEITVSGGQVPPPLMSFEATGFPPELLREVLSAGFSAPTPIQAQSWPIAMQGRDIVAIAKTGSGKTLGYLIPGFLHLQRIRNDSRMGPTILVLSPTRELATQIQEEAVKFGRSSRISCTCLYGGAPKGPQLRDLERGADIVVATPGRLNDILEMRRISLRQISYLVLDEADRMLDMGFEPQIRKIVKEIPTKRQTLMYTATWPKGVRKIAADLLVNPAQVNIGNVDELVANKSITQHIEVVAPMEKQRRLEQILRSQEPGSKVIIFCSTKRMCDQLTRNLTRQFGAAAIHGDKSQPERDNVLNQFRSGRTPVLVATDVAARGLDVKDIRAVVNYDFPNGVEDYVHRIGRTGRAGATGQAFTFFGDQDSKHASDLIKILEGANQRVPPQIREMATRGGGGMNKFSRWGPPSGGRGRGGDSGYGGRGSFASRDRSSNGWGRERERSRSPERFNRAPPPSSTGSPPRSFHETMMMKHR

SEQ ID NO: 48576 - protein, 461 aa, Arabidopsis thaliana
  peptide (1)..(461): Ceres Seq. ID no. 13591990
  misc_feature (14)..(223): Pfam Name: DEAD/DEAH box helicase Pfam Description: DEAD/DEAH box helicase
  misc_feature (1)..(420): Homolog of NCBI NO: 10177293 NR Description: ATP-dependent RNA helicase-like protein
  misc_feature (1)..(430): Homolog of NCBI NO: 6324217 NR Description: ATP-dependent RNA helicase of DEAD box family;
  misc_feature (1)..(422): Homolog of NCBI NO: 15230730 NR Description: DEAD box RNA helicase, putative [Arabidopsis
  misc_feature (1)..(461): Homolog of NCBI NO: 34913856 NR Description: putative RNA helicase, DRH1
  misc_feature (1)..(426): Homolog of NCBI NO: 15528719 NR Description: putative RNA helicase, DRH1
  misc_feature (1)..(461): Homolog of NCBI NO: 6137207 NR Description: P72 DEAD box protein [Pisum sativum]
  misc_feature (1)..(433): Homolog of NCBI NO: 1169228 NR Description: RNA helicase-like protein DB10
  misc_feature (39)..(461): Homolog of NCBI NO: 23397305 NR Description: putative RNA helicase, DRH1 [Arabidopsis thaliana]
  misc_feature (1)..(15): Homolog of NCBI NO: 15241445 NR Description: DEAD box RNA helicase, putative [Arabidopsis
  misc_feature (1)..(447): Homolog of NCBI NO: 15241445 NR Description: DEAD box RNA helicase, putative [Arabidopsis
MSFEATGFPPELLREVLSAGFSAPTPIQAQSWPIAMQGRDIVAIAKTGSGKTLGYLIPGFLHLQRIRNDSRMGPTILVLSPTRELATQIQEEAVKFGRSSRISCTCLYGGAPKGPQLRDLERGADIVVATPGRLNDILEMRRISLRQISYLVLDEADRMLDMGFEPQIRKIVKEIPTKRQTLMYTATWPKGVRKIAADLLVNPAQVNIGNVDELVANKSITQHIEVVAPMEKQRRLEQILRSQEPGSKVIIFCSTKRMCDQLTRNLTRQFGAAAIHGDKSQPERDNVLNQFRSGRTPVLVATDVAARGLDVKDIRAVVNYDFPNGVEDYVHRIGRTGRAGATGQAFTFFGDQDSKHASDLIKILEGANQRVPPQIREMATRGGGGMNKFSRWGPPSGGRGRGGDSGYGGRGSFASRDRSSNGWGRERERSRSPERFNRAPPPSSTGSPPRSFHETMMMKHR

SEQ ID NO: 48577 - protein, 426 aa, Arabidopsis thaliana; identical to SEQ ID NO: 48549
  peptide (1)..(426): Ceres Seq. ID no. 13591991
  misc_feature (1)..(188): Pfam Name: DEAD/DEAH box helicase Pfam Description: DEAD/DEAH box helicase
  misc_feature (1)..(395): Homolog of NCBI NO: 1183961 NR Description: RNA elicase [Saccharomyces cerevisiae]
  misc_feature (1)..(385): Homolog of NCBI NO: 10177293 NR Description: ATP-dependent RNA helicase-like protein
  misc_feature (1)..(395): Homolog of NCBI NO: 6324217 NR Description: ATP-dependent RNA helicase of DEAD box family;
  misc_feature (1)..(387): Homolog of NCBI NO: 15230730 NR Description: DEAD box RNA helicase, putative [Arabidopsis
  misc_feature (1)..(426): Homolog of NCBI NO: 34913856 NR Description: putative RNA helicase, DRH1
  misc_feature (1)..(391): Homolog of NCBI NO: 15528719 NR Description: putative RNA helicase, DRH1
  misc_feature (1)..(426): Homolog of NCBI NO: 6137207 NR Description: P72 DEAD box protein [Pisum sativum]
  misc_feature (1)..(398): Homolog of NCBI NO: 1169228 NR Description: RNA helicase-like protein DB10
  misc_feature (4)..(426): Homolog of NCBI NO: 23397305 NR Description: putative RNA helicase, DRH1 [Arabidopsis thaliana]
  misc_feature (1)..(412): Homolog of NCBI NO: 15241445 NR Description: DEAD box RNA helicase, putative [Arabidopsis

SEQ ID NO: 48578 - DNA, 1918 bp, Arabidopsis thaliana
  misc_feature (1)..(1918): Ceres Seq. ID no. 13591992
  misc_feature: MA Experiment ID: 108434 Result: Down-regulated in Transcription
  misc_feature: MA Experiment 108434 PARAMETER Experiment Name: At_Root_Tips_cDNA_P Parameter: Tissue Value: Root Tips
  misc_feature: MA Experiment ID: 108464 Result: Up-regulated in Transcription
  misc_feature: MA Experiment 108464 PARAMETER Experiment Name: At_Germinating_Seeds_cDNA_P Parameter: Age (day) Value: 4 vs. 0
  misc_feature: MA Experiment 108464 PARAMETER Experiment Name: At_Germinating_Seeds_cDNA_P Parameter: Tissue Value: Germinating Seeds
  misc_feature: MA Experiment ID: 108577 Result: Down-regulated in Transcription
  misc_feature: MA Experiment 108577 PARAMETER Experiment Name: At_42deg_Heat_cDNA_P Parameter: Temperature (deg C) Value: 42 vs. 22
  misc_feature: MA Experiment 108577 PARAMETER Experiment Name: At_42deg_Heat_cDNA_P Parameter: Timepoint (hr) Value: 6
  misc_feature: MA Experiment 108577 PARAMETER Experiment Name: At_42deg_Heat_cDNA_P Parameter: Tissue Value: Aerial
  misc_feature: MA Experiment ID: 20000111 Result: Down-regulated in Transcription
  misc_feature: MA Experiment 20000111 PARAMETER Experiment Name: At_42deg_Heat_cDNA_P Parameter: Temperature (deg C) Value: 42 vs. 22
  misc_feature: MA Experiment 20000111 PARAMETER Experiment Name: At_42deg_Heat_cDNA_P Parameter: Timepoint (hr) Value: 6
  misc_feature: MA Experiment 20000111 PARAMETER Experiment Name: At_42deg_Heat_cDNA_P Parameter: Tissue Value: Aerial
  misc_feature: MA Experiment ID: 20000185 Result: Down-regulated in Transcription
  misc_feature: MA Experiment 20000185 PARAMETER Experiment Name: At_Roots__P Parameter: Age (day) Value: 7 vs. 21
  misc_feature: MA Experiment 20000185 PARAMETER Experiment Name: At_Roots__P Parameter: Organism Value: A. thaliana
  misc_feature: MA Experiment 20000185 PARAMETER Experiment Name: At_Roots__P Parameter: Tissue Value: Roots vs. Whole Plant
  misc_feature: MA Experiment ID: 20001558 Result: Down-regulated in Transcription
  misc_feature: MA Experiment 20001558 PARAMETER Experiment Name: At_Drought_Soil_Dry_P Parameter: Age (day) Value: 27
  misc_feature: MA Experiment 20001558 PARAMETER Experiment Name: At_Drought_Soil_Dry_P Parameter: Organism Value: A. thaliana
  misc_feature: MA Experiment 20001558 PARAMETER Experiment Name: At_Drought_Soil_Dry_P Parameter: Plant Line Value: WS
  misc_feature: MA Experiment 20001558 PARAMETER Experiment Name: At_Drought_Soil_Dry_P Parameter: Post Timepoint (hr) Value: 6
  misc_feature: MA Experiment 20001558 PARAMETER Experiment Name: At_Drought_Soil_Dry_P Parameter: Post-Treatment Value: Re-Water vs. No Drought
  misc_feature: MA Experiment 20001558 PARAMETER Experiment Name: At_Drought_Soil_Dry_P Parameter: Timepoint (day) Value: 13
  misc_feature: MA Experiment 20001558 PARAMETER Experiment Name: At_Drought_Soil_Dry_P Parameter: Treatment Value: Drought vs. No Drought
  misc_feature: MA Experiment ID: 20001560 Result: Down-regulated in Transcription
  misc_feature: MA Experiment 20001560 PARAMETER Experiment Name: At_Drought_Soil_Dry_P Parameter: Age (day) Value: 28
  misc_feature: MA Experiment 20001560 PARAMETER Experiment Name: At_Drought_Soil_Dry_P Parameter: Organism Value: A. thaliana
  misc_feature: MA Experiment 20001560 PARAMETER Experiment Name: At_Drought_Soil_Dry_P Parameter: Plant Line Value: WS
  misc_feature: MA Experiment 20001560 PARAMETER Experiment Name: At_Drought_Soil_Dry_P Parameter: Post Timepoint (hr) Value: None
  misc_feature: MA Experiment 20001560 PARAMETER Experiment Name: At_Drought_Soil_Dry_P Parameter: Post-Treatment Value: None
  misc_feature: MA Experiment 20001560 PARAMETER Experiment Name: At_Drought_Soil_Dry_P Parameter: Timepoint (day) Value: 14
  misc_feature: MA Experiment 20001560 PARAMETER Experiment Name: At_Drought_Soil_Dry_P Parameter: Treatment Value: Drought vs. No Drought
gggcctcttcttttgaatcctcttagctctggcatcttcagatcgagacttggatttatcagcttctccgtgctcctttagcttctgctcggttttgttttttttagtctgacgatgagtaacaactggaaatccgttcgattaaggcttcaaaatcgtactctcgtgtttcttctggtgattttgagcttcggttcttgctattcgttgaaatctcaaggtgatggttttctggaatccgtgacgaaagatctatggtcagatatagatgctgaggatttgagagcagttggttttcacaggaaattacttggccgttttcgtaacccgtacacccatttgaatgcgttcagggaccgccctgtggcaagagctacacctccgtcatcttcggtttctacgagacctgatgccaaaagatcctctacattgcctccgccacaaaaaagtcctcctgcgcaacatgtttctgctccacctccttttgtgcaccatgtgactttacctagtctaacaagcagctccaaaacttcttcaaacagcacaattcctatagtggctggctgcatagcgggtgctgtgtttatcctccttttagctactggtgttttcttttttaaaagtaaggctgggaaatctgtgaatccctggcgtacaggtcttagtggacaacttcagaaagtgttcataactggtgtccccaaactcaaaagatctgagattgaagctgcctgtgaagattttagtaatgtcattgggtcttgccccattggtacattgttcaaagggacgctatcaagtggggtggagatagctgtggcttctgttgctactgcgtctgccaaagaatggacaaataatatagaaatgcagttcagaaagaagatcgaaatgttatccaagataaaccacaagaattttgtcaaccttcttggttactgtgaagaagaagaacctttcactaggatcttggtctttgaatatgcatcaaacggaacagtctttgaacatttacactataaagaatcagaacacttggactgggtaatgcggctaagaatagcaatgggcatagcttattgccttgaccatatgcacggactcaagccacctatagtccacagcaatcttctctcatcatcagttcaactcacagaggactacgcagtcaaaattgcggatttcaattttggatatttaaaaggcccatccgagacagaaagcagcaccaatgcactcatagatacaaacatctcagaaacaacacaagaagacaatgttcacagcttcgggttgctgttgtttgaactgatgacaggaaaactcccagagtcagttcaaaaaggtgactcgatagataccggattggctgtcttcttgagaggaaagacattaagggagatggtggatccgacaattgaaagctttgacgagaagattgagaatataggtgaagtgatcaaaagctgcataagagcagacgcgaaacagagaccgataatgaaggaagtcacagggagattacgagagatcactggattatcaccagacgacactatcccaaaactttcaccactctggtgggcagagctggaagttctgtccactgcgtgaagagacaactactgaacttcacaaaaaaatctgtaagtattaatatgaagatttgagtgaggtttttgagtctcttagaagctcttggcttctctttaggctactttcatctatctatctatatataagtatggaacttagtttatataacggctttaaaattcggtggatctatttggtcgtttatgtcgtaaacagaaaatgtcctaatcacggtaatacccctttttggtgtgcataatgttggtgggtggttactgtctttgtaaattagtgttactatgttcttggcggccgcgaattc

SEQ ID NO: 48579 - protein, 499 aa, Arabidopsis thaliana; identical to SEQ ID NO: 46195
  peptide (1)..(499): Ceres Seq. ID no. 13591993
  misc_feature (260)..(499): Homolog of NCBI NO: 25408681 NR Description: probable protein kinase [imported] - Arabidopsis
  misc_feature (88)..(498): Homolog of NCBI NO: 9758931 NR Description: receptor protein kinase-like protein [Arabidopsis
  misc_feature (84)..(498): Homolog of NCBI NO: 30684487 NR Description: leucine-rich repeat transmembrane protein kinase,
  misc_feature (84)..(498): Homolog of NCBI NO: 7486276 NR Description: hypothetical protein F28A21.50 - Arabidopsis
  misc_feature (84)..(498): Homolog of NCBI NO: 7268658 NR Description: putative protein (fragment) [Arabidopsis thaliana]
  misc_feature (88)..(498): Homolog of NCBI NO: 15242513 NR Description: leucine-rich repeat transmembrane protein kinase,
  misc_feature (175)..(498): Homolog of NCBI NO: 28916446 NR Description: ser-thr protein kinase [Gossypium hirsutum]
  misc_feature (15)..(499): Homolog of NCBI NO: 18405327 NR Description: protein kinase -related [Arabidopsis thaliana]
  misc_feature (15)..(499): Homolog of NCBI NO: 4588001 NR Description: hypothetical Ser-Thr protein kinase [Arabidopsis
  misc_feature (1)..(499): Homolog of NCBI NO: 15228810 NR Description: putative protein kinase [Arabidopsis thaliana]

SEQ ID NO: 48580 - DNA, 2282 bp, Arabidopsis thaliana
  misc_feature (1)..(2282): Ceres Seq. ID no. 12575395
  misc_feature: MA Experiment ID: 20000171 Result: Down-regulated in Transcription
  misc_feature: MA Experiment 20000171 PARAMETER Experiment Name: At_42deg_Heat_P Parameter: Age (day) Value: 14
  misc_feature: MA Experiment 20000171 PARAMETER Experiment Name: At_42deg_Heat_P Parameter: Organism Value: A. thaliana
  misc_feature: MA Experiment 20000171 PARAMETER Experiment Name: At_42deg_Heat_P Parameter: Plant Line Value: WS
  misc_feature: MA Experiment 20000171 PARAMETER Experiment Name: At_42deg_Heat_P Parameter: Temperature (deg C) Value: 42 vs. 22
  misc_feature: MA Experiment 20000171 PARAMETER Experiment Name: At_42deg_Heat_P Parameter: Timepoint (hr) Value: 1
  misc_feature: MA Experiment 20000171 PARAMETER Experiment Name: At_42deg_Heat_P Parameter: Tissue Value: Aerial
  misc_feature: MA Experiment ID: 20000173 Result: Down-regulated in Transcription
  misc_feature: MA Experiment 20000173 PARAMETER Experiment Name: At_42deg_Heat_P Parameter: Age (day) Value: 14
  misc_feature: MA Experiment 20000173 PARAMETER Experiment Name: At_42deg_Heat_P Parameter: Organism Value: A. thaliana
  misc_feature: MA Experiment 20000173 PARAMETER Experiment Name: At_42deg_Heat_P Parameter: Plant Line Value: WS
  misc_feature: MA Experiment 20000173 PARAMETER Experiment Name: At_42deg_Heat_P Parameter: Temperature (deg C) Value: 42 vs. 22
  misc_feature: MA Experiment 20000173 PARAMETER Experiment Name: At_42deg_Heat_P Parameter: Timepoint (hr) Value: 6
  misc_feature: MA Experiment 20000173 PARAMETER Experiment Name: At_42deg_Heat_P Parameter: Tissue Value: Aerial
  misc_feature: MA Experiment ID: 20000184 Result: Down-regulated in Transcription
  misc_feature: MA Experiment 20000184 PARAMETER Experiment Name: At_Shoots__P Parameter: Age (day) Value: 7
  misc_feature: MA Experiment 20000184 PARAMETER Experiment Name: At_Shoots__P Parameter: Tissue Value: Shoots vs. Whole Plant
  misc_feature: MA Experiment ID: 20000185 Result: Down-regulated in Transcription
  misc_feature: MA Experiment 20000185 PARAMETER Experiment Name: At_Roots__P Parameter: Age (day) Value: 7 vs. 21
  misc_feature: MA Experiment 20000185 PARAMETER Experiment Name: At_Roots__P Parameter: Organism Value: A. thaliana
  misc_feature: MA Experiment 20000185 PARAMETER Experiment Name: At_Roots__P Parameter: Tissue Value: Roots vs. Whole Plant
  misc_feature: MA Experiment ID: 20000234 Result: Down-regulated in Transcription
  misc_feature: MA Experiment 20000234 PARAMETER Experiment Name: At_Siliques_P Parameter: Age (day) Value: 21
  misc_feature: MA Experiment 20000234 PARAMETER Experiment Name: At_Siliques_P Parameter: Organism Value: A. thaliana
  misc_feature: MA Experiment 20000234 PARAMETER Experiment Name: At_Siliques_P Parameter: Plant Line Value: WS
  misc_feature: MA Experiment 20000234 PARAMETER Experiment Name: At_Siliques_P Parameter: Tissue Value: Less Than 5mm Siliques vs. Whole Plant
  misc_feature: MA Experiment ID: 20000235 Result: Down-regulated in Transcription
  misc_feature: MA Experiment 20000235 PARAMETER Experiment Name: At_Siliques_P Parameter: Age (day) Value: 21
  misc_feature: MA Experiment 20000235 PARAMETER Experiment Name: At_Siliques_P Parameter: Organism Value: A. thaliana
  misc_feature: MA Experiment 20000235 PARAMETER Experiment Name: At_Siliques_P Parameter: Plant Line Value: WS
  misc_feature: MA Experiment 20000235 PARAMETER Experiment Name: At_Siliques_P Parameter: Tissue Value: 5-10mm Siliques vs. Whole Plant
  misc_feature: MA Experiment ID: 20000264 Result: Down-regulated in Transcription
  misc_feature: MA Experiment 20000264 PARAMETER Experiment Name: At_Open_Flower_P Parameter: Age (day) Value: 21
  misc_feature: MA Experiment 20000264 PARAMETER Experiment Name: At_Open_Flower_P Parameter: Plant Line Value: WS
  misc_feature: MA Experiment 20000264 PARAMETER Experiment Name: At_Open_Flower_P Parameter: Tissue Value: Open Flower vs. Whole Plant
  misc_feature: MA Experiment ID: 20000265 Result: Down-regulated in Transcription
  misc_feature: MA Experiment 20000265 PARAMETER Experiment Name: At_Open_Flower_P Parameter: Age (day) Value: 21
  misc_feature: MA Experiment 20000265 PARAMETER Experiment Name: At_Open_Flower_P Parameter: Plant Line Value: WS
  misc_feature: MA Experiment 20000265 PARAMETER Experiment Name: At_Open_Flower_P Parameter: Tissue Value: Closed Flower vs. Whole Plant
  misc_feature: MA Experiment ID: 20000437 Result: Down-regulated in Transcription
  misc_feature: MA Experiment 20000437 PARAMETER Experiment Name: At_Drought_P Parameter: Age (day) Value: 8
  misc_feature: MA Experiment 20000437 PARAMETER Experiment Name: At_Drought_P Parameter: Organism Value: A. thaliana
  misc_feature: MA Experiment 20000437 PARAMETER Experiment Name: At_Drought_P Parameter: Plant Line Value: WS
  misc_feature: MA Experiment 20000437 PARAMETER Experiment Name: At_Drought_P Parameter: Timepoint (hr) Value: 24
  misc_feature: MA Experiment 20000437 PARAMETER Experiment Name: At_Drought_P Parameter: Tissue Value: Whole Plant
  misc_feature: MA Experiment 20000437 PARAMETER Experiment Name: At_Drought_P Parameter: Treatment Value: Drought vs. No Drought
  misc_feature: MA Experiment ID: 20000438 Result: Down-regulated in Transcription
  misc_feature: MA Experiment 20000438 PARAMETER Experiment Name: At_Shoots__P Parameter: Age (day) Value: 14
  misc_feature: MA Experiment 20000438 PARAMETER Experiment Name: At_Shoots__P Parameter: Tissue Value: Shoots vs. Whole Plant
  misc_feature: MA Experiment ID: 20000441 Result: Up-regulated in Transcription
  misc_feature: MA Experiment 20000441 PARAMETER Experiment Name: At_1uM_BR-BRZ__P Parameter: Tissue Value: Shoot Apices
  misc_feature: MA Experiment 20000441 PARAMETER Experiment Name: At_1uM_BR-BRZ__P Parameter: Treatment Value: 1uM BR vs. No Treatment
  misc_feature: MA Experiment ID: 20000443 Result: Up-regulated in Transcription
  misc_feature: MA Experiment 20000443 PARAMETER Experiment Name: At_1uM_BR-BRZ__P Parameter: Tissue Value: Shoot Apices
  misc_feature: MA Experiment 20000443 PARAMETER Experiment Name: At_1uM_BR-BRZ__P Parameter: Treatment Value: 1uM BRZ vs. No Treatment
  misc_feature: MA Experiment ID: 20000527 Result: Up-regulated in Transcription
  misc_feature: MA Experiment 20000527 PARAMETER Experiment Name: At_10percent_PEG_P Parameter: Age (day) Value: 20
  misc_feature: MA Experiment 20000527 PARAMETER Experiment Name: At_10percent_PEG_P Parameter: Organism Value: A. thaliana
  misc_feature: MA Experiment 20000527 PARAMETER Experiment Name: At_10percent_PEG_P Parameter: Plant Line Value: WS
  misc_feature: MA Experiment 20000527 PARAMETER Experiment Name: At_10percent_PEG_P Parameter: Timepoint (day) Value: 20
  misc_feature: MA Experiment 20000527 PARAMETER Experiment Name: At_10percent_PEG_P Parameter: Tissue Value: Whole Plant
  misc_feature: MA Experiment 20000527 PARAMETER Experiment Name: At_10percent_PEG_P Parameter: Treatment Value: 10percent PEG vs. No Treatment
  misc_feature: MA Experiment ID: 20000573 Result: Down-regulated in Transcription
  misc_feature: MA Experiment 20000573 PARAMETER Experiment Name: At_100uM_ABA_Mutants__P Parameter: Organism Value: A. thaliana
  misc_feature: MA Experiment 20000573 PARAMETER Experiment Name: At_100uM_ABA_Mutants__P Parameter: Plant Line Value: CS22 vs. Ler wt
  misc_feature: MA Experiment 20000573 PARAMETER Experiment Name: At_100uM_ABA_Mutants__P Parameter: Timepoint (hr) Value: N/A
  misc_feature: MA Experiment 20000573 PARAMETER Experiment Name: At_100uM_ABA_Mutants__P Parameter: Tissue Value: Whole Plant
  misc_feature: MA Experiment 20000573 PARAMETER Experiment Name: At_100uM_ABA_Mutants__P Parameter: Treatment Value: None
  misc_feature: MA Experiment ID: 20000574 Result: Down-regulated in Transcription
  misc_feature: MA Experiment 20000574 PARAMETER Experiment Name: At_100uM_ABA_Mutants__P Parameter: Organism Value: A. thaliana
  misc_feature: MA Experiment 20000574 PARAMETER Experiment Name: At_100uM_ABA_Mutants__P Parameter: Plant Line Value: CS23 vs. Ler wt
  misc_feature: MA Experiment 20000574 PARAMETER Experiment Name: At_100uM_ABA_Mutants__P Parameter: Timepoint (hr) Value: N/A
  misc_feature: MA Experiment 20000574 PARAMETER Experiment Name: At_100uM_ABA_Mutants__P Parameter: Tissue Value: Whole Plant
  misc_feature: MA Experiment 20000574 PARAMETER Experiment Name: At_100uM_ABA_Mutants__P Parameter: Treatment Value: None
  misc_feature: MA Experiment ID: 20001560 Result: Down-regulated in Transcription
  misc_feature: MA Experiment 20001560 PARAMETER Experiment Name: At_Drought_Soil_Dry_P Parameter: Age (day) Value: 28
  misc_feature: MA Experiment 20001560 PARAMETER Experiment Name: At_Drought_Soil_Dry_P Parameter: Organism Value: A. thaliana
  misc_feature: MA Experiment 20001560 PARAMETER Experiment Name: At_Drought_Soil_Dry_P Parameter: Plant Line Value: WS
  misc_feature: MA Experiment 20001560 PARAMETER Experiment Name: At_Drought_Soil_Dry_P Parameter: Post Timepoint (hr) Value: None
  misc_feature: MA Experiment 20001560 PARAMETER Experiment Name: At_Drought_Soil_Dry_P Parameter: Post-Treatment Value: None
  misc_feature: MA Experiment 20001560 PARAMETER Experiment Name: At_Drought_Soil_Dry_P Parameter: Timepoint (day) Value: 14
  misc_feature: MA Experiment 20001560 PARAMETER Experiment Name: At_Drought_Soil_Dry_P Parameter: Treatment Value: Drought vs. No Drought
aaacatgcctaactcgattctctttcttcttctttcattcctgtatctcacaaactgcgttgctcaatctccatcacaaacttgtcctttagatttctctcatgtcctaacaatcccatggaacacaacagattgtcaaaagtccgacaaatcagccgatagcaagaacagttgttgccaatctcttttaactctaatcggaatccctctagctcatcgtctcaaacaaacttccaatttccgtctcccaaatctcgctacttcaatctcttgtctcaacaatctccaaacgaagcttagttcactctctctatcttcgaatctcacctctctctgtttcgatccgaatcagttcgtcatcaataacgaaacctgtgctggaatccaaacgactcaagattgggtatctcgtctcggtccatctacggcgcttgactccgcctgtagcagtggtctcactgatctaacgcgatgcgacgcttgcgtggcggctgggtttagggttcaaaaacagctcatcactttggacggtaatagctctcacggtgtttattgttaccattttgtggttacttacgctgctggtattgttaacaagaaaggacctgagagtgatgatgctttgtcttgtctcttctctttgagtttgagatctccattgaactcaaagaagaaaagacacacggtggctcttgctttagggataaccggagctattttcggggctctggttattgccggtttgatttgtttgtatttccggtttggtaaagctgttaaaggaggagaggttggttgggaggatcaagggtctagaccgaaatggagaccaaacactggctctatctggttcaaaatcgaggaactagagaaagctacgaataacttctcgcagaagaatttcatcggtcgaggcgggtttggttttgtttacaaaggggttttaccagatggatcggttatcgcggttaagaaggtgatagagtctgagtttcaaggggatgcagagtttcgtaatgaggttgagatcattagcaatttgaaacataggaatcttgttccgcttagaggttgtagtatggtggatgatgatagtgagagtcagagatatcttgtttatgattacatgtctaatggaaatctcgatgatcacttgtttcctcgaggtgagactacgaagatgccattgagctggcctcagagaaagagcatcattttggatgtggctaaagggttggcttatttgcattacggtgtgaaacccgctatttatcaccgggatattaaaggtacgaacatattgttagatgtcgatatgagagcgagagttgcggatttcggtttagctaaacagagtagagaaggagagtctcatctcactaccagagttgcgggaacacacggttacttggctccagagtatgccctctatggtcaattaaccgagaaaagcgatgtgtatagcttcggggttgttatattggagatcatgtgtggaaggaaagctcttgatctgtctacttctggatcaccaaacacttttctgatcacagattgggcttggtcattggtaaaagcagggaaaacagaggaagctcttgagcagtctttgttgagagaggaaggctcagggctctcgaatccgaaagggataatggagagattcttgcaagttgggatattgtgtgcccatgtattggttgctttaaggccaacaatattagatgcattgaaaatgcttgaaggagacatcgaggttcctcctattccggaccgaccagtcccgctcgcgcatccttcgtaccgtatggacggaaacggattcacaatatcgcctgcgcttagcggactacaaatacattccggagatatgctcagatgaaaaaactaggctcatgtgagattttattttgtaaatatttgaaagcaacgatcacgtcttttgattacatcatgtaaaacaatttcagaatgttgtagtatatcataagtagggaaaacatatagttcattgtaggattatattctaaatcaaagtagaggcgaaggctgagatgcgggggtgagggcggtagctggtggaagccttccggtacaagtgcaaaagttattaaggcactcacatttggtgcagtggttcacagtcctgcaccatcttgacactaatggtcctctcgcctcagccaccatgtaaaattctgcaaccattcaaatttgtgtttatttttgtccgttgcaaaatttatatgtatataaataagaagaaattacatatttttttt

SEQ ID NO: 48581 - protein, 626 aa, Arabidopsis thaliana
  peptide (1)..(626): Ceres Seq. ID no. 12575396
  misc_feature (219)..(593): Homolog of NCBI NO: 15223169 NR Description: putative protein kinase; protein id: At1g70520.1
  misc_feature (284)..(593): Homolog of NCBI NO: 15220545 NR Description: receptor-like serine/threonine kinase, putative
  misc_feature (284)..(593): Homolog of NCBI NO: 12321409 NR Description: receptor protein kinase, putative [Arabidopsis
  misc_feature (279)..(593): Homolog of NCBI NO: 15220541 NR Description: receptor-like serine threonine kinase, putative
  misc_feature (214)..(598): Homolog of NCBI NO: 9972372 NR Description: Putative receptor-like serine/threonine kinase -
  misc_feature (214)..(598): Homolog of NCBI NO: 25513647 NR Description: probable receptor-like serine/threonine kinase -
  misc_feature (196)..(593): Homolog of NCBI NO: 25403090 NR Description: probable receptor-like serine/threonine kinase
  misc_feature (1)..(596): Homolog of NCBI NO: 34914972 NR Description: Ser/Thr protein kinase-like protein
  misc_feature (13)..(596): Homolog of NCBI NO: 15227189 NR Description: putative protein kinase
  misc_feature (25)..(626): Homolog of NCBI NO: 20161445 NR Description: putative serine/threonine protein kinase
NMPNSILFLLLSFLYLTNCVAQSPSQTCPLDFSHVLTIPWNTTDCQKSDKSADSKNSCCQSLLTLIGIPLAHRLKQTSNFRLPNLATSISCLNNLQTKLSSLSLSSNLTSLCFDPNQFVINNETCAGIQTTQDWVSRLGPSTALDSACSSGLTDLTRCDACVAAGFRVQKQLITLDGNSSHGVYCYHFVVTYAAGIVNKKGPESDDALSCLFSLSLRSPLNSKKKRHTVALALGITGAIFGALVIAGLICLYFRFGKAVKGGEVGWEDQGSRPKWRPNTGSIWFKIEELEKATNNFSQKNFIGRGGFGFVYKGVLPDGSVIAVKKVIESEFQGDAEFRNEVEIISNLKHRNLVPLRGCSMVDDDSESQRYLVYDYMSNGNLDDHLFPRGETTKMPLSWPQRKSIILDVAKGLAYLHYGVKPAIYHRDIKGTNILLDVDMRARVADFGLAKQSREGESHLTTRVAGTHGYLAPEYALYGQLTEKSDVYSFGVVILEIMCGRKALDLSTSGSPNTFLITDWAWSLVKAGKTEEALEQSLLREEGSGLSNPKGIMERFLQVGILCAHVLVALRPTILDALKMLEGDIEVPPIPDRPVPLAHPSYRMDGNGFTISPALSGLQIHSGDMLR

SEQ ID NO: 48582 - protein, 625 aa, Arabidopsis thaliana
  peptide (1)..(625): Ceres Seq. ID no. 12575397
  misc_feature (218)..(592): Homolog of NCBI NO: 15223169 NR Description: putative protein kinase; protein id: At1g70520.1
  misc_feature (283)..(592): Homolog of NCBI NO: 15220545 NR Description: receptor-like serine/threonine kinase, putative
  misc_feature (283)..(592): Homolog of NCBI NO: 12321409 NR Description: receptor protein kinase, putative [Arabidopsis
  misc_feature (278)..(592): Homolog of NCBI NO: 15220541 NR Description: receptor-like serine threonine kinase, putative
  misc_feature (213)..(597): Homolog of NCBI NO: 9972372 NR Description: Putative receptor-like serine/threonine kinase -
  misc_feature (213)..(597): Homolog of NCBI NO: 25513647 NR Description: probable receptor-like serine/threonine kinase -
  misc_feature (195)..(592): Homolog of NCBI NO: 25403090 NR Description: probable receptor-like serine/threonine kinase
  misc_feature (1)..(595): Homolog of NCBI NO: 34914972 NR Description: Ser/Thr protein kinase-like protein
  misc_feature (12)..(595): Homolog of NCBI NO: 15227189 NR Description: putative protein kinase
  misc_feature (24)..(625): Homolog of NCBI NO: 20161445 NR Description: putative serine/threonine protein kinase
MPNSILFLLLSFLYLTNCVAQSPSQTCPLDFSHVLTIPWNTTDCQKSDKSADSKNSCCQSLLTLIGIPLAHRLKQTSNFRLPNLATSISCLNNLQTKLSSLSLSSNLTSLCFDPNQFVINNETCAGIQTTQDWVSRLGPSTALDSACSSGLTDLTRCDACVAAGFRVQKQLITLDGNSSHGVYCYHFVVTYAAGIVNKKGPESDDALSCLFSLSLRSPLNSKKKRHTVALALGITGAIFGALVIAGLICLYFRFGKAVKGGEVGWEDQGSRPKWRPNTGSIWFKIEELEKATNNFSQKNFIGRGGFGFVYKGVLPDGSVIAVKKVIESEFQGDAEFRNEVEIISNLKHRNLVPLRGCSMVDDDSESQRYLVYDYMSNGNLDDHLFPRGETTKMPLSWPQRKSIILDVAKGLAYLHYGVKPAIYHRDIKGTNILLDVDMRARVADFGLAKQSREGESHLTTRVAGTHGYLAPEYALYGQLTEKSDVYSFGVVILEIMCGRKALDLSTSGSPNTFLITDWAWSLVKAGKTEEALEQSLLREEGSGLSNPKGIMERFLQVGILCAHVLVALRPTILDALKMLEGDIEVPPIPDRPVPLAHPSYRMDGNGFTISPALSGLQIHSGDMLR

SEQ ID NO: 48583 - DNA, 2452 bp, Arabidopsis thaliana; identical to SEQ ID NO: 48437
  misc_feature (1)..(2452): Ceres Seq. ID no. 12639042
  misc_feature: MA Experiment ID: 20000173 Result: Down-regulated in Transcription
  misc_feature: MA Experiment 20000173 PARAMETER Experiment Name: At_42deg_Heat_P Parameter: Age (day) Value: 14
  misc_feature: MA Experiment 20000173 PARAMETER Experiment Name: At_42deg_Heat_P Parameter: Organism Value: A. thaliana
  misc_feature: MA Experiment 20000173 PARAMETER Experiment Name: At_42deg_Heat_P Parameter: Plant Line Value: WS
  misc_feature: MA Experiment 20000173 PARAMETER Experiment Name: At_42deg_Heat_P Parameter: Temperature (deg C) Value: 42 vs. 22
  misc_feature: MA Experiment 20000173 PARAMETER Experiment Name: At_42deg_Heat_P Parameter: Timepoint (hr) Value: 6
  misc_feature: MA Experiment 20000173 PARAMETER Experiment Name: At_42deg_Heat_P Parameter: Tissue Value: Aerial
  misc_feature: MA Experiment ID: 20000180 Result: Down-regulated in Transcription
  misc_feature: MA Experiment 20000180 PARAMETER Experiment Name: At_Germinating_Seeds_P Parameter: Age (hr) Value: 24 vs. 0
  misc_feature: MA Experiment 20000180 PARAMETER Experiment Name: At_Germinating_Seeds_P Parameter: Tissue Value: Germinating Seeds
  misc_feature: MA Experiment ID: 20000182 Result: Up-regulated in Transcription
  misc_feature: MA Experiment 20000182 PARAMETER Experiment Name: At_2mM_SA_P Parameter: Age (day) Value: 14
  misc_feature: MA Experiment 20000182 PARAMETER Experiment Name: At_2mM_SA_P Parameter: Organism Value: A. thaliana
  misc_feature: MA Experiment 20000182 PARAMETER Experiment Name: At_2mM_SA_P Parameter: Plant Line Value: WS
  misc_feature: MA Experiment 20000182 PARAMETER Experiment Name: At_2mM_SA_P Parameter: Timepoint (hr) Value: 6
  misc_feature: MA Experiment 20000182 PARAMETER Experiment Name: At_2mM_SA_P Parameter: Tissue Value: Aerial
  misc_feature: MA Experiment 20000182 PARAMETER Experiment Name: At_2mM_SA_P Parameter: Treatment Value: 2mM SA vs. No Treatment
  misc_feature: MA Experiment ID: 20000184 Result: Down-regulated in Transcription
  misc_feature: MA Experiment 20000184 PARAMETER Experiment Name: At_Shoots__P Parameter: Age (day) Value: 7
  misc_feature: MA Experiment 20000184 PARAMETER Experiment Name: At_Shoots__P Parameter: Tissue Value: Shoots vs. Whole Plant
  misc_feature: MA Experiment ID: 20001451 Result: Down-regulated in Transcription
  misc_feature: MA Experiment 20001451 PARAMETER Experiment Name: At_Far-red-induction_P Parameter: Age (day) Value: 7
  misc_feature: MA Experiment 20001451 PARAMETER Experiment Name: At_Far-red-induction_P Parameter: Light Value: Far-red vs. White
  misc_feature: MA Experiment 20001451 PARAMETER Experiment Name: At_Far-red-induction_P Parameter: Organism Value: A. thaliana
  misc_feature: MA Experiment 20001451 PARAMETER Experiment Name: At_Far-red-induction_P Parameter: Plant Line Value: Columbia
  misc_feature: MA Experiment 20001451 PARAMETER Experiment Name: At_Far-red-induction_P Parameter: Timepoint (hr) Value: 24
  misc_feature: MA Experiment 20001451 PARAMETER Experiment Name: At_Far-red-induction_P Parameter: Tissue Value: Whole Plant
  misc_feature: MA Experiment ID: 20001560 Result: Down-regulated in Transcription
  misc_feature: MA Experiment 20001560 PARAMETER Experiment Name: At_Drought_Soil_Dry_P Parameter: Age (day) Value: 28
  misc_feature: MA Experiment 20001560 PARAMETER Experiment Name: At_Drought_Soil_Dry_P Parameter: Organism Value: A. thaliana
  misc_feature: MA Experiment 20001560 PARAMETER Experiment Name: At_Drought_Soil_Dry_P Parameter: Plant Line Value: WS
  misc_feature: MA Experiment 20001560 PARAMETER Experiment Name: At_Drought_Soil_Dry_P Parameter: Post Timepoint (hr) Value: None
  misc_feature: MA Experiment 20001560 PARAMETER Experiment Name: At_Drought_Soil_Dry_P Parameter: Post-Treatment Value: None
  misc_feature: MA Experiment 20001560 PARAMETER Experiment Name: At_Drought_Soil_Dry_P Parameter: Timepoint (day) Value: 14
  misc_feature: MA Experiment 20001560 PARAMETER Experiment Name: At_Drought_Soil_Dry_P Parameter: Treatment Value: Drought vs. No Drought

SEQ ID NO: 48584 - protein, 816 aa, Arabidopsis thaliana; identical to SEQ ID NO: 48438
  peptide (1)..(816): Ceres Seq. ID no. 12639043
  misc_feature (734)..(806): Pfam Name: U-box domain Pfam Description: U-box domain
  misc_feature (734)..(806): Pfam Name: U-box domain Pfam Description: U-box domain
  misc_feature (324)..(804): Homolog of NCBI NO: 30697549 NR Description: protein kinase family [Arabidopsis thaliana]
  misc_feature (324)..(804): Homolog of NCBI NO: 9758471 NR Description: contains similarity to receptor-like protein
  misc_feature (54)..(206): Homolog of NCBI NO: 25518361 NR Description: hypothetical protein F17F16.3 [imported] -
  misc_feature (225)..(726): Homolog of NCBI NO: 25518361 NR Description: hypothetical protein F17F16.3 [imported] -
  misc_feature (43)..(223): Homolog of NCBI NO: 15224129 NR Description: putative protein kinase; protein id: At2g24370.1
  misc_feature (324)..(804): Homolog of NCBI NO: 30697549 NR Description: protein kinase family [Arabidopsis thaliana]
  misc_feature (54)..(206): Homolog of NCBI NO: 25518361 NR Description: hypothetical protein F17F16.3 [imported] -
  misc_feature (43)..(223): Homolog of NCBI NO: 15224129 NR Description: putative protein kinase; protein id: At2g24370.1
  misc_feature (48)..(806): Homolog of NCBI NO: 15224775 NR Description: putative protein kinase; protein id: At2g19410.1
  misc_feature (324)..(806): Homolog of NCBI NO: 15240280 NR Description: putative protein; protein id: At5g61550.1
  misc_feature (55)..(305): Homolog of NCBI NO: 15240280 NR Description: putative protein; protein id: At5g61550.1
  misc_feature (55)..(806): Homolog of NCBI NO: 37536860 NR Description: putative protein kinase [Oryza sativa (japonica
  misc_feature (217)..(718): Homolog of NCBI NO: 15224129 NR Description: putative protein kinase; protein id: At2g24370.1
  misc_feature (225)..(726): Homolog of NCBI NO: 25518361 NR Description: hypothetical protein F17F16.3 [imported] -
  misc_feature (324)..(804): Homolog of NCBI NO: 9758471 NR Description: contains similarity to receptor-like protein
  misc_feature (217)..(718): Homolog of NCBI NO: 15224129 NR Description: putative protein kinase; protein id: At2g24370.1
  misc_feature (55)..(806): Homolog of NCBI NO: 37536860 NR Description: putative protein kinase [Oryza sativa (japonica
  misc_feature (55)..(305): Homolog of NCBI NO: 15240280 NR Description: putative protein; protein id: At5g61550.1
  misc_feature (324)..(806): Homolog of NCBI NO: 15240280 NR Description: putative protein; protein id: At5g61550.1
  misc_feature (48)..(806): Homolog of NCBI NO: 15224775 NR Description: putative protein kinase; protein id: At2g19410.1

SEQ ID NO: 48585 - protein, 789 aa, Arabidopsis thaliana; identical to SEQ ID NO: 48439
  peptide (1)..(789): Ceres Seq. ID no. 12639044
  misc_feature (707)..(779): Pfam Name: U-box domain Pfam Description: U-box domain
  misc_feature (707)..(779): Pfam Name: U-box domain Pfam Description: U-box domain
  misc_feature (297)..(777): Homolog of NCBI NO: 30697549 NR Description: protein kinase family [Arabidopsis thaliana]
  misc_feature (297)..(777): Homolog of NCBI NO: 9758471 NR Description: contains similarity to receptor-like protein
  misc_feature (27)..(179): Homolog of NCBI NO: 25518361 NR Description: hypothetical protein F17F16.3 [imported] -
  misc_feature (198)..(699): Homolog of NCBI NO: 25518361 NR Description: hypothetical protein F17F16.3 [imported] -
  misc_feature (16)..(196): Homolog of NCBI NO: 15224129 NR Description: putative protein kinase; protein id: At2g24370.1
  misc_feature (297)..(777): Homolog of NCBI NO: 30697549 NR Description: protein kinase family [Arabidopsis thaliana]
  misc_feature (27)..(179): Homolog of NCBI NO: 25518361 NR Description: hypothetical protein F17F16.3 [imported] -
  misc_feature (16)..(196): Homolog of NCBI NO: 15224129 NR Description: putative protein kinase; protein id: At2g24370.1
  misc_feature (21)..(779): Homolog of NCBI NO: 15224775 NR Description: putative protein kinase; protein id: At2g19410.1
  misc_feature (297)..(779): Homolog of NCBI NO: 15240280 NR Description: putative protein; protein id: At5g61550.1
  misc_feature (28)..(278): Homolog of NCBI NO: 15240280 NR Description: putative protein; protein id: At5g61550.1
  misc_feature (28)..(779): Homolog of NCBI NO: 37536860 NR Description: putative protein kinase [Oryza sativa (japonica
  misc_feature (190)..(691): Homolog of NCBI NO: 15224129 NR Description: putative protein kinase; protein id: At2g24370.1
  misc_feature (198)..(699): Homolog of NCBI NO: 25518361 NR Description: hypothetical protein F17F16.3 [imported] -
  misc_feature (297)..(777): Homolog of NCBI NO: 9758471 NR Description: contains similarity to receptor-like protein
  misc_feature (190)..(691): Homolog of NCBI NO: 15224129 NR Description: putative protein kinase; protein id: At2g24370.1
  misc_feature (28)..(779): Homolog of NCBI NO: 37536860 NR Description: putative protein kinase [Oryza sativa (japonica
  misc_feature (28)..(278): Homolog of NCBI NO: 15240280 NR Description: putative protein; protein id: At5g61550.1
  misc_feature (297)..(779): Homolog of NCBI NO: 15240280 NR Description: putative protein; protein id: At5g61550.1
  misc_feature (21)..(779): Homolog of NCBI NO: 15224775 NR Description: putative protein kinase; protein id: At2g19410.1

SEQ ID NO: 48586 - protein, 786 aa, Arabidopsis thaliana; identical to SEQ ID NO: 48440
  peptide (1)..(786): Ceres Seq. ID no. 12639045
  misc_feature (704)..(776): Pfam Name: U-box domain Pfam Description: U-box domain
  misc_feature (704)..(776): Pfam Name: U-box domain Pfam Description: U-box domain
  misc_feature (294)..(774): Homolog of NCBI NO: 30697549 NR Description: protein kinase family [Arabidopsis thaliana]
  misc_feature (294)..(774): Homolog of NCBI NO: 9758471 NR Description: contains similarity to receptor-like protein
  misc_feature (24)..(176): Homolog of NCBI NO: 25518361 NR Description: hypothetical protein F17F16.3 [imported] -
  misc_feature (195)..(696): Homolog of NCBI NO: 25518361 NR Description: hypothetical protein F17F16.3 [imported] -
  misc_feature (13)..(193): Homolog of NCBI NO: 15224129 NR Description: putative protein kinase; protein id: At2g24370.1
  misc_feature (294)..(774): Homolog of NCBI NO: 30697549 NR Description: protein kinase family [Arabidopsis thaliana]
  misc_feature (24)..(176): Homolog of NCBI NO: 25518361 NR Description: hypothetical protein F17F16.3 [imported] -
  misc_feature (13)..(193): Homolog of NCBI NO: 15224129 NR Description: putative protein kinase; protein id: At2g24370.1
  misc_feature (18)..(776): Homolog of NCBI NO: 15224775 NR Description: putative protein kinase; protein id: At2g19410.1
  misc_feature (294)..(776): Homolog of NCBI NO: 15240280 NR Description: putative protein; protein id: At5g61550.1
  misc_feature (25)..(275): Homolog of NCBI NO: 15240280 NR Description: putative protein; protein id: At5g61550.1
  misc_feature (25)..(776): Homolog of NCBI NO: 37536860 NR Description: putative protein kinase [Oryza sativa (japonica
  misc_feature (187)..(688): Homolog of NCBI NO: 15224129 NR Description: putative protein kinase; protein id: At2g24370.1
  misc_feature (195)..(696): Homolog of NCBI NO: 25518361 NR Description: hypothetical protein F17F16.3 [imported] -
  misc_feature (294)..(774): Homolog of NCBI NO: 9758471 NR Description: contains similarity to receptor-like protein
  misc_feature (187)..(688): Homolog of NCBI NO: 15224129 NR Description: putative protein kinase; protein id: At2g24370.1
  misc_feature (25)..(776): Homolog of NCBI NO: 37536860 NR Description: putative protein kinase [Oryza sativa (japonica
  misc_feature (25)..(275): Homolog of NCBI NO: 15240280 NR Description: putative protein; protein id: At5g61550.1
  misc_feature (294)..(776): Homolog of NCBI NO: 15240280 NR Description: putative protein; protein id: At5g61550.1
  misc_feature (18)..(776): Homolog of NCBI NO: 15224775 NR Description: putative protein kinase; protein id: At2g19410.1

SEQ ID NO: 48587 - DNA, 2566 bp, Arabidopsis thaliana; identical to SEQ ID NO: 39024
  misc_feature (1)..(2566): Ceres Seq. ID no. 13497704
  misc_feature: MA Experiment ID: 108434 Result: Down-regulated in Transcription
  misc_feature: MA Experiment 108434 PARAMETER Experiment Name: At_Root_Tips_cDNA_P Parameter: Tissue Value: Root Tips
  misc_feature: MA Experiment ID: 108461 Result: Up-regulated in Transcription
  misc_feature: MA Experiment 108461 PARAMETER Experiment Name: At_Germinating_Seeds_cDNA_P Parameter: Age (day) Value: 1 vs. 0
  misc_feature: MA Experiment 108461 PARAMETER Experiment Name: At_Germinating_Seeds_cDNA_P Parameter: Tissue Value: Germinating Seeds
  misc_feature: MA Experiment ID: 108462 Result: Up-regulated in Transcription
  misc_feature: MA Experiment 108462 PARAMETER Experiment Name: At_Germinating_Seeds_cDNA_P Parameter: Age (day) Value: 2 vs. 0
  misc_feature: MA Experiment 108462 PARAMETER Experiment Name: At_Germinating_Seeds_cDNA_P Parameter: Tissue Value: Germinating Seeds
  misc_feature: MA Experiment ID: 108463 Result: Up-regulated in Transcription
  misc_feature: MA Experiment 108463 PARAMETER Experiment Name: At_Germinating_Seeds_cDNA_P Parameter: Age (day) Value: 3 vs. 0
  misc_feature: MA Experiment 108463 PARAMETER Experiment Name: At_Germinating_Seeds_cDNA_P Parameter: Tissue Value: Germinating Seeds
  misc_feature: MA Experiment ID: 108464 Result: Up-regulated in Transcription
  misc_feature: MA Experiment 108464 PARAMETER Experiment Name: At_Germinating_Seeds_cDNA_P Parameter: Age (day) Value: 4 vs. 0
  misc_feature: MA Experiment 108464 PARAMETER Experiment Name: At_Germinating_Seeds_cDNA_P Parameter: Tissue Value: Germinating Seeds
  misc_feature: MA Experiment ID: 108469 Result: Up-regulated in Transcription
  misc_feature: MA Experiment ID: 108488 Result: Down-regulated in Transcription
  misc_feature: MA Experiment ID: 108501 Result: Down-regulated in Transcription
  misc_feature: MA Experiment 108501 PARAMETER Experiment Name: At_ap2_floral_buds_cDNA_P Parameter: Plant Line Value: ap2 (Ler.)
  misc_feature: MA Experiment 108501 PARAMETER Experiment Name: At_ap2_floral_buds_cDNA_P Parameter: Tissue Value: Closed Flower
  misc_feature: MA Experiment ID: 108572 Result: Up-regulated in Transcription
  misc_feature: MA Experiment 108572 PARAMETER Experiment Name: At_Drought_cDNA_P Parameter: Timepoint (hr) Value: 1
  misc_feature: MA Experiment 108572 PARAMETER Experiment Name: At_Drought_cDNA_P Parameter: Tissue Value: Aerial
  misc_feature: MA Experiment 108572 PARAMETER Experiment Name: At_Drought_cDNA_P Parameter: Treatment Value: Drought vs. No Drought
  misc_feature: MA Experiment ID: 108573 Result: Up-regulated in Transcription
  misc_feature: MA Experiment 108573 PARAMETER Experiment Name: At_Drought_cDNA_P Parameter: Timepoint (hr) Value: 6
  misc_feature: MA Experiment 108573 PARAMETER Experiment Name: At_Drought_cDNA_P Parameter: Tissue Value: Aerial
  misc_feature: MA Experiment 108573 PARAMETER Experiment Name: At_Drought_cDNA_P Parameter: Treatment Value: Drought vs. No Drought
  misc_feature: MA Experiment ID: 108574 Result: Down-regulated in Transcription
  misc_feature: MA Experiment 108574 PARAMETER Experiment Name: At_Wounding__cDNA_P Parameter: Timepoint (hr) Value: 1
  misc_feature: MA Experiment 108574 PARAMETER Experiment Name: At_Wounding__cDNA_P Parameter: Tissue Value: Aerial
  misc_feature: MA Experiment 108574 PARAMETER Experiment Name: At_Wounding__cDNA_P Parameter: Treatment Value: Wounding vs. No Wounding
  misc_feature: MA Experiment ID: 108579 Result: Down-regulated in Transcription
  misc_feature: MA Experiment 108579 PARAMETER Experiment Name: At_4deg_Cold_cDNA_P Parameter: Temperature (deg C) Value: 4 vs. 22
  misc_feature: MA Experiment 108579 PARAMETER Experiment Name: At_4deg_Cold_cDNA_P Parameter: Timepoint (hr) Value: 6
  misc_feature: MA Experiment 108579 PARAMETER Experiment Name: At_4deg_Cold_cDNA_P Parameter: Tissue Value: Aerial
  misc_feature: MA Experiment ID: 108605 Result: Up-regulated in Transcription
  misc_feature: MA Experiment 108605 PARAMETER Experiment Name: At_100uM_ABA_cDNA_P Parameter: Timepoint (hr) Value: 6
  misc_feature: MA Experiment 108605 PARAMETER Experiment Name: At_100uM_ABA_cDNA_P Parameter: Tissue Value: Aerial
  misc_feature: MA Experiment 108605 PARAMETER Experiment Name: At_100uM_ABA_cDNA_P Parameter: Treatment Value: 100uM ABA vs. No Treatment
  misc_feature: MA Experiment ID: 108607 Result: Up-regulated in Transcription
  misc_feature: MA Experiment 108607 PARAMETER Experiment Name: At_100uM_ABA_cDNA_P Parameter: Timepoint (hr) Value: 4
  misc_feature: MA Experiment 108607 PARAMETER Experiment Name: At_100uM_ABA_cDNA_P Parameter: Tissue Value: Aerial
  misc_feature: MA Experiment 108607 PARAMETER Experiment Name: At_100uM_ABA_cDNA_P Parameter: Treatment Value: 100uM ABA vs. No Treatment
  misc_feature: MA Experiment ID: 108668 Result: Up-regulated in Transcription
  misc_feature: MA Experiment 108668 PARAMETER Experiment Name: At_2mM_SA_cDNA_P Parameter: Plant Line Value: WS
  misc_feature: MA Experiment 108668 PARAMETER Experiment Name: At_2mM_SA_cDNA_P Parameter: Timepoint (hr) Value: 6
  misc_feature: MA Experiment 108668 PARAMETER Experiment Name: At_2mM_SA_cDNA_P Parameter: Treatment Value: 2mM SA vs. No Treatment
  misc_feature: MA Experiment ID: 20000087 Result: Up-regulated in Transcription
  misc_feature: MA Experiment 20000087 PARAMETER Experiment Name: At_100uM_ABA_Mutants_cDNA_P Parameter: Plant Line Value: WS
  misc_feature: MA Experiment 20000087 PARAMETER Experiment Name: At_100uM_ABA_Mutants_cDNA_P Parameter: Timepoint (hr) Value: 6
  misc_feature: MA Experiment 20000087 PARAMETER Experiment Name: At_100uM_ABA_Mutants_cDNA_P Parameter: Tissue Value: Aerial
  misc_feature: MA Experiment 20000087 PARAMETER Experiment Name: At_100uM_ABA_Mutants_cDNA_P Parameter: Treatment Value: 100uM ABA vs. No Treatment
  misc_feature: MA Experiment ID: 20000166 Result: Down-regulated in Transcription
  misc_feature: MA Experiment 20000166 PARAMETER Experiment Name: At_100uM_ABA_P Parameter: Age (day) Value: 14
  misc_feature: MA Experiment 20000166 PARAMETER Experiment Name: At_100uM_ABA_P Parameter: Organism Value: A. thaliana
  misc_feature: MA Experiment 20000166 PARAMETER Experiment Name: At_100uM_ABA_P Parameter: Plant Line Value: WS
  misc_feature: MA Experiment 20000166 PARAMETER Experiment Name: At_100uM_ABA_P Parameter: Timepoint (hr) Value: 1
  misc_feature: MA Experiment 20000166 PARAMETER Experiment Name: At_100uM_ABA_P Parameter: Tissue Value: Aerial
  misc_feature: MA Experiment 20000166 PARAMETER Experiment Name: At_100uM_ABA_P Parameter: Treatment Value: 100uM ABA vs. No Treatment
  misc_feature: MA Experiment ID: 20000169 Result: Up-regulated in Transcription
  misc_feature: MA Experiment 20000169 PARAMETER Experiment Name: At_100uM_ABA_P Parameter: Age (day) Value: 14
  misc_feature: MA Experiment 20000169 PARAMETER Experiment Name: At_100uM_ABA_P Parameter: Organism Value: A. thaliana
  misc_feature: MA Experiment 20000169 PARAMETER Experiment Name: At_100uM_ABA_P Parameter: Plant Line Value: WS
  misc_feature: MA Experiment 20000169 PARAMETER Experiment Name: At_100uM_ABA_P Parameter: Timepoint (hr) Value: 6
  misc_feature: MA Experiment 20000169 PARAMETER Experiment Name: At_100uM_ABA_P Parameter: Tissue Value: Aerial
  misc_feature: MA Experiment 20000169 PARAMETER Experiment Name: At_100uM_ABA_P Parameter: Treatment Value: 100uM ABA vs. No Treatment
  misc_feature: MA Experiment ID: 20000171 Result: Down-regulated in Transcription
  misc_feature: MA Experiment 20000171 PARAMETER Experiment Name: At_42deg_Heat_P Parameter: Age (day) Value: 14
  misc_feature: MA Experiment 20000171 PARAMETER Experiment Name: At_42deg_Heat_P Parameter: Organism Value: A. thaliana
  misc_feature: MA Experiment 20000171 PARAMETER Experiment Name: At_42deg_Heat_P Parameter: Plant Line Value: WS
  misc_feature: MA Experiment 20000171 PARAMETER Experiment Name: At_42deg_Heat_P Parameter: Temperature (deg C) Value: 42 vs. 22
  misc_feature: MA Experiment 20000171 PARAMETER Experiment Name: At_42deg_Heat_P Parameter: Timepoint (hr) Value: 1
  misc_feature: MA Experiment 20000171 PARAMETER Experiment Name: At_42deg_Heat_P Parameter: Tissue Value: Aerial
  misc_feature: MA Experiment ID: 20000173 Result: Down-regulated in Transcription
  misc_feature: MA Experiment 20000173 PARAMETER Experiment Name: At_42deg_Heat_P Parameter: Age (day) Value: 14
  misc_feature: MA Experiment 20000173 PARAMETER Experiment Name: At_42deg_Heat_P Parameter: Organism Value: A. thaliana
  misc_feature: MA Experiment 20000173 PARAMETER Experiment Name: At_42deg_Heat_P Parameter: Plant Line Value: WS
  misc_feature: MA Experiment 20000173 PARAMETER Experiment Name: At_42deg_Heat_P Parameter: Temperature (deg C) Value: 42 vs. 22
  misc_feature: MA Experiment 20000173 PARAMETER Experiment Name: At_42deg_Heat_P Parameter: Timepoint (hr) Value: 6
  misc_feature: MA Experiment 20000173 PARAMETER Experiment Name: At_42deg_Heat_P Parameter: Tissue Value: Aerial
  misc_feature: MA Experiment ID: 20000180 Result: Up-regulated in Transcription
  misc_feature: MA Experiment 20000180 PARAMETER Experiment Name: At_Germinating_Seeds_P Parameter: Age (hr) Value: 24 vs. 0
  misc_feature: MA Experiment 20000180 PARAMETER Experiment Name: At_Germinating_Seeds_P Parameter: Tissue Value: Germinating Seeds
  misc_feature: MA Experiment ID: 20000182 Result: Up-regulated in Transcription
  misc_feature: MA Experiment 20000182 PARAMETER Experiment Name: At_2mM_SA_P Parameter: Age (day) Value: 14
  misc_feature: MA Experiment 20000182 PARAMETER Experiment Name: At_2mM_SA_P Parameter: Organism Value: A. thaliana
  misc_feature: MA Experiment 20000182 PARAMETER Experiment Name: At_2mM_SA_P Parameter: Plant Line Value: WS
  misc_feature: MA Experiment 20000182 PARAMETER Experiment Name: At_2mM_SA_P Parameter: Timepoint (hr) Value: 6
  misc_feature: MA Experiment 20000182 PARAMETER Experiment Name: At_2mM_SA_P Parameter: Tissue Value: Aerial
  misc_feature: MA Experiment 20000182 PARAMETER Experiment Name: At_2mM_SA_P Parameter: Treatment Value: 2mM SA vs. No Treatment
  misc_feature: MA Experiment ID: 20000213 Result: Down-regulated in Transcription
  misc_feature: MA Experiment 20000213 PARAMETER Experiment Name: At_4deg_Cold_P Parameter: Timepoint (hr) Value: 2
  misc_feature: MA Experiment ID: 20000234 Result: Down-regulated in Transcription
  misc_feature: MA Experiment 20000234 PARAMETER Experiment Name: At_Siliques_P Parameter: Age (day) Value: 21
  misc_feature: MA Experiment 20000234 PARAMETER Experiment Name: At_Siliques_P Parameter: Organism Value: A. thaliana
  misc_feature: MA Experiment 20000234 PARAMETER Experiment Name: At_Siliques_P Parameter: Plant Line Value: WS
  misc_feature: MA Experiment 20000234 PARAMETER Experiment Name: At_Siliques_P Parameter: Tissue Value: Less Than 5mm Siliques vs. Whole Plant
  misc_feature: MA Experiment ID: 20000265 Result: Down-regulated in Transcription
  misc_feature: MA Experiment 20000265 PARAMETER Experiment Name: At_Open_Flower_P Parameter: Age (day) Value: 21
  misc_feature: MA Experiment 20000265 PARAMETER Experiment Name: At_Open_Flower_P Parameter: Plant Line Value: WS
  misc_feature: MA Experiment 20000265 PARAMETER Experiment Name: At_Open_Flower_P Parameter: Tissue Value: Closed Flower vs. Whole Plant
  misc_feature: MA Experiment ID: 20000267 Result: Down-regulated in Transcription
  misc_feature: MA Experiment 20000267 PARAMETER Experiment Name: At_Drought_P Parameter: Age (day) Value: 7
  misc_feature: MA Experiment 20000267 PARAMETER Experiment Name: At_Drought_P Parameter: Organism Value: A. thaliana
  misc_feature: MA Experiment 20000267 PARAMETER Experiment Name: At_Drought_P Parameter: Plant Line Value: WS
  misc_feature: MA Experiment 20000267 PARAMETER Experiment Name: At_Drought_P Parameter: Timepoint (hr) Value: 6
  misc_feature: MA Experiment 20000267 PARAMETER Experiment Name: At_Drought_P Parameter: Tissue Value: Whole Plant
  misc_feature: MA Experiment 20000267 PARAMETER Experiment Name: At_Drought_P Parameter: Treatment Value: Drought vs. No Drought
  misc_feature: MA Experiment ID: 20000269 Result: Down-regulated in Transcription
  misc_feature: MA Experiment 20000269 PARAMETER Experiment Name: At_1mM_KNO3_L-vs-H_Roots_P Parameter: Age (day) Value: 7,10,12
  misc_feature: MA Experiment 20000269 PARAMETER Experiment Name: At_1mM_KNO3_L-vs-H_Roots_P Parameter: Organism Value: A. thaliana
  misc_feature: MA Experiment 20000269 PARAMETER Experiment Name: At_1mM_KNO3_L-vs-H_Roots_P Parameter: Plant Line Value: WS
  misc_feature: MA Experiment 20000269 PARAMETER Experiment Name: At_1mM_KNO3_L-vs-H_Roots_P Parameter: Timepoint (day) Value: 7,10,12
  misc_feature: MA Experiment 20000269 PARAMETER Experiment Name: At_1mM_KNO3_L-vs-H_Roots_P Parameter: Tissue Value: Roots
  misc_feature: MA Experiment 20000269 PARAMETER Experiment Name: At_1mM_KNO3_L-vs-H_Roots_P Parameter: Treatment Value: 1mM KNO3 vs. 50mM KNO3
  misc_feature: MA Experiment ID: 20000308 Result: Down-regulated in Transcription
  misc_feature: MA Experiment 20000308 PARAMETER Experiment Name: At_100mM_NaCl__P Parameter: Age (day) Value: 17
  misc_feature: MA Experiment 20000308 PARAMETER Experiment Name: At_100mM_NaCl__P Parameter: Organism Value: A. thaliana
  misc_feature: MA Experiment 20000308 PARAMETER Experiment Name: At_100mM_NaCl__P Parameter: Plant Line Value: WS
  misc_feature: MA Experiment 20000308 PARAMETER Experiment Name: At_100mM_NaCl__P Parameter: Timepoint (hr) Value: 72
  misc_feature: MA Experiment 20000308 PARAMETER Experiment Name: At_100mM_NaCl__P Parameter: Tissue Value: Whole Plant
  misc_feature: MA Experiment 20000308 PARAMETER Experiment Name: At_100mM_NaCl__P Parameter: Treatment Value: 100mM NaCl vs. No Treatment
  misc_feature: MA Experiment ID: 20000436 Result: Down-regulated in Transcription
  misc_feature: MA Experiment 20000436 PARAMETER Experiment Name: At_Drought_P Parameter: Age (day) Value: 7
  misc_feature: MA Experiment 20000436 PARAMETER Experiment Name: At_Drought_P Parameter: Organism Value: A. thaliana
  misc_feature: MA Experiment 20000436 PARAMETER Experiment Name: At_Drought_P Parameter: Plant Line Value: WS
  misc_feature: MA Experiment 20000436 PARAMETER Experiment Name: At_Drought_P Parameter: Timepoint (hr) Value: 12
  misc_feature: MA Experiment 20000436 PARAMETER Experiment Name: At_Drought_P Parameter: Tissue Value: Whole Plant
  misc_feature: MA Experiment 20000436 PARAMETER Experiment Name: At_Drought_P Parameter: Treatment Value: Drought vs. No Drought
  misc_feature: MA Experiment ID: 20000438 Result: Down-regulated in Transcription
  misc_feature: MA Experiment 20000438 PARAMETER Experiment Name: At_Shoots__P Parameter: Age (day) Value: 14
  misc_feature: MA Experiment 20000438 PARAMETER Experiment Name: At_Shoots__P Parameter: Tissue Value: Shoots vs. Whole Plant
  misc_feature: MA Experiment ID: 20000441 Result: Up-regulated in Transcription
  misc_feature: MA Experiment 20000441 PARAMETER Experiment Name: At_1uM_BR-BRZ__P Parameter: Tissue Value: Shoot Apices
  misc_feature: MA Experiment 20000441 PARAMETER Experiment Name: At_1uM_BR-BRZ__P Parameter: Treatment Value: 1uM BR vs. No Treatment
  misc_feature: MA Experiment ID: 20000443 Result: Up-regulated in Transcription
  misc_feature: MA Experiment 20000443 PARAMETER Experiment Name: At_1uM_BR-BRZ__P Parameter: Tissue Value: Shoot Apices
  misc_feature: MA Experiment 20000443 PARAMETER Experiment Name: At_1uM_BR-BRZ__P Parameter: Treatment Value: 1uM BRZ vs. No Treatment
  misc_feature: MA Experiment ID: 20000451 Result: Down-regulated in Transcription
  misc_feature: MA Experiment 20000451 PARAMETER Experiment Name: At_CS6879_Shoots-Roots_P Parameter: Age (day) Value: 14
  misc_feature: MA Experiment 20000451 PARAMETER Experiment Name: At_CS6879_Shoots-Roots_P Parameter: Organism Value: A. thaliana
  misc_feature: MA Experiment 20000451 PARAMETER Experiment Name: At_CS6879_Shoots-Roots_P Parameter: Plant Line Value: CS6879 vs. WS
  misc_feature: MA Experiment 20000451 PARAMETER Experiment Name: At_CS6879_Shoots-Roots_P Parameter: Tissue Value: Roots
  misc_feature: MA Experiment ID: 20000452 Result: Down-regulated in Transcription
  misc_feature: MA Experiment 20000452 PARAMETER Experiment Name: At_CS6879_Shoots-Roots_P Parameter: Age (day) Value: 14
  misc_feature: MA Experiment 20000452 PARAMETER Experiment Name: At_CS6879_Shoots-Roots_P Parameter: Organism Value: A. thaliana
  misc_feature: MA Experiment 20000452 PARAMETER Experiment Name: At_CS6879_Shoots-Roots_P Parameter: Plant Line Value: CS6879 vs. WS
  misc_feature: MA Experiment 20000452 PARAMETER Experiment Name: At_CS6879_Shoots-Roots_P Parameter: Tissue Value: Shoots
  misc_feature: MA Experiment ID: 20000495 Result: Down-regulated in Transcription
  misc_feature: MA Experiment 20000495 PARAMETER Experiment Name: At_Guard_Cells_P Parameter: Harvest Date Value: 8/2/2002
  misc_feature: MA Experiment 20000495 PARAMETER Experiment Name: At_Guard_Cells_P Parameter: Organism Value: A. thaliana
  misc_feature: MA Experiment 20000495 PARAMETER Experiment Name: At_Guard_Cells_P Parameter: Tissue Value: Guard Cells vs. Leaves
  misc_feature: MA Experiment ID: 20000574 Result: Up-regulated in Transcription
  misc_feature: MA Experiment 20000574 PARAMETER Experiment Name: At_100uM_ABA_Mutants__P Parameter: Organism Value: A. thaliana
  misc_feature: MA Experiment 20000574 PARAMETER Experiment Name: At_100uM_ABA_Mutants__P Parameter: Plant Line Value: CS23 vs. Ler wt
  misc_feature: MA Experiment 20000574 PARAMETER Experiment Name: At_100uM_ABA_Mutants__P Parameter: Timepoint (hr) Value: N/A
  misc_feature: MA Experiment 20000574 PARAMETER Experiment Name: At_100uM_ABA_Mutants__P Parameter: Tissue Value: Whole Plant
  misc_feature: MA Experiment 20000574 PARAMETER Experiment Name: At_100uM_ABA_Mutants__P Parameter: Treatment Value: None
  misc_feature: MA Experiment ID: 20000606 Result: Up-regulated in Transcription
  misc_feature: MA Experiment 20000606 PARAMETER Experiment Name: At_CS8548_Mutant_P Parameter: Age (day) Value: 14
  misc_feature: MA Experiment 20000606 PARAMETER Experiment Name: At_CS8548_Mutant_P Parameter: Plant Line Value: CS8548 vs. wt
  misc_feature: MA Experiment 20000606 PARAMETER Experiment Name: At_CS8548_Mutant_P Parameter: Tissue Value: Whole Plant
  misc_feature: MA Experiment ID: 20000794 Result: Up-regulated in Transcription
  misc_feature: MA Experiment 20000794 PARAMETER Experiment Name: At_Petals_P Parameter: Age (day) Value: 23-25 days
  misc_feature: MA Experiment 20000794 PARAMETER Experiment Name: At_Petals_P Parameter: Plant Line Value: WS
  misc_feature: MA Experiment 20000794 PARAMETER Experiment Name: At_Petals_P Parameter: Tissue Value: Petals vs. Whole plant
  misc_feature: MA Experiment ID: 20001247 Result: Up-regulated in Transcription
  misc_feature: MA Experiment 20001247 PARAMETER Experiment Name: At_Far-red-induction_P Parameter: Age (day) Value: 7
  misc_feature: MA Experiment 20001247 PARAMETER Experiment Name: At_Far-red-induction_P Parameter: Light Value: Far-red vs. White
  misc_feature: MA Experiment 20001247 PARAMETER Experiment Name: At_Far-red-induction_P Parameter: Organism Value: A. thaliana
  misc_feature: MA Experiment 20001247 PARAMETER Experiment Name: At_Far-red-induction_P Parameter: Plant Line Value: Columbia
  misc_feature: MA Experiment 20001247 PARAMETER Experiment Name: At_Far-red-induction_P Parameter: Timepoint (hr) Value: 1
  misc_feature: MA Experiment 20001247 PARAMETER Experiment Name: At_Far-red-induction_P Parameter: Tissue Value: Whole Plant
  misc_feature: MA Experiment ID: 20001248 Result: Up-regulated in Transcription
  misc_feature: MA Experiment 20001248 PARAMETER Experiment Name: At_Far-red-induction_P Parameter: Age (day) Value: 7
  misc_feature: MA Experiment 20001248 PARAMETER Experiment Name: At_Far-red-induction_P Parameter: Light Value: Far-red vs. White
  misc_feature: MA Experiment 20001248 PARAMETER Experiment Name: At_Far-red-induction_P Parameter: Organism Value: A. thaliana
  misc_feature: MA Experiment 20001248 PARAMETER Experiment Name: At_Far-red-induction_P Parameter: Plant Line Value: Columbia
  misc_feature: MA Experiment 20001248 PARAMETER Experiment Name: At_Far-red-induction_P Parameter: Timepoint (hr) Value: 4
  misc_feature: MA Experiment 20001248 PARAMETER Experiment Name: At_Far-red-induction_P Parameter: Tissue Value: Whole Plant
  misc_feature: MA Experiment ID: 20001450 Result: Up-regulated in Transcription
  misc_feature: MA Experiment 20001450 PARAMETER Experiment Name: At_Far-red-induction_P Parameter: Age (day) Value: 7
  misc_feature: MA Experiment 20001450 PARAMETER Experiment Name: At_Far-red-induction_P Parameter: Light Value: Far-red vs. White
  misc_feature: MA Experiment 20001450 PARAMETER Experiment Name: At_Far-red-induction_P Parameter: Organism Value: A. thaliana
  misc_feature: MA Experiment 20001450 PARAMETER Experiment Name: At_Far-red-induction_P Parameter: Plant Line Value: Columbia
  misc_feature: MA Experiment 20001450 PARAMETER Experiment Name: At_Far-red-induction_P Parameter: Timepoint (hr) Value: 8
  misc_feature: MA Experiment 20001450 PARAMETER Experiment Name: At_Far-red-induction_P Parameter: Tissue Value: Whole Plant
  misc_feature: MA Experiment ID: 20001451 Result: Up-regulated in Transcription
  misc_feature: MA Experiment 20001451 PARAMETER Experiment Name: At_Far-red-induction_P Parameter: Age (day) Value: 7
  misc_feature: MA Experiment 20001451 PARAMETER Experiment Name: At_Far-red-induction_P Parameter: Light Value: Far-red vs. White
  misc_feature: MA Experiment 20001451 PARAMETER Experiment Name: At_Far-red-induction_P Parameter: Organism Value: A. thaliana
  misc_feature: MA Experiment 20001451 PARAMETER Experiment Name: At_Far-red-induction_P Parameter: Plant Line Value: Columbia
  misc_feature: MA Experiment 20001451 PARAMETER Experiment Name: At_Far-red-induction_P Parameter: Timepoint (hr) Value: 24
  misc_feature: MA Experiment 20001451 PARAMETER Experiment Name: At_Far-red-induction_P Parameter: Tissue Value: Whole Plant
  misc_feature: MA Experiment ID: 20001555 Result: Down-regulated in Transcription
  misc_feature: MA Experiment 20001555 PARAMETER Experiment Name: At_Drought_Soil_Dry_P Parameter: Age (day) Value: 24
  misc_feature: MA Experiment 20001555 PARAMETER Experiment Name: At_Drought_Soil_Dry_P Parameter: Organism Value: A. thaliana
  misc_feature: MA Experiment 20001555 PARAMETER Experiment Name: At_Drought_Soil_Dry_P Parameter: Plant Line Value: WS
  misc_feature: MA Experiment 20001555 PARAMETER Experiment Name: At_Drought_Soil_Dry_P Parameter: Post Timepoint (hr) Value: None
  misc_feature: MA Experiment 20001555 PARAMETER Experiment Name: At_Drought_Soil_Dry_P Parameter: Post-Treatment Value: None
  misc_feature: MA Experiment 20001555 PARAMETER Experiment Name: At_Drought_Soil_Dry_P Parameter: Timepoint (day) Value: 10
  misc_feature: MA Experiment 20001555 PARAMETER Experiment Name: At_Drought_Soil_Dry_P Parameter: Treatment Value: Drought vs. No Drought
  misc_feature: MA Experiment ID: 20001556 Result: Down-regulated in Transcription
  misc_feature: MA Experiment 20001556 PARAMETER Experiment Name: At_Drought_Soil_Dry_P Parameter: Age (day) Value: 26
  misc_feature: MA Experiment 20001556 PARAMETER Experiment Name: At_Drought_Soil_Dry_P Parameter: Organism Value: A. thaliana
  misc_feature: MA Experiment 20001556 PARAMETER Experiment Name: At_Drought_Soil_Dry_P Parameter: Plant Line Value: WS
  misc_feature: MA Experiment 20001556 PARAMETER Experiment Name: At_Drought_Soil_Dry_P Parameter: Post Timepoint (hr) Value: None
  misc_feature: MA Experiment 20001556 PARAMETER Experiment Name: At_Drought_Soil_Dry_P Parameter: Post-Treatment Value: None
  misc_feature: MA Experiment 20001556 PARAMETER Experiment Name: At_Drought_Soil_Dry_P Parameter: Timepoint (day) Value: 12
  misc_feature: MA Experiment 20001556 PARAMETER Experiment Name: At_Drought_Soil_Dry_P Parameter: Treatment Value: Drought vs. No Drought
  misc_feature: MA Experiment ID: 20001558 Result: Down-regulated in Transcription
  misc_feature: MA Experiment 20001558 PARAMETER Experiment Name: At_Drought_Soil_Dry_P Parameter: Age (day) Value: 27
  misc_feature: MA Experiment 20001558 PARAMETER Experiment Name: At_Drought_Soil_Dry_P Parameter: Organism Value: A. thaliana
  misc_feature: MA Experiment 20001558 PARAMETER Experiment Name: At_Drought_Soil_Dry_P Parameter: Plant Line Value: WS
  misc_feature: MA Experiment 20001558 PARAMETER Experiment Name: At_Drought_Soil_Dry_P Parameter: Post Timepoint (hr) Value: 6
  misc_feature: MA Experiment 20001558 PARAMETER Experiment Name: At_Drought_Soil_Dry_P Parameter: Post-Treatment Value: Re-Water vs. No Drought
  misc_feature: MA Experiment 20001558 PARAMETER Experiment Name: At_Drought_Soil_Dry_P Parameter: Timepoint (day) Value: 13
  misc_feature: MA Experiment 20001558 PARAMETER Experiment Name: At_Drought_Soil_Dry_P Parameter: Treatment Value: Drought vs. No Drought
  misc_feature: MA Experiment ID: 20001559 Result: Down-regulated in Transcription
  misc_feature: MA Experiment 20001559 PARAMETER Experiment Name: At_Drought_Soil_Dry_P Parameter: Age (day) Value: 28
  misc_feature: MA Experiment 20001559 PARAMETER Experiment Name: At_Drought_Soil_Dry_P Parameter: Organism Value: A. thaliana
  misc_feature: MA Experiment 20001559 PARAMETER Experiment Name: At_Drought_Soil_Dry_P Parameter: Plant Line Value: WS
  misc_feature: MA Experiment 20001559 PARAMETER Experiment Name: At_Drought_Soil_Dry_P Parameter: Post Timepoint (hr) Value: 29
  misc_feature: MA Experiment 20001559 PARAMETER Experiment Name: At_Drought_Soil_Dry_P Parameter: Post-Treatment Value: Re-Water vs. No Drought
  misc_feature: MA Experiment 20001559 PARAMETER Experiment Name: At_Drought_Soil_Dry_P Parameter: Timepoint (day) Value: 14
  misc_feature: MA Experiment 20001559 PARAMETER Experiment Name: At_Drought_Soil_Dry_P Parameter: Treatment Value: Drought vs. No Drought
  misc_feature: MA Experiment ID: 20001560 Result: Down-regulated in Transcription
  misc_feature: MA Experiment 20001560 PARAMETER Experiment Name: At_Drought_Soil_Dry_P Parameter: Age (day) Value: 28
  misc_feature: MA Experiment 20001560 PARAMETER Experiment Name: At_Drought_Soil_Dry_P Parameter: Organism Value: A. thaliana
  misc_feature: MA Experiment 20001560 PARAMETER Experiment Name: At_Drought_Soil_Dry_P Parameter: Plant Line Value: WS
  misc_feature: MA Experiment 20001560 PARAMETER Experiment Name: At_Drought_Soil_Dry_P Parameter: Post Timepoint (hr) Value: None
  misc_feature: MA Experiment 20001560 PARAMETER Experiment Name: At_Drought_Soil_Dry_P Parameter: Post-Treatment Value: None
  misc_feature: MA Experiment 20001560 PARAMETER Experiment Name: At_Drought_Soil_Dry_P Parameter: Timepoint (day) Value: 14
  misc_feature: MA Experiment 20001560 PARAMETER Experiment Name: At_Drought_Soil_Dry_P Parameter: Treatment Value: Drought vs. No Drought
  misc_feature: MA Experiment ID: 20001757 Result: Up-regulated in Transcription
  misc_feature: MA Experiment 20001757 PARAMETER Experiment Name: At_50mM_NH4NO3_L-to-H_P Parameter: Timepoint (hr) Value: 6
  misc_feature: MA Experiment 20001757 PARAMETER Experiment Name: At_50mM_NH4NO3_L-to-H_P Parameter: Tissue Value: Leaf
  misc_feature: MA Experiment 20001757 PARAMETER Experiment Name: At_50mM_NH4NO3_L-to-H_P Parameter: Treatment Value: 50mM NH4NO3 vs 100mM Mannitol
  misc_feature: MA Experiment ID: 20001769 Result: Down-regulated in Transcription
  misc_feature: MA Experiment 20001769 PARAMETER Experiment Name: At_Far-red-enriched-adult_P Parameter: Age (day) Value: 28
  misc_feature: MA Experiment 20001769 PARAMETER Experiment Name: At_Far-red-enriched-adult_P Parameter: Light Value: Far-red enriched vs. White
  misc_feature: MA Experiment 20001769 PARAMETER Experiment Name: At_Far-red-enriched-adult_P Parameter: Organism Value: A. thaliana
  misc_feature: MA Experiment 20001769 PARAMETER Experiment Name: At_Far-red-enriched-adult_P Parameter: Plant Line Value: Columbia
  misc_feature: MA Experiment 20001769 PARAMETER Experiment Name: At_Far-red-enriched-adult_P Parameter: Timepoint (hr) Value: 4
  misc_feature: MA Experiment 20001769 PARAMETER Experiment Name: At_Far-red-enriched-adult_P Parameter: Tissue Value: Aerial
  misc_feature: MA Experiment ID: 20001770 Result: Down-regulated in Transcription
  misc_feature: MA Experiment 20001770 PARAMETER Experiment Name: At_Far-red-enriched-adult_P Parameter: Age (day) Value: 28
  misc_feature: MA Experiment 20001770 PARAMETER Experiment Name: At_Far-red-enriched-adult_P Parameter: Light Value: Far-red enriched vs. White
  misc_feature: MA Experiment 20001770 PARAMETER Experiment Name: At_Far-red-enriched-adult_P Parameter: Organism Value: A. thaliana
  misc_feature: MA Experiment 20001770 PARAMETER Experiment Name: At_Far-red-enriched-adult_P Parameter: Plant Line Value: Columbia
  misc_feature: MA Experiment 20001770 PARAMETER Experiment Name: At_Far-red-enriched-adult_P Parameter: Timepoint (hr) Value: 8
  misc_feature: MA Experiment 20001770 PARAMETER Experiment Name: At_Far-red-enriched-adult_P Parameter: Tissue Value: Aerial
  misc_feature: MA Experiment ID: 20001773 Result: Up-regulated in Transcription
  misc_feature: MA Experiment 20001773 PARAMETER Experiment Name: At_Far-red-enriched-adult_P Parameter: Age (day) Value: 30
  misc_feature: MA Experiment 20001773 PARAMETER Experiment Name: At_Far-red-enriched-adult_P Parameter: Light Value: Far-red enriched vs. White
  misc_feature: MA Experiment 20001773 PARAMETER Experiment Name: At_Far-red-enriched-adult_P Parameter: Organism Value: A. thaliana
  misc_feature: MA Experiment 20001773 PARAMETER Experiment Name: At_Far-red-enriched-adult_P Parameter: Plant Line Value: Columbia
  misc_feature: MA Experiment 20001773 PARAMETER Experiment Name: At_Far-red-enriched-adult_P Parameter: Timepoint (hr) Value: 48
  misc_feature: MA Experiment 20001773 PARAMETER Experiment Name: At_Far-red-enriched-adult_P Parameter: Tissue Value: Aerial
  misc_feature: MA Experiment ID: 20001905 Result: Down-regulated in Transcription
  misc_feature: MA Experiment 20001905 PARAMETER Experiment Name: At_Drought_Reproduction_P Parameter: Age (day) Value: 40
  misc_feature: MA Experiment 20001905 PARAMETER Experiment Name: At_Drought_Reproduction_P Parameter: Organism Value: A. thaliana
  misc_feature: MA Experiment 20001905 PARAMETER Experiment Name: At_Drought_Reproduction_P Parameter: Plant Line Value: WS
  misc_feature: MA Experiment 20001905 PARAMETER Experiment Name: At_Drought_Reproduction_P Parameter: Timepoint (day) Value: 10
  misc_feature: MA Experiment 20001905 PARAMETER Experiment Name: At_Drought_Reproduction_P Parameter: Tissue Value: Rosettes
  misc_feature: MA Experiment 20001905 PARAMETER Experiment Name: At_Drought_Reproduction_P Parameter: Treatment Value: Drought vs. No Drought

SEQ ID NO: 48588 - protein, 724 aa, Arabidopsis thaliana; identical to SEQ ID NO: 39025
  peptide (1)..(724): Ceres Seq. ID no. 13497705
  misc_feature (21)..(723): Homolog of NCBI NO: 20260596 NR Description: galactosidase, putative [Arabidopsis thaliana]
  misc_feature (21)..(723): Homolog of NCBI NO: 15231354 NR Description: glycosyl hydrolase family 35 (beta-galactosidase)
  misc_feature (11)..(724): Homolog of NCBI NO: 1168654 NR Description: Beta-galactosidase precursor (Lactase)
  misc_feature (27)..(723): Homolog of NCBI NO: 4138137 NR Description: ss-galactosidase [Lycopersicon esculentum]
  misc_feature (11)..(723): Homolog of NCBI NO: 1352077 NR Description: Beta-galactosidase precursor (Lactase) (Acid
  misc_feature (13)..(723): Homolog of NCBI NO: 14970839 NR Description: beta-galactosidase [Fragaria x ananassa]
  misc_feature (23)..(724): Homolog of NCBI NO: 7682677 NR Description: beta galactosidase [Vigna radiata]
  misc_feature (19)..(723): Homolog of NCBI NO: 12583687 NR Description: beta-D-galactosidase [Pyrus pyrifolia]
  misc_feature (19)..(723): Homolog of NCBI NO: 1352078 NR Description: Beta-galactosidase precursor (Lactase) (Acid
  misc_feature (8)..(723): Homolog of NCBI NO: 3869280 NR Description: beta-galactosidase precursor [Carica papaya]
  misc_feature (21)..(723): Homolog of NCBI NO: 20260596 NR Description: galactosidase, putative [Arabidopsis thaliana]
  misc_feature (21)..(723): Homolog of NCBI NO: 15231354 NR Description: glycosyl hydrolase family 35 (beta-galactosidase)
  misc_feature (11)..(724): Homolog of NCBI NO: 1168654 NR Description: Beta-galactosidase precursor (Lactase)
  misc_feature (27)..(723): Homolog of NCBI NO: 4138137 NR Description: ss-galactosidase [Lycopersicon esculentum]
  misc_feature (11)..(723): Homolog of NCBI NO: 1352077 NR Description: Beta-galactosidase precursor (Lactase) (Acid
  misc_feature (13)..(723): Homolog of NCBI NO: 14970839 NR Description: beta-galactosidase [Fragaria x ananassa]
  misc_feature (23)..(724): Homolog of NCBI NO: 7682677 NR Description: beta galactosidase [Vigna radiata]
  misc_feature (19)..(723): Homolog of NCBI NO: 12583687 NR Description: beta-D-galactosidase [Pyrus pyrifolia]
  misc_feature (19)..(723): Homolog of NCBI NO: 1352078 NR Description: Beta-galactosidase precursor (Lactase) (Acid
  misc_feature (8)..(723): Homolog of NCBI NO: 3869280 NR Description: beta-galactosidase precursor [Carica papaya]

SEQ ID NO: 48589 - protein, 666 aa, Arabidopsis thaliana; identical to SEQ ID NO: 39026
  peptide (1)..(666): Ceres Seq. ID no. 13497706
  misc_feature (1)..(665): Homolog of NCBI NO: 20260596 NR Description: galactosidase, putative [Arabidopsis thaliana]
  misc_feature (1)..(665): Homolog of NCBI NO: 15231354 NR Description: glycosyl hydrolase family 35 (beta-galactosidase)
  misc_feature (1)..(666): Homolog of NCBI NO: 1168654 NR Description: Beta-galactosidase precursor (Lactase)
  misc_feature (1)..(665): Homolog of NCBI NO: 4138137 NR Description: ss-galactosidase [Lycopersicon esculentum]
  misc_feature (1)..(665): Homolog of NCBI NO: 1352077 NR Description: Beta-galactosidase precursor (Lactase) (Acid
  misc_feature (1)..(665): Homolog of NCBI NO: 14970839 NR Description: beta-galactosidase [Fragaria x ananassa]
  misc_feature (1)..(666): Homolog of NCBI NO: 7682677 NR Description: beta galactosidase [Vigna radiata]
  misc_feature (1)..(665): Homolog of NCBI NO: 12583687 NR Description: beta-D-galactosidase [Pyrus pyrifolia]
  misc_feature (1)..(665): Homolog of NCBI NO: 1352078 NR Description: Beta-galactosidase precursor (Lactase) (Acid
  misc_feature (1)..(665): Homolog of NCBI NO: 3869280 NR Description: beta-galactosidase precursor [Carica papaya]
  misc_feature (1)..(665): Homolog of NCBI NO: 20260596 NR Description: galactosidase, putative [Arabidopsis thaliana]
  misc_feature (1)..(665): Homolog of NCBI NO: 15231354 NR Description: glycosyl hydrolase family 35 (beta-galactosidase)
  misc_feature (1)..(666): Homolog of NCBI NO: 1168654 NR Description: Beta-galactosidase precursor (Lactase)
  misc_feature (1)..(665): Homolog of NCBI NO: 4138137 NR Description: ss-galactosidase [Lycopersicon esculentum]
  misc_feature (1)..(665): Homolog of NCBI NO: 1352077 NR Description: Beta-galactosidase precursor (Lactase) (Acid
  misc_feature (1)..(665): Homolog of NCBI NO: 14970839 NR Description: beta-galactosidase [Fragaria x ananassa]
  misc_feature (1)..(666): Homolog of NCBI NO: 7682677 NR Description: beta galactosidase [Vigna radiata]
  misc_feature (1)..(665): Homolog of NCBI NO: 12583687 NR Description: beta-D-galactosidase [Pyrus pyrifolia]
  misc_feature (1)..(665): Homolog of NCBI NO: 1352078 NR Description: Beta-galactosidase precursor (Lactase) (Acid
  misc_feature (1)..(665): Homolog of NCBI NO: 3869280 NR Description: beta-galactosidase precursor [Carica papaya]

SEQ ID NO: 48590 - protein, 585 aa, Arabidopsis thaliana; identical to SEQ ID NO: 39027
  peptide (1)..(585): Ceres Seq. ID no. 13497707
  misc_feature (1)..(584): Homolog of NCBI NO: 20260596 NR Description: galactosidase, putative [Arabidopsis thaliana]
  misc_feature (1)..(584): Homolog of NCBI NO: 15231354 NR Description: glycosyl hydrolase family 35 (beta-galactosidase)
  misc_feature (1)..(585): Homolog of NCBI NO: 1168654 NR Description: Beta-galactosidase precursor (Lactase)
  misc_feature (1)..(584): Homolog of NCBI NO: 4138137 NR Description: ss-galactosidase [Lycopersicon esculentum]
  misc_feature (1)..(584): Homolog of NCBI NO: 1352077 NR Description: Beta-galactosidase precursor (Lactase) (Acid
  misc_feature (1)..(584): Homolog of NCBI NO: 14970839 NR Description: beta-galactosidase [Fragaria x ananassa]
  misc_feature (1)..(585): Homolog of NCBI NO: 7682677 NR Description: beta galactosidase [Vigna radiata]
  misc_feature (1)..(584): Homolog of NCBI NO: 12583687 NR Description: beta-D-galactosidase [Pyrus pyrifolia]
  misc_feature (1)..(584): Homolog of NCBI NO: 1352078 NR Description: Beta-galactosidase precursor (Lactase) (Acid
  misc_feature (1)..(584): Homolog of NCBI NO: 3869280 NR Description: beta-galactosidase precursor [Carica papaya]
  misc_feature (1)..(584): Homolog of NCBI NO: 20260596 NR Description: galactosidase, putative [Arabidopsis thaliana]
  misc_feature (1)..(584): Homolog of NCBI NO: 15231354 NR Description: glycosyl hydrolase family 35 (beta-galactosidase)
  misc_feature (1)..(585): Homolog of NCBI NO: 1168654 NR Description: Beta-galactosidase precursor (Lactase)
  misc_feature (1)..(584): Homolog of NCBI NO: 4138137 NR Description: ss-galactosidase [Lycopersicon esculentum]
  misc_feature (1)..(584): Homolog of NCBI NO: 1352077 NR Description: Beta-galactosidase precursor (Lactase) (Acid
  misc_feature (1)..(584): Homolog of NCBI NO: 14970839 NR Description: beta-galactosidase [Fragaria x ananassa]
  misc_feature (1)..(585): Homolog of NCBI NO: 7682677 NR Description: beta galactosidase [Vigna radiata]
  misc_feature (1)..(584): Homolog of NCBI NO: 12583687 NR Description: beta-D-galactosidase [Pyrus pyrifolia]
  misc_feature (1)..(584): Homolog of NCBI NO: 1352078 NR Description: Beta-galactosidase precursor (Lactase) (Acid
  misc_feature (1)..(584): Homolog of NCBI NO: 3869280 NR Description: beta-galactosidase precursor [Carica papaya]

SEQ ID NO: 48591 - DNA, 2058 bp, Arabidopsis thaliana
  misc_feature (1)..(2058): Ceres Seq. ID no. 12600909
  misc_feature: MA Experiment ID: 20000436 Result: Up-regulated in Transcription
  misc_feature: MA Experiment 20000436 PARAMETER Experiment Name: At_Drought_P Parameter: Age (day) Value: 7
  misc_feature: MA Experiment 20000436 PARAMETER Experiment Name: At_Drought_P Parameter: Organism Value: A. thaliana
  misc_feature: MA Experiment 20000436 PARAMETER Experiment Name: At_Drought_P Parameter: Plant Line Value: WS
  misc_feature: MA Experiment 20000436 PARAMETER Experiment Name: At_Drought_P Parameter: Timepoint (hr) Value: 12
  misc_feature: MA Experiment 20000436 PARAMETER Experiment Name: At_Drought_P Parameter: Tissue Value: Whole Plant
  misc_feature: MA Experiment 20000436 PARAMETER Experiment Name: At_Drought_P Parameter: Treatment Value: Drought vs. No Drought
  misc_feature: MA Experiment ID: 20001558 Result: Down-regulated in Transcription
  misc_feature: MA Experiment 20001558 PARAMETER Experiment Name: At_Drought_Soil_Dry_P Parameter: Age (day) Value: 27
  misc_feature: MA Experiment 20001558 PARAMETER Experiment Name: At_Drought_Soil_Dry_P Parameter: Organism Value: A. thaliana
  misc_feature: MA Experiment 20001558 PARAMETER Experiment Name: At_Drought_Soil_Dry_P Parameter: Plant Line Value: WS
  misc_feature: MA Experiment 20001558 PARAMETER Experiment Name: At_Drought_Soil_Dry_P Parameter: Post Timepoint (hr) Value: 6
  misc_feature: MA Experiment 20001558 PARAMETER Experiment Name: At_Drought_Soil_Dry_P Parameter: Post-Treatment Value: Re-Water vs. No Drought
  misc_feature: MA Experiment 20001558 PARAMETER Experiment Name: At_Drought_Soil_Dry_P Parameter: Timepoint (day) Value: 13
  misc_feature: MA Experiment 20001558 PARAMETER Experiment Name: At_Drought_Soil_Dry_P Parameter: Treatment Value: Drought vs. No Drought
  misc_feature: MA Experiment ID: 20001560 Result: Down-regulated in Transcription
  misc_feature: MA Experiment 20001560 PARAMETER Experiment Name: At_Drought_Soil_Dry_P Parameter: Age (day) Value: 28
  misc_feature: MA Experiment 20001560 PARAMETER Experiment Name: At_Drought_Soil_Dry_P Parameter: Organism Value: A. thaliana
  misc_feature: MA Experiment 20001560 PARAMETER Experiment Name: At_Drought_Soil_Dry_P Parameter: Plant Line Value: WS
  misc_feature: MA Experiment 20001560 PARAMETER Experiment Name: At_Drought_Soil_Dry_P Parameter: Post Timepoint (hr) Value: None
  misc_feature: MA Experiment 20001560 PARAMETER Experiment Name: At_Drought_Soil_Dry_P Parameter: Post-Treatment Value: None
  misc_feature: MA Experiment 20001560 PARAMETER Experiment Name: At_Drought_Soil_Dry_P Parameter: Timepoint (day) Value: 14
  misc_feature: MA Experiment 20001560 PARAMETER Experiment Name: At_Drought_Soil_Dry_P Parameter: Treatment Value: Drought vs. No Drought
  misc_feature: MA Experiment ID: 20001911 Result: Up-regulated in Transcription
  misc_feature: MA Experiment 20001911 PARAMETER Experiment Name: At_Drought_Reproduction_P Parameter: Age (day) Value: 40
  misc_feature: MA Experiment 20001911 PARAMETER Experiment Name: At_Drought_Reproduction_P Parameter: Organism Value: A. thaliana
  misc_feature: MA Experiment 20001911 PARAMETER Experiment Name: At_Drought_Reproduction_P Parameter: Plant Line Value: WS
  misc_feature: MA Experiment 20001911 PARAMETER Experiment Name: At_Drought_Reproduction_P Parameter: Timepoint (day) Value: 10
  misc_feature: MA Experiment 20001911 PARAMETER Experiment Name: At_Drought_Reproduction_P Parameter: Tissue Value: Flowers
  misc_feature: MA Experiment 20001911 PARAMETER Experiment Name: At_Drought_Reproduction_P Parameter: Treatment Value: Drought vs. No Drought
agatccaaagaggacttttttcagcttcattgctctcttaaaatctgtggtaatctctcttccattgttattcttcaagtaaataatgccctttgctcctctctcaacaccatttatcttataaaccctagacactccgccgaatttttacccttctccactggtcatccgcgttttttttccgggtctaaggtcaccggaaaaatggctttccggcgagtgttaaccactgtaatcctcttctgctacttactaatttcatctcaatccattgaattcaaaaactcccagaaaccccacaagatccaaggaccaatcaagactatagtcgttgtagtcatggagaatcgctccttcgatcacatcctcggttggctcaaatcgacccgacccgaaatcgacggattaaccggcaaagagtcaaatcccctcaacgtctccgatccaaattccaaaaagatcttcgtctcagacgacgccgtcttcgtagacatggatccgggtcactcattccaagcgatccgagaacagatattcgggtctaacgatacatccggcgacccgaaaatgaacggattcgcacagcaatcagagagtatggagcctggaatggctaagaacgttatgagcgggttcaaacccgaagtcttaccggtttacaccgagttagcgaacgagttcggagttttcgatcgatggttcgcttcagtaccaacttcgactcaaccgaatcggttctacgttcactcagctacttctcatggatgctcaagcaacgtgaagaaagatctcgttaaagggtttcctcaaaagacgatctttgattcgttagatgagaacggactcagttttgggatttattaccaaaacatccctgcgacgttcttcttcaagtctcttcgtaggcttaagcatttggtgaaattccatagctatgcacttaagttcaagctcgacgctaagcttgggaagcttccgaattattctgtcgtggaacagagatatttcgatatcgatctttttccggctaatgatgatcatccgtcgcatgacgtggcggcgggtcaacggtttgttaaggaagtttatgagacgttacggagtagtccacagtggaaagagatggctttgctcattacttatgatgagcacggtgggttttatgaccatgttcccacgccggttaaaggtgtgcctaaccctgatggtatcattggacctgatccgttttactttgggtttgaccgattgggtgttcgggtccctacctttctgatctcctcctggattgagaagggcactgtgatacatgaacctgaaggtccaacaccacattcacaatttgagcattcttctatccctgcaacggtgaagaaactcttcaacctaaagtctcacttccttacaaagagagatgcatgggctggtacatttgagaaatacttccgtatccgagattctcctcgccaagattgtccagagaaactgccggaagtgaaactatcgctgaggccatggggagcaaaagaagactcaaagctctcagaattccaggtggagctgatccaactggcctctcaactcgttggagaccatctcctaaactcatatccagacattgggaagaacatgacagtaagtgaaggcaacaaatacgcagaagacgctgttcagaagtttctggaagcagggatggctgcactggaagcaggagcagacgaaaacactatagtcactatgaggccgtctctgacaaccaggaccagtcccagtgaagggaccaacaagtatattggaagctactgaaatctataactaaaaaacggattttatgtaaatatatgtgccctctgcatgtacccacttttacttagatgcatatatgatgtggtgaaagtatatatattatataatggatcaaagaatatggtaacggaatgtagtacccttgcgatgattgtcgggtatggcctccatctccatagttggaatggatcgaggcttcctgtaatactaaaatgtatccttatcctaaaatagacaaagaatcattgtatt

SEQ ID NO: 48592 - protein, 601 aa, Arabidopsis thaliana
  peptide (1)..(601): Ceres Seq. ID no. 12600910
  misc_feature (106)..(481): Pfam Name: Phosphoesterase family Pfam Description: Phosphoesterase family
  misc_feature (104)..(597): Homolog of NCBI NO: 27573343 NR Description: putative phosphoesterase [Oryza sativa (japonica
  misc_feature (105)..(596): Homolog of NCBI NO: 17529016 NR Description: unknown protein [Arabidopsis thaliana]
  misc_feature (105)..(596): Homolog of NCBI NO: 15228577 NR Description: unknown protein
  misc_feature (105)..(578): Homolog of NCBI NO: 18396577 NR Description: expressed protein
  misc_feature (96)..(587): Homolog of NCBI NO: 30693062 NR Description: phosphoesterase family [Arabidopsis thaliana]
  misc_feature (105)..(591): Homolog of NCBI NO: 20161866 NR Description: B1139B11.7 [Oryza sativa (japonica
  misc_feature (105)..(587): Homolog of NCBI NO: 15225806 NR Description: putative phospholipase C; protein id: At2g26870.1
  misc_feature (67)..(591): Homolog of NCBI NO: 34897344 NR Description: putative phospholipase [Oryza sativa]
  misc_feature (69)..(601): Homolog of NCBI NO: 21703147 NR Description: At1g07230/F10K1_4 [Arabidopsis thaliana]
  misc_feature (69)..(601): Homolog of NCBI NO: 15222342 NR Description: unknown protein; protein id: At1g07230.1
RSKEDFFQLHCSLKICGNLSSIVILQVNNALCSSLNTIYLINPRHSAEFLPFSTGHPRFFSGSKVTGKMAFRRVLTTVILFCYLLISSQSIEFKNSQKPHKIQGPIKTIVVVVMENRSFDHILGWLKSTRPEIDGLTGKESNPLNVSDPNSKKIFVSDDAVFVDMDPGHSFQAIREQIFGSNDTSGDPKMNGFAQQSESMEPGMAKNVMSGFKPEVLPVYTELANEFGVFDRWFASVPTSTQPNRFYVHSATSHGCSSNVKKDLVKGFPQKTIFDSLDENGLSFGIYYQNIPATFFFKSLRRLKHLVKFHSYALKFKLDAKLGKLPNYSVVEQRYFDIDLFPANDDHPSHDVAAGQRFVKEVYETLRSSPQWKEMALLITYDEHGGFYDHVPTPVKGVPNPDGIIGPDPFYFGFDRLGVRVPTFLISSWIEKGTVIHEPEGPTPHSQFEHSSIPATVKKLFNLKSHFLTKRDAWAGTFEKYFRIRDSPRQDCPEKLPEVKLSLRPWGAKEDSKLSEFQVELIQLASQLVGDHLLNSYPDIGKNMTVSEGNKYAEDAVQKFLEAGMAALEAGADENTIVTMRPSLTTRTSPSEGTNKYIGSY

SEQ ID NO: 48593 - protein, 533 aa, Arabidopsis thaliana
  peptide (1)..(533): Ceres Seq. ID no. 12600911
  misc_feature (38)..(413): Pfam Name: Phosphoesterase family Pfam Description: Phosphoesterase family
  misc_feature (36)..(529): Homolog of NCBI NO: 27573343 NR Description: putative phosphoesterase [Oryza sativa (japonica
  misc_feature (37)..(528): Homolog of NCBI NO: 17529016 NR Description: unknown protein [Arabidopsis thaliana]
  misc_feature (37)..(528): Homolog of NCBI NO: 15228577 NR Description: unknown protein
  misc_feature (37)..(510): Homolog of NCBI NO: 18396577 NR Description: expressed protein
  misc_feature (28)..(519): Homolog of NCBI NO: 30693062 NR Description: phosphoesterase family [Arabidopsis thaliana]
  misc_feature (37)..(523): Homolog of NCBI NO: 20161866 NR Description: B1139B11.7 [Oryza sativa (japonica
  misc_feature (37)..(519): Homolog of NCBI NO: 15225806 NR Description: putative phospholipase C; protein id: At2g26870.1
  misc_feature (1)..(523): Homolog of NCBI NO: 34897344 NR Description: putative phospholipase [Oryza sativa]
  misc_feature (1)..(533): Homolog of NCBI NO: 21703147 NR Description: At1g07230/F10K1_4 [Arabidopsis thaliana]
  misc_feature (1)..(533): Homolog of NCBI NO: 15222342 NR Description: unknown protein; protein id: At1g07230.1
MAFRRVLTTVILFCYLLISSQSIEFKNSQKPHKIQGPIKTIVVVVMENRSFDHILGWLKSTRPEIDGLTGKESNPLNVSDPNSKKIFVSDDAVFVDMDPGHSFQAIREQIFGSNDTSGDPKMNGFAQQSESMEPGMAKNVMSGFKPEVLPVYTELANEFGVFDRWFASVPTSTQPNRFYVHSATSHGCSSNVKKDLVKGFPQKTIFDSLDENGLSFGIYYQNIPATFFFKSLRRLKHLVKFHSYALKFKLDAKLGKLPNYSVVEQRYFDIDLFPANDDHPSHDVAAGQRFVKEVYETLRSSPQWKEMALLITYDEHGGFYDHVPTPVKGVPNPDGIIGPDPFYFGFDRLGVRVPTFLISSWIEKGTVIHEPEGPTPHSQFEHSSIPATVKKLFNLKSHFLTKRDAWAGTFEKYFRIRDSPRQDCPEKLPEVKLSLRPWGAKEDSKLSEFQVELIQLASQLVGDHLLNSYPDIGKNMTVSEGNKYAEDAVQKFLEAGMAALEAGADENTIVTMRPSLTTRTSPSEGTNKYIGSY

SEQ ID NO: 48594 - protein, 488 aa, Arabidopsis thaliana
  peptide (1)..(488): Ceres Seq. ID no. 12600912
  misc_feature (1)..(368): Pfam Name: Phosphoesterase family Pfam Description: Phosphoesterase family
  misc_feature (1)..(484): Homolog of NCBI NO: 27573343 NR Description: putative phosphoesterase [Oryza sativa (japonica
  misc_feature (1)..(483): Homolog of NCBI NO: 17529016 NR Description: unknown protein [Arabidopsis thaliana]
  misc_feature (1)..(483): Homolog of NCBI NO: 15228577 NR Description: unknown protein
  misc_feature (1)..(465): Homolog of NCBI NO: 18396577 NR Description: expressed protein
  misc_feature (1)..(474): Homolog of NCBI NO: 30693062 NR Description: phosphoesterase family [Arabidopsis thaliana]
  misc_feature (1)..(478): Homolog of NCBI NO: 20161866 NR Description: B1139B11.7 [Oryza sativa (japonica
  misc_feature (1)..(474): Homolog of NCBI NO: 15225806 NR Description: putative phospholipase C; protein id: At2g26870.1
  misc_feature (1)..(478): Homolog of NCBI NO: 34897344 NR Description: putative phospholipase [Oryza sativa]
  misc_feature (1)..(488): Homolog of NCBI NO: 21703147 NR Description: At1g07230/F10K1_4 [Arabidopsis thaliana]
  misc_feature (1)..(488): Homolog of NCBI NO: 15222342 NR Description: unknown protein; protein id: At1g07230.1
MENRSFDHILGWLKSTRPEIDGLTGKESNPLNVSDPNSKKIFVSDDAVFVDMDPGHSFQAIREQIFGSNDTSGDPKMNGFAQQSESMEPGMAKNVMSGFKPEVLPVYTELANEFGVFDRWFASVPTSTQPNRFYVHSATSHGCSSNVKKDLVKGFPQKTIFDSLDENGLSFGIYYQNIPATFFFKSLRRLKHLVKFHSYALKFKLDAKLGKLPNYSVVEQRYFDIDLFPANDDHPSHDVAAGQRFVKEVYETLRSSPQWKEMALLITYDEHGGFYDHVPTPVKGVPNPDGIIGPDPFYFGFDRLGVRVPTFLISSWIEKGTVIHEPEGPTPHSQFEHSSIPATVKKLFNLKSHFLTKRDAWAGTFEKYFRIRDSPRQDCPEKLPEVKLSLRPWGAKEDSKLSEFQVELIQLASQLVGDHLLNSYPDIGKNMTVSEGNKYAEDAVQKFLEAGMAALEAGADENTIVTMRPSLTTRTSPSEGTNKYIGSY

SEQ ID NO: 48595 - DNA, 1885 bp, Arabidopsis thaliana
  misc_feature (1)..(1885): Ceres Seq. ID no. 14313182
  misc_feature: MA Experiment ID: 20000173 Result: Up-regulated in Transcription
  misc_feature: MA Experiment 20000173 PARAMETER Experiment Name: At_42deg_Heat_P Parameter: Age (day) Value: 14
  misc_feature: MA Experiment 20000173 PARAMETER Experiment Name: At_42deg_Heat_P Parameter: Organism Value: A. thaliana
  misc_feature: MA Experiment 20000173 PARAMETER Experiment Name: At_42deg_Heat_P Parameter: Plant Line Value: WS
  misc_feature: MA Experiment 20000173 PARAMETER Experiment Name: At_42deg_Heat_P Parameter: Temperature (deg C) Value: 42 vs. 22
  misc_feature: MA Experiment 20000173 PARAMETER Experiment Name: At_42deg_Heat_P Parameter: Timepoint (hr) Value: 6
  misc_feature: MA Experiment 20000173 PARAMETER Experiment Name: At_42deg_Heat_P Parameter: Tissue Value: Aerial
  misc_feature: MA Experiment ID: 20000180 Result: Up-regulated in Transcription
  misc_feature: MA Experiment 20000180 PARAMETER Experiment Name: At_Germinating_Seeds_P Parameter: Age (hr) Value: 24 vs. 0
  misc_feature: MA Experiment 20000180 PARAMETER Experiment Name: At_Germinating_Seeds_P Parameter: Tissue Value: Germinating Seeds
  misc_feature: MA Experiment ID: 20000182 Result: Up-regulated in Transcription
  misc_feature: MA Experiment 20000182 PARAMETER Experiment Name: At_2mM_SA_P Parameter: Age (day) Value: 14
  misc_feature: MA Experiment 20000182 PARAMETER Experiment Name: At_2mM_SA_P Parameter: Organism Value: A. thaliana
  misc_feature: MA Experiment 20000182 PARAMETER Experiment Name: At_2mM_SA_P Parameter: Plant Line Value: WS
  misc_feature: MA Experiment 20000182 PARAMETER Experiment Name: At_2mM_SA_P Parameter: Timepoint (hr) Value: 6
  misc_feature: MA Experiment 20000182 PARAMETER Experiment Name: At_2mM_SA_P Parameter: Tissue Value: Aerial
  misc_feature: MA Experiment 20000182 PARAMETER Experiment Name: At_2mM_SA_P Parameter: Treatment Value: 2mM SA vs. No Treatment
  misc_feature: MA Experiment ID: 20000184 Result: Up-regulated in Transcription
  misc_feature: MA Experiment 20000184 PARAMETER Experiment Name: At_Shoots__P Parameter: Age (day) Value: 7
  misc_feature: MA Experiment 20000184 PARAMETER Experiment Name: At_Shoots__P Parameter: Tissue Value: Shoots vs. Whole Plant
  misc_feature: MA Experiment ID: 20000185 Result: Up-regulated in Transcription
  misc_feature: MA Experiment 20000185 PARAMETER Experiment Name: At_Roots__P Parameter: Age (day) Value: 7 vs. 21
  misc_feature: MA Experiment 20000185 PARAMETER Experiment Name: At_Roots__P Parameter: Organism Value: A. thaliana
  misc_feature: MA Experiment 20000185 PARAMETER Experiment Name: At_Roots__P Parameter: Tissue Value: Roots vs. Whole Plant
  misc_feature: MA Experiment ID: 20000264 Result: Up-regulated in Transcription
  misc_feature: MA Experiment 20000264 PARAMETER Experiment Name: At_Open_Flower_P Parameter: Age (day) Value: 21
  misc_feature: MA Experiment 20000264 PARAMETER Experiment Name: At_Open_Flower_P Parameter: Plant Line Value: WS
  misc_feature: MA Experiment 20000264 PARAMETER Experiment Name: At_Open_Flower_P Parameter: Tissue Value: Open Flower vs. Whole Plant
  misc_feature: MA Experiment ID: 20000268 Result: Up-regulated in Transcription
  misc_feature: MA Experiment 20000268 PARAMETER Experiment Name: At_100mM_NaCl__P Parameter: Age (day) Value: 14
  misc_feature: MA Experiment 20000268 PARAMETER Experiment Name: At_100mM_NaCl__P Parameter: Organism Value: A. thaliana
  misc_feature: MA Experiment 20000268 PARAMETER Experiment Name: At_100mM_NaCl__P Parameter: Plant Line Value: WS
  misc_feature: MA Experiment 20000268 PARAMETER Experiment Name: At_100mM_NaCl__P Parameter: Timepoint (hr) Value: 6
  misc_feature: MA Experiment 20000268 PARAMETER Experiment Name: At_100mM_NaCl__P Parameter: Tissue Value: Whole Plant
  misc_feature: MA Experiment 20000268 PARAMETER Experiment Name: At_100mM_NaCl__P Parameter: Treatment Value: 100mM NaCl vs. No Treatment
  misc_feature: MA Experiment ID: 20000436 Result: Up-regulated in Transcription
  misc_feature: MA Experiment 20000436 PARAMETER Experiment Name: At_Drought_P Parameter: Age (day) Value: 7
  misc_feature: MA Experiment 20000436 PARAMETER Experiment Name: At_Drought_P Parameter: Organism Value: A. thaliana
  misc_feature: MA Experiment 20000436 PARAMETER Experiment Name: At_Drought_P Parameter: Plant Line Value: WS
  misc_feature: MA Experiment 20000436 PARAMETER Experiment Name: At_Drought_P Parameter: Timepoint (hr) Value: 12
  misc_feature: MA Experiment 20000436 PARAMETER Experiment Name: At_Drought_P Parameter: Tissue Value: Whole Plant
  misc_feature: MA Experiment 20000436 PARAMETER Experiment Name: At_Drought_P Parameter: Treatment Value: Drought vs. No Drought
  misc_feature: MA Experiment ID: 20000438 Result: Up-regulated in Transcription
  misc_feature: MA Experiment 20000438 PARAMETER Experiment Name: At_Shoots__P Parameter: Age (day) Value: 14
  misc_feature: MA Experiment 20000438 PARAMETER Experiment Name: At_Shoots__P Parameter: Tissue Value: Shoots vs. Whole Plant
  misc_feature: MA Experiment ID: 20000439 Result: Up-regulated in Transcription
  misc_feature: MA Experiment 20000439 PARAMETER Experiment Name: At_Roots__P Parameter: Age (day) Value: 14 vs. 21
  misc_feature: MA Experiment 20000439 PARAMETER Experiment Name: At_Roots__P Parameter: Organism Value: A. thaliana
  misc_feature: MA Experiment 20000439 PARAMETER Experiment Name: At_Roots__P Parameter: Tissue Value: Roots vs. Whole Plant
  misc_feature: MA Experiment ID: 20000441 Result: Up-regulated in Transcription
  misc_feature: MA Experiment 20000441 PARAMETER Experiment Name: At_1uM_BR-BRZ__P Parameter: Tissue Value: Shoot Apices
  misc_feature: MA Experiment 20000441 PARAMETER Experiment Name: At_1uM_BR-BRZ__P Parameter: Treatment Value: 1uM BR vs. No Treatment
  misc_feature: MA Experiment ID: 20000443 Result: Up-regulated in Transcription
  misc_feature: MA Experiment 20000443 PARAMETER Experiment Name: At_1uM_BR-BRZ__P Parameter: Tissue Value: Shoot Apices
  misc_feature: MA Experiment 20000443 PARAMETER Experiment Name: At_1uM_BR-BRZ__P Parameter: Treatment Value: 1uM BRZ vs. No Treatment
  misc_feature: MA Experiment ID: 20000445 Result: Up-regulated in Transcription
  misc_feature: MA Experiment 20000445 PARAMETER Experiment Name: At_100uM_NAA__P Parameter: Age (day) Value: 14
  misc_feature: MA Experiment 20000445 PARAMETER Experiment Name: At_100uM_NAA__P Parameter: Organism Value: A. thaliana
  misc_feature: MA Experiment 20000445 PARAMETER Experiment Name: At_100uM_NAA__P Parameter: Plant Line Value: WS
  misc_feature: MA Experiment 20000445 PARAMETER Experiment Name: At_100uM_NAA__P Parameter: Timepoint (hr) Value: 6
  misc_feature: MA Experiment 20000445 PARAMETER Experiment Name: At_100uM_NAA__P Parameter: Tissue Value: Aerial
  misc_feature: MA Experiment 20000445 PARAMETER Experiment Name: At_100uM_NAA__P Parameter: Treatment Value: 100uM NAA vs. No Treatment
  misc_feature: MA Experiment ID: 20000495 Result: Down-regulated in Transcription
  misc_feature: MA Experiment 20000495 PARAMETER Experiment Name: At_Guard_Cells_P Parameter: Harvest Date Value: 8/2/2002
  misc_feature: MA Experiment 20000495 PARAMETER Experiment Name: At_Guard_Cells_P Parameter: Organism Value: A. thaliana
  misc_feature: MA Experiment 20000495 PARAMETER Experiment Name: At_Guard_Cells_P Parameter: Tissue Value: Guard Cells vs. Leaves
  misc_feature: MA Experiment ID: 20000496 Result: Down-regulated in Transcription
  misc_feature: MA Experiment 20000496 PARAMETER Experiment Name: At_Guard_Cells_P Parameter: Harvest Date Value: 7/19/2002
  misc_feature: MA Experiment 20000496 PARAMETER Experiment Name: At_Guard_Cells_P Parameter: Organism Value: Canola
  misc_feature: MA Experiment 20000496 PARAMETER Experiment Name: At_Guard_Cells_P Parameter: Tissue Value: Guard Cells vs. Leaves
  misc_feature: MA Experiment ID: 20000573 Result: Down-regulated in Transcription
  misc_feature: MA Experiment 20000573 PARAMETER Experiment Name: At_100uM_ABA_Mutants__P Parameter: Organism Value: A. thaliana
  misc_feature: MA Experiment 20000573 PARAMETER Experiment Name: At_100uM_ABA_Mutants__P Parameter: Plant Line Value: CS22 vs. Ler wt
  misc_feature: MA Experiment 20000573 PARAMETER Experiment Name: At_100uM_ABA_Mutants__P Parameter: Timepoint (hr) Value: N/A
  misc_feature: MA Experiment 20000573 PARAMETER Experiment Name: At_100uM_ABA_Mutants__P Parameter: Tissue Value: Whole Plant
  misc_feature: MA Experiment 20000573 PARAMETER Experiment Name: At_100uM_ABA_Mutants__P Parameter: Treatment Value: None
  misc_feature: MA Experiment ID: 20000574 Result: Down-regulated in Transcription
  misc_feature: MA Experiment 20000574 PARAMETER Experiment Name: At_100uM_ABA_Mutants__P Parameter: Organism Value: A. thaliana
  misc_feature: MA Experiment 20000574 PARAMETER Experiment Name: At_100uM_ABA_Mutants__P Parameter: Plant Line Value: CS23 vs. Ler wt
  misc_feature: MA Experiment 20000574 PARAMETER Experiment Name: At_100uM_ABA_Mutants__P Parameter: Timepoint (hr) Value: N/A
  misc_feature: MA Experiment 20000574 PARAMETER Experiment Name: At_100uM_ABA_Mutants__P Parameter: Tissue Value: Whole Plant
  misc_feature: MA Experiment 20000574 PARAMETER Experiment Name: At_100uM_ABA_Mutants__P Parameter: Treatment Value: None
  misc_feature: MA Experiment ID: 20000794 Result: Up-regulated in Transcription
  misc_feature: MA Experiment 20000794 PARAMETER Experiment Name: At_Petals_P Parameter: Age (day) Value: 23-25 days
  misc_feature: MA Experiment 20000794 PARAMETER Experiment Name: At_Petals_P Parameter: Plant Line Value: WS
  misc_feature: MA Experiment 20000794 PARAMETER Experiment Name: At_Petals_P Parameter: Tissue Value: Petals vs. Whole plant
  misc_feature: MA Experiment ID: 20001247 Result: Up-regulated in Transcription
  misc_feature: MA Experiment 20001247 PARAMETER Experiment Name: At_Far-red-induction_P Parameter: Age (day) Value: 7
  misc_feature: MA Experiment 20001247 PARAMETER Experiment Name: At_Far-red-induction_P Parameter: Light Value: Far-red vs. White
  misc_feature: MA Experiment 20001247 PARAMETER Experiment Name: At_Far-red-induction_P Parameter: Organism Value: A. thaliana
  misc_feature: MA Experiment 20001247 PARAMETER Experiment Name: At_Far-red-induction_P Parameter: Plant Line Value: Columbia
  misc_feature: MA Experiment 20001247 PARAMETER Experiment Name: At_Far-red-induction_P Parameter: Timepoint (hr) Value: 1
  misc_feature: MA Experiment 20001247 PARAMETER Experiment Name: At_Far-red-induction_P Parameter: Tissue Value: Whole Plant
  misc_feature: MA Experiment ID: 20001248 Result: Down-regulated in Transcription
  misc_feature: MA Experiment 20001248 PARAMETER Experiment Name: At_Far-red-induction_P Parameter: Age (day) Value: 7
  misc_feature: MA Experiment 20001248 PARAMETER Experiment Name: At_Far-red-induction_P Parameter: Light Value: Far-red vs. White
  misc_feature: MA Experiment 20001248 PARAMETER Experiment Name: At_Far-red-induction_P Parameter: Organism Value: A. thaliana
  misc_feature: MA Experiment 20001248 PARAMETER Experiment Name: At_Far-red-induction_P Parameter: Plant Line Value: Columbia
  misc_feature: MA Experiment 20001248 PARAMETER Experiment Name: At_Far-red-induction_P Parameter: Timepoint (hr) Value: 4
  misc_feature: MA Experiment 20001248 PARAMETER Experiment Name: At_Far-red-induction_P Parameter: Tissue Value: Whole Plant
  misc_feature: MA Experiment ID: 20001554 Result: Up-regulated in Transcription
  misc_feature: MA Experiment 20001554 PARAMETER Experiment Name: At_Drought_Soil_Dry_P Parameter: Age (day) Value: 21
  misc_feature: MA Experiment 20001554 PARAMETER Experiment Name: At_Drought_Soil_Dry_P Parameter: Organism Value: A. thaliana
  misc_feature: MA Experiment 20001554 PARAMETER Experiment Name: At_Drought_Soil_Dry_P Parameter: Plant Line Value: WS
  misc_feature: MA Experiment 20001554 PARAMETER Experiment Name: At_Drought_Soil_Dry_P Parameter: Post Timepoint (hr) Value: None
  misc_feature: MA Experiment 20001554 PARAMETER Experiment Name: At_Drought_Soil_Dry_P Parameter: Post-Treatment Value: None
  misc_feature: MA Experiment 20001554 PARAMETER Experiment Name: At_Drought_Soil_Dry_P Parameter: Timepoint (day) Value: 7
  misc_feature: MA Experiment 20001554 PARAMETER Experiment Name: At_Drought_Soil_Dry_P Parameter: Treatment Value: Drought vs. No Drought
  misc_feature: MA Experiment ID: 20001558 Result: Down-regulated in Transcription
  misc_feature: MA Experiment 20001558 PARAMETER Experiment Name: At_Drought_Soil_Dry_P Parameter: Age (day) Value: 27
  misc_feature: MA Experiment 20001558 PARAMETER Experiment Name: At_Drought_Soil_Dry_P Parameter: Organism Value: A. thaliana
  misc_feature: MA Experiment 20001558 PARAMETER Experiment Name: At_Drought_Soil_Dry_P Parameter: Plant Line Value: WS
  misc_feature: MA Experiment 20001558 PARAMETER Experiment Name: At_Drought_Soil_Dry_P Parameter: Post Timepoint (hr) Value: 6
  misc_feature: MA Experiment 20001558 PARAMETER Experiment Name: At_Drought_Soil_Dry_P Parameter: Post-Treatment Value: Re-Water vs. No Drought
  misc_feature: MA Experiment 20001558 PARAMETER Experiment Name: At_Drought_Soil_Dry_P Parameter: Timepoint (day) Value: 13
  misc_feature: MA Experiment 20001558 PARAMETER Experiment Name: At_Drought_Soil_Dry_P Parameter: Treatment Value: Drought vs. No Drought
  misc_feature: MA Experiment ID: 20001560 Result: Down-regulated in Transcription
  misc_feature: MA Experiment 20001560 PARAMETER Experiment Name: At_Drought_Soil_Dry_P Parameter: Age (day) Value: 28
  misc_feature: MA Experiment 20001560 PARAMETER Experiment Name: At_Drought_Soil_Dry_P Parameter: Organism Value: A. thaliana
  misc_feature: MA Experiment 20001560 PARAMETER Experiment Name: At_Drought_Soil_Dry_P Parameter: Plant Line Value: WS
  misc_feature: MA Experiment 20001560 PARAMETER Experiment Name: At_Drought_Soil_Dry_P Parameter: Post Timepoint (hr) Value: None
  misc_feature: MA Experiment 20001560 PARAMETER Experiment Name: At_Drought_Soil_Dry_P Parameter: Post-Treatment Value: None
  misc_feature: MA Experiment 20001560 PARAMETER Experiment Name: At_Drought_Soil_Dry_P Parameter: Timepoint (day) Value: 14
  misc_feature: MA Experiment 20001560 PARAMETER Experiment Name: At_Drought_Soil_Dry_P Parameter: Treatment Value: Drought vs. No Drought
  misc_feature: MA Experiment ID: 20001905 Result: Up-regulated in Transcription
  misc_feature: MA Experiment 20001905 PARAMETER Experiment Name: At_Drought_Reproduction_P Parameter: Age (day) Value: 40
  misc_feature: MA Experiment 20001905 PARAMETER Experiment Name: At_Drought_Reproduction_P Parameter: Organism Value: A. thaliana
  misc_feature: MA Experiment 20001905 PARAMETER Experiment Name: At_Drought_Reproduction_P Parameter: Plant Line Value: WS
  misc_feature: MA Experiment 20001905 PARAMETER Experiment Name: At_Drought_Reproduction_P Parameter: Timepoint (day) Value: 10
  misc_feature: MA Experiment 20001905 PARAMETER Experiment Name: At_Drought_Reproduction_P Parameter: Tissue Value: Rosettes
  misc_feature: MA Experiment 20001905 PARAMETER Experiment Name: At_Drought_Reproduction_P Parameter: Treatment Value: Drought vs. No Drought
  misc_feature: MA Experiment ID: 20001906 Result: Up-regulated in Transcription
  misc_feature: MA Experiment 20001906 PARAMETER Experiment Name: At_Drought_Reproduction_P Parameter: Age (day) Value: 35
  misc_feature: MA Experiment 20001906 PARAMETER Experiment Name: At_Drought_Reproduction_P Parameter: Organism Value: A. thaliana
  misc_feature: MA Experiment 20001906 PARAMETER Experiment Name: At_Drought_Reproduction_P Parameter: Plant Line Value: WS
  misc_feature: MA Experiment 20001906 PARAMETER Experiment Name: At_Drought_Reproduction_P Parameter: Timepoint (day) Value: 5
  misc_feature: MA Experiment 20001906 PARAMETER Experiment Name: At_Drought_Reproduction_P Parameter: Tissue Value: Siliques
  misc_feature: MA Experiment 20001906 PARAMETER Experiment Name: At_Drought_Reproduction_P Parameter: Treatment Value: Drought vs. No Drought
gaacgaagattctcttgctcgaacaaaaaaattctctccgcgatacttacaaagcacaagtgagctagctttgagaaagattcaatttttgagccttaagattgtgatgggagttgtgtctatttcaagttcagcttcaagatctccactcgggttgggcaacgatcttttgacacatcggtcttcacttaaaaagccatccattgttgcttttaaagccgatgattccagcaattcagctttgatcattcctcctcgtgagcaagttttgattcctgctgaaaagcataatgagaagaagagagaagtaacgaggagaaagccttgtaaaaccccgaaaaaaccgctttccttggaacataattcggctccttcgtgttcgttaggagtagattacaatgaagctgctgcaagacttgaaagcatatacaagcttagtcctgcaacaaccacattagtcgaggatgatgttgaagatggcggctctaaagccaaagtttcacggaggagaaaaaggaaagaaagtggtgaggagaagaaagtggttgtgaggaataatgtgaagaaggaaaaacgtatgagtcttgataaacggattgctttgaagagaaacgttcaagagaaaccagtcgttgcttctgttgataagaaagtaacaaagaggcagcaagaagaggagaagatcgagaggcttgtgcgggactattcagcttctaatgatatagtgagcttggactggaaaaaaatgaagatacctcctgttctttcttctactgaacatgcttggttgttcaagttgatgcaacctatgaaggctcttcttgaagtgaaagatgtattgcaaaagagcttgggaagagagcctagggaagctgaaatagccggggagatcaatatgactgcgggtgaagtaaaaaagaaaatcgaaataggtagagctgcaagaaacaaacttattaagcacaatctccggcttgtcttgtttgttatgaacaaatactttcatgagtttaccaacggaccaaaattccaagacctttgtcaagcgggtatgagagggcttatcacagcaattgaccgctttgagccgaaaaggaagtttcgtctttcgacttatggtttgttttggattagacatgccatcatacggtcaatgacaacttcaaacttcactcgtgtcccatttggacttgaatcggttagagtggagatatataaagcaaagactgagctatggtttgagatgggaagacctccaacggaggacgaggtagttgagagactcaagataacacctgagagataccgtgaagtattgagggctgcaaaaccggttttgtcactaaattcaaaacattcggttactcaagaagaattcatcaacggaatcacagatgttgatggtgttggagctaataacagcagacagcctgctcttctcaggctcgctctcgacgatgtgctcgattcattgaagccgaaagagagtctggttattcgacagaggtacggtcttgatggaaaaggcgacaggactctaggagagatagctggaaatctcaacatctctagagaaatggttaggaaacatgaagtcaaggccttgatgaagcttaagcatcaggccagagttgattaccttcgtcaatacatcgtctaaaaccaaaccgaaccgaactgagccgcctcactcaaccatttgtgcatacttggtatgatttcccgactttacgagatacttcacaccctcttataaccgttgtatagtagtgtatgtaatagcggagttacttatagctgcgttaaatcgatcagtgaatcgcaatcgttgtattatatcattagtatactcatactgaaaagttatacatgtaaagtttgagat

SEQ ID NO: 48596 - protein, 552 aa, Arabidopsis thaliana
  peptide (1)..(552): Ceres Seq. ID no. 14313183
  misc_feature (394)..(475): Pfam Name: Sigma-70 region 3 Pfam Description: Sigma-70 region 3
  misc_feature (216)..(551): Homolog of NCBI NO: 558881 NR Description: SigA [Synechococcus sp. PCC 7002]
  misc_feature (136)..(551): Homolog of NCBI NO: 16332132 NR Description: RNA polymerase sigma factor [Synechocystis sp.
  misc_feature (254)..(551): Homolog of NCBI NO: 23041419 NR Description: hypothetical protein [Trichodesmium erythraeum
  misc_feature (211)..(551): Homolog of NCBI NO: 97628 NR Description: transcription initiation factor sigma A -
  misc_feature (211)..(551): Homolog of NCBI NO: 217140 NR Description: principal sigma factor [Synechococcus sp.]
  misc_feature (215)..(551): Homolog of NCBI NO: 23128093 NR Description: hypothetical protein [Nostoc punctiforme]
  misc_feature (208)..(551): Homolog of NCBI NO: 17232755 NR Description: transcription initiation factor sigma [Nostoc sp.
  misc_feature (131)..(551): Homolog of NCBI NO: 30698488 NR Description: Sig5 [Oryza sativa (japonica cultivar-group)]
  misc_feature (36)..(316): Homolog of NCBI NO: 15010718 NR Description: AT5g24120/MLE8_4 [Arabidopsis thaliana]
  misc_feature (36)..(552): Homolog of NCBI NO: 15237896 NR Description: sigma-related factor (emb CAA77213.1)
NEDSLARTKKFSPRYLQSTSELALRKIQFLSLKIVMGVVSISSSASRSPLGLGNDLLTHRSSLKKPSIVAFKADDSSNSALIIPPREQVLIPAEKHNEKKREVTRRKPCKTPKKPLSLEHNSAPSCSLGVDYNEAAARLESIYKLSPATTTLVEDDVEDGGSKAKVSRRRKRKESGEEKKVVVRNNVKKEKRMSLDKRIALKRNVQEKPVVASVDKKVTKRQQEEEKIERLVRDYSASNDIVSLDWKKMKIPPVLSSTEHAWLFKLMQPMKALLEVKDVLQKSLGREPREAEIAGEINMTAGEVKKKIEIGRAARNKLIKHNLRLVLFVMNKYFHEFTNGPKFQDLCQAGMRGLITAIDRFEPKRKFRLSTYGLFWIRHAIIRSMTTSNFTRVPFGLESVRVEIYKAKTELWFEMGRPPTEDEVVERLKITPERYREVLRAAKPVLSLNSKHSVTQEEFINGITDVDGVGANNSRQPALLRLALDDVLDSLKPKESLVIRQRYGLDGKGDRTLGEIAGNLNISREMVRKHEVKALMKLKHQARVDYLRQYIV

SEQ ID NO: 48597 - protein, 517 aa, Arabidopsis thaliana
  peptide (1)..(517): Ceres Seq. ID no. 14313184
  misc_feature (359)..(440): Pfam Name: Sigma-70 region 3 Pfam Description: Sigma-70 region 3
  misc_feature (181)..(516): Homolog of NCBI NO: 558881 NR Description: SigA [Synechococcus sp. PCC 7002]
  misc_feature (101)..(516): Homolog of NCBI NO: 16332132 NR Description: RNA polymerase sigma factor [Synechocystis sp.
  misc_feature (219)..(516): Homolog of NCBI NO: 23041419 NR Description: hypothetical protein [Trichodesmium erythraeum
  misc_feature (176)..(516): Homolog of NCBI NO: 97628 NR Description: transcription initiation factor sigma A -
  misc_feature (176)..(516): Homolog of NCBI NO: 217140 NR Description: principal sigma factor [Synechococcus sp.]
  misc_feature (180)..(516): Homolog of NCBI NO: 23128093 NR Description: hypothetical protein [Nostoc punctiforme]
  misc_feature (173)..(516): Homolog of NCBI NO: 17232755 NR Description: transcription initiation factor sigma [Nostoc sp.
  misc_feature (96)..(516): Homolog of NCBI NO: 30698488 NR Description: Sig5 [Oryza sativa (japonica cultivar-group)]
  misc_feature (1)..(281): Homolog of NCBI NO: 15010718 NR Description: AT5g24120/MLE8_4 [Arabidopsis thaliana]
  misc_feature (1)..(517): Homolog of NCBI NO: 15237896 NR Description: sigma-related factor (emb CAA77213.1)
MGVVSISSSASRSPLGLGNDLLTHRSSLKKPSIVAFKADDSSNSALIIPPREQVLIPAEKHNEKKREVTRRKPCKTPKKPLSLEHNSAPSCSLGVDYNEAAARLESIYKLSPATTTLVEDDVEDGGSKAKVSRRRKRKESGEEKKVVVRNNVKKEKRMSLDKRIALKRNVQEKPVVASVDKKVTKRQQEEEKIERLVRDYSASNDIVSLDWKKMKIPPVLSSTEHAWLFKLMQPMKALLEVKDVLQKSLGREPREAEIAGEINMTAGEVKKKIEIGRAARNKLIKHNLRLVLFVMNKYFHEFTNGPKFQDLCQAGMRGLITAIDRFEPKRKFRLSTYGLFWIRHAIIRSMTTSNFTRVPFGLESVRVEIYKAKTELWFEMGRPPTEDEVVERLKITPERYREVLRAAKPVLSLNSKHSVTQEEFINGITDVDGVGANNSRQPALLRLALDDVLDSLKPKESLVIRQRYGLDGKGDRTLGEIAGNLNISREMVRKHEVKALMKLKHQARVDYLRQYIV

SEQ ID NO: 48598 - protein, 360 aa, Arabidopsis thaliana
  peptide (1)..(360): Ceres Seq. ID no. 14313185
  misc_feature (202)..(283): Pfam Name: Sigma-70 region 3 Pfam Description: Sigma-70 region 3
  misc_feature (24)..(359): Homolog of NCBI NO: 558881 NR Description: SigA [Synechococcus sp. PCC 7002]
  misc_feature (1)..(359): Homolog of NCBI NO: 16332132 NR Description: RNA polymerase sigma factor [Synechocystis sp.
  misc_feature (62)..(359): Homolog of NCBI NO: 23041419 NR Description: hypothetical protein [Trichodesmium erythraeum
  misc_feature (19)..(359): Homolog of NCBI NO: 97628 NR Description: transcription initiation factor sigma A -
  misc_feature (19)..(359): Homolog of NCBI NO: 217140 NR Description: principal sigma factor [Synechococcus sp.]
  misc_feature (23)..(359): Homolog of NCBI NO: 23128093 NR Description: hypothetical protein [Nostoc punctiforme]
  misc_feature (16)..(359): Homolog of NCBI NO: 17232755 NR Description: transcription initiation factor sigma [Nostoc sp.
  misc_feature (1)..(359): Homolog of NCBI NO: 30698488 NR Description: Sig5 [Oryza sativa (japonica cultivar-group)]
  misc_feature (1)..(124): Homolog of NCBI NO: 15010718 NR Description: AT5g24120/MLE8_4 [Arabidopsis thaliana]
  misc_feature (1)..(360): Homolog of NCBI NO: 15237896 NR Description: sigma-related factor (emb CAA77213.1)
MSLDKRIALKRNVQEKPVVASVDKKVTKRQQEEEKIERLVRDYSASNDIVSLDWKKMKIPPVLSSTEHAWLFKLMQPMKALLEVKDVLQKSLGREPREAEIAGEINMTAGEVKKKIEIGRAARNKLIKHNLRLVLFVMNKYFHEFTNGPKFQDLCQAGMRGLITAIDRFEPKRKFRLSTYGLFWIRHAIIRSMTTSNFTRVPFGLESVRVEIYKAKTELWFEMGRPPTEDEVVERLKITPERYREVLRAAKPVLSLNSKHSVTQEEFINGITDVDGVGANNSRQPALLRLALDDVLDSLKPKESLVIRQRYGLDGKGDRTLGEIAGNLNISREMVRKHEVKALMKLKHQARVDYLRQYIV

SEQ ID NO: 48599 - DNA, 1739 bp, Arabidopsis thaliana
  misc_feature (1)..(1739): Ceres Seq. ID no. 14313206
  misc_feature: MA Experiment ID: 20000179 Result: Up-regulated in Transcription
  misc_feature: MA Experiment 20000179 PARAMETER Experiment Name: At_Germinating_Seeds_P Parameter: Age (hr) Value: 6 vs. 0
  misc_feature: MA Experiment 20000179 PARAMETER Experiment Name: At_Germinating_Seeds_P Parameter: Tissue Value: Germinating Seeds
  misc_feature: MA Experiment ID: 20000180 Result: Up-regulated in Transcription
  misc_feature: MA Experiment 20000180 PARAMETER Experiment Name: At_Germinating_Seeds_P Parameter: Age (hr) Value: 24 vs. 0
  misc_feature: MA Experiment 20000180 PARAMETER Experiment Name: At_Germinating_Seeds_P Parameter: Tissue Value: Germinating Seeds
  misc_feature: MA Experiment ID: 20000182 Result: Down-regulated in Transcription
  misc_feature: MA Experiment 20000182 PARAMETER Experiment Name: At_2mM_SA_P Parameter: Age (day) Value: 14
  misc_feature: MA Experiment 20000182 PARAMETER Experiment Name: At_2mM_SA_P Parameter: Organism Value: A. thaliana
  misc_feature: MA Experiment 20000182 PARAMETER Experiment Name: At_2mM_SA_P Parameter: Plant Line Value: WS
  misc_feature: MA Experiment 20000182 PARAMETER Experiment Name: At_2mM_SA_P Parameter: Timepoint (hr) Value: 6
  misc_feature: MA Experiment 20000182 PARAMETER Experiment Name: At_2mM_SA_P Parameter: Tissue Value: Aerial
  misc_feature: MA Experiment 20000182 PARAMETER Experiment Name: At_2mM_SA_P Parameter: Treatment Value: 2mM SA vs. No Treatment
aacaaaaaatggcagaacttattccttggtactacacttcagggtcagggatcgtacttgtacttcaaaccatttttctcttctcgatcgtacgtgctgatttaccaggctcatgggaactcattgtacaagacgccggtatagcttctatgcacacggcggtgacccggttcaacacggtcatccttctagaccgaactaacatcggaccgtcgagaaaggctcttgaccgtcaccggtgccggagagacccaaaagacgccgctttgaaacgcgattgttacgctcactcggttctgttcgaccttggtacaaatcagatcagaccactgatgatacaaaccgacacgtggtgctcgtcgggccagtttttatccgacggatcgttgctacaaacgggtggggataaagacgggtttaaaaagatacgtaaattcgaaccctgtgacccgaacgaaacgtgcgattgggtggagcttcaagataccgaattgataaccggacgctggtacgcttctaaccagatattaccggatggttcggttatcatcgtcggtggtagaggaactaatacggttgagtattaccctccacgcgaaaacggtgccgttccgtttcagtttcttgctgacgtggaagacaaacaaatggataatctctatccgtacgttcatctcctccccgacgacgacggtggcaatctcttcatcttcgccaacagtcgcgccgttaaatacgatcaccggataaacgccgtcgtgaaagagtatccaccgttagacggtggtccgaggaattatccgtcaggtggatcatcggcgatgctagctatccaaggagatttcaccacagcggagattctaatctgcggcggagcacaatccggagccttcacagcacgtgcaattgatgctccggcgcatggaacctgcggacgaatcgtagctaccgcggcggatcctgtttgggtgacggaggagatgccgttcgggagaatcatgggagatatggtgaatttaccgacgggagagattctgatcataaacggagctcaagacggaagccaaggattcgaaatgggatccgatccgtgtttatacccgcttttataccgacccgatcaaccaattggtttacgattcatgacgttgaacccaggaactgtaccgagaatgtaccattccacggcgaatcttttaccggacggtagaattcttctcgccggaagcaatcctcactatttctacaaattcaacgccgaattcccaacggagctacggatcgaagcgttttcaccggagtatctgtcaccggatcgagctaatctccgaccagagatccaagaaatcccgcagatcatacggtacggagaggttttcgacgtgttcgtgaccgtgccgttgccggtggtggggataattcagatgaattggggaagtgcgccttttgcgactcattcgttttctcaaggtcaacggctcgttaagttgaccgttgctccgtctgtgcctgacggagtaggtcgttataggattcagtgtacggctccacctaacggcgccgtttctccgcctgggtattatatggccttcgctgttaaccagggagttcctagcattgctcgatggatacgaatagtttcttgatttaaaaccagaggagatatttaaaatgttaatttgttaaatagttaaacacatcatgtaatataaatattttcatggaaaaacttactccgc

SEQ ID NO: 48600 - protein, 547 aa, Arabidopsis thaliana
  peptide (1)..(547): Ceres Seq. ID no. 14313207
  misc_feature (36)..(546): Homolog of NCBI NO: 15241135 NR Description: expressed protein [Arabidopsis thaliana]
  misc_feature (35)..(546): Homolog of NCBI NO: 15220398 NR Description: glyoxal oxidase (glx1) -related [Arabidopsis
  misc_feature (32)..(545): Homolog of NCBI NO: 34911116 NR Description: putative glyoxal oxidase [Oryza sativa (japonica
  misc_feature (36)..(542): Homolog of NCBI NO: 15223754 NR Description: expressed protein [Arabidopsis thaliana]
  misc_feature (36)..(545): Homolog of NCBI NO: 25352602 NR Description: F14L17.20 protein - Arabidopsis thaliana
  misc_feature (50)..(545): Homolog of NCBI NO: 25352604 NR Description: hypothetical protein F6F9.4 [imported] -
  misc_feature (38)..(545): Homolog of NCBI NO: 15230360 NR Description: expressed protein [Arabidopsis thaliana]
  misc_feature (19)..(545): Homolog of NCBI NO: 15223699 NR Description: expressed protein [Arabidopsis thaliana]
  misc_feature (25)..(545): Homolog of NCBI NO: 15222300 NR Description: hypothetical protein [Arabidopsis thaliana]
  misc_feature (3)..(547): Homolog of NCBI NO: 15232379 NR Description: expressed protein [Arabidopsis thaliana]
QKMAELIPWYYTSGSGIVLVLQTIFLFSIVRADLPGSWELIVQDAGIASMHTAVTRFNTVILLDRTNIGPSRKALDRHRCRRDPKDAALKRDCYAHSVLFDLGTNQIRPLMIQTDTWCSSGQFLSDGSLLQTGGDKDGFKKIRKFEPCDPNETCDWVELQDTELITGRWYASNQILPDGSVIIVGGRGTNTVEYYPPRENGAVPFQFLADVEDKQMDNLYPYVHLLPDDDGGNLFIFANSRAVKYDHRINAVVKEYPPLDGGPRNYPSGGSSAMLAIQGDFTTAEILICGGAQSGAFTARAIDAPAHGTCGRIVATAADPVWVTEEMPFGRIMGDMVNLPTGEILIINGAQDGSQGFEMGSDPCLYPLLYRPDQPIGLRFMTLNPGTVPRMYHSTANLLPDGRILLAGSNPHYFYKFNAEFPTELRIEAFSPEYLSPDRANLRPEIQEIPQIIRYGEVFDVFVTVPLPVVGIIQMNWGSAPFATHSFSQGQRLVKLTVAPSVPDGVGRYRIQCTAPPNGAVSPPGYYMAFAVNQGVPSIARWIRIVS

SEQ ID NO: 48601 - protein, 545 aa, Arabidopsis thaliana
  peptide (1)..(545): Ceres Seq. ID no. 14313208
  misc_feature (34)..(544): Homolog of NCBI NO: 15241135 NR Description: expressed protein [Arabidopsis thaliana]
  misc_feature (33)..(544): Homolog of NCBI NO: 15220398 NR Description: glyoxal oxidase (glx1) -related [Arabidopsis
  misc_feature (30)..(543): Homolog of NCBI NO: 34911116 NR Description: putative glyoxal oxidase [Oryza sativa (japonica
  misc_feature (34)..(540): Homolog of NCBI NO: 15223754 NR Description: expressed protein [Arabidopsis thaliana]
  misc_feature (34)..(543): Homolog of NCBI NO: 25352602 NR Description: F14L17.20 protein - Arabidopsis thaliana
  misc_feature (48)..(543): Homolog of NCBI NO: 25352604 NR Description: hypothetical protein F6F9.4 [imported] -
  misc_feature (36)..(543): Homolog of NCBI NO: 15230360 NR Description: expressed protein [Arabidopsis thaliana]
  misc_feature (17)..(543): Homolog of NCBI NO: 15223699 NR Description: expressed protein [Arabidopsis thaliana]
  misc_feature (23)..(543): Homolog of NCBI NO: 15222300 NR Description: hypothetical protein [Arabidopsis thaliana]
  misc_feature (1)..(545): Homolog of NCBI NO: 15232379 NR Description: expressed protein [Arabidopsis thaliana]
MAELIPWYYTSGSGIVLVLQTIFLFSIVRADLPGSWELIVQDAGIASMHTAVTRFNTVILLDRTNIGPSRKALDRHRCRRDPKDAALKRDCYAHSVLFDLGTNQIRPLMIQTDTWCSSGQFLSDGSLLQTGGDKDGFKKIRKFEPCDPNETCDWVELQDTELITGRWYASNQILPDGSVIIVGGRGTNTVEYYPPRENGAVPFQFLADVEDKQMDNLYPYVHLLPDDDGGNLFIFANSRAVKYDHRINAVVKEYPPLDGGPRNYPSGGSSAMLAIQGDFTTAEILICGGAQSGAFTARAIDAPAHGTCGRIVATAADPVWVTEEMPFGRIMGDMVNLPTGEILIINGAQDGSQGFEMGSDPCLYPLLYRPDQPIGLRFMTLNPGTVPRMYHSTANLLPDGRILLAGSNPHYFYKFNAEFPTELRIEAFSPEYLSPDRANLRPEIQEIPQIIRYGEVFDVFVTVPLPVVGIIQMNWGSAPFATHSFSQGQRLVKLTVAPSVPDGVGRYRIQCTAPPNGAVSPPGYYMAFAVNQGVPSIARWIRIVS

SEQ ID NO: 48602 - protein, 498 aa, Arabidopsis thaliana
  peptide (1)..(498): Ceres Seq. ID no. 14313209
  misc_feature (1)..(497): Homolog of NCBI NO: 15241135 NR Description: expressed protein [Arabidopsis thaliana]
  misc_feature (1)..(497): Homolog of NCBI NO: 15220398 NR Description: glyoxal oxidase (glx1) -related [Arabidopsis
  misc_feature (1)..(496): Homolog of NCBI NO: 34911116 NR Description: putative glyoxal oxidase [Oryza sativa (japonica
  misc_feature (1)..(493): Homolog of NCBI NO: 15223754 NR Description: expressed protein [Arabidopsis thaliana]
  misc_feature (1)..(496): Homolog of NCBI NO: 25352602 NR Description: F14L17.20 protein - Arabidopsis thaliana
  misc_feature (1)..(496): Homolog of NCBI NO: 25352604 NR Description: hypothetical protein F6F9.4 [imported] -
  misc_feature (1)..(496): Homolog of NCBI NO: 15230360 NR Description: expressed protein [Arabidopsis thaliana]
  misc_feature (1)..(496): Homolog of NCBI NO: 15223699 NR Description: expressed protein [Arabidopsis thaliana]
  misc_feature (1)..(496): Homolog of NCBI NO: 15222300 NR Description: hypothetical protein [Arabidopsis thaliana]
  misc_feature (1)..(498): Homolog of NCBI NO: 15232379 NR Description: expressed protein [Arabidopsis thaliana]
MHTAVTRFNTVILLDRTNIGPSRKALDRHRCRRDPKDAALKRDCYAHSVLFDLGTNQIRPLMIQTDTWCSSGQFLSDGSLLQTGGDKDGFKKIRKFEPCDPNETCDWVELQDTELITGRWYASNQILPDGSVIIVGGRGTNTVEYYPPRENGAVPFQFLADVEDKQMDNLYPYVHLLPDDDGGNLFIFANSRAVKYDHRINAVVKEYPPLDGGPRNYPSGGSSAMLAIQGDFTTAEILICGGAQSGAFTARAIDAPAHGTCGRIVATAADPVWVTEEMPFGRIMGDMVNLPTGEILIINGAQDGSQGFEMGSDPCLYPLLYRPDQPIGLRFMTLNPGTVPRMYHSTANLLPDGRILLAGSNPHYFYKFNAEFPTELRIEAFSPEYLSPDRANLRPEIQEIPQIIRYGEVFDVFVTVPLPVVGIIQMNWGSAPFATHSFSQGQRLVKLTVAPSVPDGVGRYRIQCTAPPNGAVSPPGYYMAFAVNQGVPSIARWIRIVS
